United States Patent Application Publication US 2024/0327476 A1 - sequence listing, part 16

SEQ ID NO: 17826 - DNA, 390 bp, Homo sapiens
  source 1..390: mol_type = unassigned DNA
tggttcagggagggggacagctgaagaaggtgtgaggatgagggagtggtgggtccaggtggggctgctggccgtgcccctgcttgctgcgtacctgcacatcccaccccctcagctctcccctgcccttcactcatggaagtcttcaggcaagtttttcacttacaagggactgcgtatcttctaccaagactctgtgggtgtggttggaagtccagagatagttgtgcttttacacggttttccaacatccagctacgactggtacaagatttgggaaggtctgaccttgaggtttcatcgggtgattgcccttgatttcttaggctttggcttcagtgacaaaccgagaccacatcactattccatatttgagcaggccagcatcgt

SEQ ID NO: 17827 - DNA, 776 bp, Homo sapiens
  source 1..776: mol_type = unassigned DNA
gctgctgtggccaggcgtctggcatgctgaccacgtcgcgctgctgtaaaggaaacctgccccgcgcagcggcggtggctggagcgggagaaaccggactttgtgcaactttggccatagtggccatcccatgaatctgtttactagcttggtggatgagggagtggtgggtccaggtggggctgctggccgtgcccctgcttgctgcgtacctgcacatcccaccccctcagctctcccctgcccttcactcatggaagtcttcaggcaagtttttcacttacaagggactgcgtatcttctaccaagactctgtgggtgtggttggaagtccagagatagttgtgcttttacacggttttccaacatccagctacgactggtacaagatttgggaaggtctgaccttgaggtttcatcgggtgattgcccttgatttcttaggctttggcttcagtgacaaaccgagaccacatcactattccatatttgagcaggccagcatcgtggaagcgcttttgcggcatctggggctccagaaccgcaggatcaaccttctttctcatgactatggagatattgttgctcaggagcttctctacaggtacaagcagaatcgatctggtcggcttaccataaagagtctctgtctgtcaaatggaggtatctttcctgagactcaccgtccactccttctccaaaagctactcaaagatggaggtgtgctgtcacccatcctcacacgactgatgaacttctttgtattctctcgaggg

SEQ ID NO: 17828 - DNA, 582 bp, Homo sapiens
  source 1..582: mol_type = unassigned DNA
gactgtgcctgtgctgaagccctttcctcctcctagctcccaggcagctagaaaattgcctgtctgaaagaaagtagctgttttccttaggggactgtggatgagggagtggtgggtccaggtggggctgctggccgtgcccctgcttgctgcgtacctgcacatcccaccccctcagctctcccctgcccttcactcatggaagtcttcaggcaagtttttcacttacaagggactgcgtatcttctaccaagactctgtgggtgtggttggaagtccagagatagttgtgcttttacacggttttccaacatccagctacgactggtacaagatttgggaaggtctgaccttgaggtttcatcgggtgattgcccttgatttcttaggctttggcttcagtgacaaaccgagaccacatcactattccatatttgagcaggccagcatcgtggaagcgcttttgcggcatctggggctccagaaccgcaggatcaaccttctttctcatgactatggagatattgttgctcaggagcttctctacaggtacaagcagaatcgatctggtcggcttaccat

SEQ ID NO: 17829 - DNA, 555 bp, Homo sapiens
  source 1..555: mol_type = unassigned DNA
attccgcgcccgctctgcctacttgaggagggggtgtcactcctgcccgcaatggaatgttcagaacgcgggacctccttgggttaggatttctagaccccgggatcgtcgtgggattgttcaccttggtttcgcgggttttcaaagtggttcgtctcgcggcgacgccatcaggatgagggagtggtgggtccaggtggggctgctggccgtgcccctgcttgctgcgtacctgcacatcccaccccctcagctctcccctgcccttcactcatggaagtcttcaggcaagtttttcacttacaagggactgcgtatcttctaccaagactctgtgggtgtggttggaagtccagagatagttgtgcttttacacggttttccaacatccagctacgactggtacaagatttgggaaggtctgaccttgaggtttcatcgggtgattgcccttgatttcttaggctttggcttcagtgacaaaccgagaccacatcactattccatatttgagcaggccagcatcgtggaagcgcttttgcggcatctggggct

SEQ ID NO: 17830 - DNA, 541 bp, Homo sapiens
  source 1..541: mol_type = unassigned DNA
aaaatcaattctcacacgctgggatgagggagtggtgggtccaggtggggctgctggccgtgcccctgcttgctgcgtacctgcacatcccaccccctcagctctcccctgcccttcactcatggaagtcttcaggcaagtttttcacttacaagggactgcgtatcttctaccaagactctgtgggtgtggttggaagtccagagatagttgtgcttttacacggttttccaacatccagctacgactggtacaagatttgggaaggtctgaccttgaggtttcatcgggtgattgcccttgatttcttaggctttggcttcagtgacaaaccgagaccacatcactattccatatttgagcaggccagcatcgtggaagcgcttttgcggcatctggggctccagaaccgcaggatcaaccttctttctcatgactatggagatattgttgctcaggagcttctctacaggtacaagcagaatcgatctggtcggcttaccataaagagtctctgtctgtcaaatggaggtaattgcct

SEQ ID NO: 17831 - DNA, 2180 bp, Homo sapiens
  source 1..2180: mol_type = unassigned DNA
ccgaaacatggagtcctgtaggcaaggtcttacctgaatcagtgggtctctgcttttcctacaggatgagggagtggtgggtccaggtggggctgctggccgtgcccctgcttgctgcgtacctgcacatcccaccccctcagctctcccctgcccttcactcatggaagtcttcaggcaagtttttcacttacaagggactgcgtatcttctaccaagactctgtgggtgtggttggaagtccagagatagttgtgcttttacacggttttccaacatccagctacgactggtacaagatttgggaaggtctgaccttgaggtttcatcgggtgattgcccttgatttcttaggctttggcttcagtgacaaaccgagaccacatcactattccatatttgagcaggccagcatcgtggaagcgcttttgcggcatctggggctccagaaccgcaggatcaaccttctttctcatgactatggagatattgttgctcaggagcttctctacaggtacaagcagaatcgatctggtcggcttaccataaagagtctctgtctgtcaaatggaggtatctttcctgagactcaccgtccactccttctccaaaagctactcaaagatggaggtgtgctgtcacccatcctcacacgactgatgaacttctttgtattctctcgaggtctcttacagtacatcaatcagaggaagaagttcagaaggcgctgggtgggagctcttgcctctgtaactatccccattcattttatctatgggccattggatcctgtaaatccctatccagagtttttggagctgtacaggaaaacgctgccgcggtccacagtgtcgattctggatgaccacattagccactatccacagctagaggatcccatgggcttcttgaatgcatatatgggcttcatcaactccttctgagctggaaagagtagcttccctgtattacctcccctactcccttatgtgttgtgtattccacttaggaagaaatgcccaaaagaggtcctggccatcaaacataattctctcacaaagtccactttactcaaattggtgaacagtgtataggaagaagccagcaggagctctgactaaggttgacataatagtccacctcccattactttgatatctgatcaaatgtatagacttggctttgttttttgtgctattaggaaattctgatgagcattactattcactgatgcagaaagacgttcttttgcataaaagacttttttttaacactttggacttctctgaaatatttagaagtgctaatttctggcccacccccaacaggaattctatagtaaggaggaggagaaggggggctccttccctctcctcgaatgacgttatgggcacatgccttttaaaagttctttaagcaacacagagctgagtcctctttgtcatacctttggatttagtgtttcatcagctgtttttagttataaacattttgttaaaatagatattggtttaaatgatacagtattttaggtatgatttaagactatgatttacctatacattatatatattttataaagatactaaaccagcatacccttactctgccagagtagtgaagctaattaaacacatttggtttctgaataaattgaactaaatccaaactatttcctaaaatcacaggacattaaggaccaatagcatctgtgccagagatgtactgttattagctgggaagaccaattctaacagcaaataacagtctgagactcctcatacctcagtggttagaagcatgtctctcttgagctacagtagaggggaagggattgttgtgtagtcaagtcaccatgctgaatgtacactgattcctttatgatgactgcttaactccccactgcctgtcccagagaggctttccaatgtagctcagtaattcctgttactttacagacaggaaagttccagaaactttaagaacaaactctgaaagacctatgagcaaatggtgctgaatactttttttttaaagccacatttcattgtcttagtcaaagcaggattattaagtgattatttaaaattcgtttttttaaattagcaacttcaagtataacaactttgaaactggaataagtgtttattttctattaataaaaatgaattgtgacaaaa

SEQ ID NO: 17832 - DNA, 2158 bp, Homo sapiens
  source 1..2158: mol_type = unassigned DNA
ccgaaacatggagtcctgtaggcaaggtcttacctgaatcaggatgagggagtggtgggtccaggtggggctgctggccgtgcccctgcttgctgcgtacctgcacatcccaccccctcagctctcccctgcccttcactcatggaagtcttcaggcaagtttttcacttacaagggactgcgtatcttctaccaagactctgtgggtgtggttggaagtccagagatagttgtgcttttacacggttttccaacatccagctacgactggtacaagatttgggaaggtctgaccttgaggtttcatcgggtgattgcccttgatttcttaggctttggcttcagtgacaaaccgagaccacatcactattccatatttgagcaggccagcatcgtggaagcgcttttgcggcatctggggctccagaaccgcaggatcaaccttctttctcatgactatggagatattgttgctcaggagcttctctacaggtacaagcagaatcgatctggtcggcttaccataaagagtctctgtctgtcaaatggaggtatctttcctgagactcaccgtccactccttctccaaaagctactcaaagatggaggtgtgctgtcacccatcctcacacgactgatgaacttctttgtattctctcgaggtctcttacagtacatcaatcagaggaagaagttcagaaggcgctgggtgggagctcttgcctctgtaactatccccattcattttatctatgggccattggatcctgtaaatccctatccagagtttttggagctgtacaggaaaacgctgccgcggtccacagtgtcgattctggatgaccacattagccactatccacagctagaggatcccatgggcttcttgaatgcatatatgggcttcatcaactccttctgagctggaaagagtagcttccctgtattacctcccctactcccttatgtgttgtgtattccacttaggaagaaatgcccaaaagaggtcctggccatcaaacataattctctcacaaagtccactttactcaaattggtgaacagtgtataggaagaagccagcaggagctctgactaaggttgacataatagtccacctcccattactttgatatctgatcaaatgtatagacttggctttgttttttgtgctattaggaaattctgatgagcattactattcactgatgcagaaagacgttcttttgcataaaagacttttttttaacactttggacttctctgaaatatttagaagtgctaatttctggcccacccccaacaggaattctatagtaaggaggaggagaaggggggctccttccctctcctcgaatgacgttatgggcacatgccttttaaaagttctttaagcaacacagagctgagtcctctttgtcatacctttggatttagtgtttcatcagctgtttttagttataaacattttgttaaaatagatattggtttaaatgatacagtattttaggtatgatttaagactatgatttacctatacattatatatattttataaagatactaaaccagcatacccttactctgccagagtagtgaagctaattaaacacatttggtttctgaataaattgaactaaatccaaactatttcctaaaatcacaggacattaaggaccaatagcatctgtgccagagatgtactgttattagctgggaagaccaattctaacagcaaataacagtctgagactcctcatacctcagtggttagaagcatgtctctcttgagctacagtagaggggaagggattgttgtgtagtcaagtcaccatgctgaatgtacactgattcctttatgatgactgcttaactccccactgcctgtcccagagaggctttccaatgtagctcagtaattcctgttactttacagacaggaaagttccagaaactttaagaacaaactctgaaagacctatgagcaaatggtgctgaatactttttttttaaagccacatttcattgtcttagtcaaagcaggattattaagtgattatttaaaattcgtttttttaaattagcaacttcaagtataacaactttgaaactggaataagtgtttattttctattaataaaaatgaattgtgacaaaa

SEQ ID NO: 17833 - DNA, 606 bp, Homo sapiens
  source 1..606: mol_type = unassigned DNA
ccttctgcagctgtctcgcaggcatggacaacctgcgcgagactttcctcagcctcgaggatggcttgggctcctctgacagccctggcctgctgtcttcctgggactggaaggacagggcagggccctttgagctgaatcaggcctccccctctcagagcctttccccggctccatcgctggaatcctattcttcttctccctgtccagctgtggctgggctgccctgtgagcacggcggggccagcagtgggggcagcgaaggctgcagtgtcggtggggccagtggcctggtagaggtggactacaatatgttagctttccagcccacccaccttcagggcggtggtggccccaaggcccagaagggcaccaaagtcaggatgtctgtccagcggaggcggaaagccagcgagagggagaagctcaggatgaggaccttggcagatgccctgcacaccctccggaattacctgccacctgtctacagccagagaggccagcctctcaccaagatccagacactcaagtacaccatcaagtacatcggggaactcacagacctccttaaccgcggcagagagcccagagcccagagcgcgtgag

SEQ ID NO: 17834 - DNA, 2112 bp, Homo sapiens
  source 1..2112: mol_type = unassigned DNA
atgtggccccaggctggcccaggacagaggcgtggggtgggagcagggggtcccatcctgagtcactgccctccacagacacagaccatggccttgccaacggctcgacccctgttggggtcctgtgggacccccgccctcggcagcctcctgttcctgctcttcagcctcggatgggtgcagccctcgaggaccctggctggagagacagggcaggaggctgcgcccctggacggagtcctggccaacccacctaacatttccagcctctcccctcgccaactccttggcttcccgtgtgcggaggtgtccggcctgagcacggagcgtgtccgggagctggctgtggccttggcacagaagaatgtcaagctctcaacagagcagctgcgctgtctggctcaccggctctctgagccccccgaggacctggacgccctcccattggacctgctgctattcctcaacccagatgcgttctcggggccccaggcctgcacccgtttcttctcccgcatcacgaaggccaatgtggacctgctcccgaggggggctcccgagcgacagcggctgctgcctgcggctctggcctgctggggtgtgcgggggtctctgctgagcgaggctgatgtgcgggctctgggaggcctggcttgcgacctgcctgggcgctttgtggccgagtcggccgaagtgctgctaccccggctggtgagctgcccgggacccctggaccaggaccagcaggaggcagccagggcggctctgcagggcgggggacccccctacggccccccgtcgacatggtctgtctccacgatggacgctctgcggggcctgctgcccgtgctgggccagcccatcatccgcagcatcccgcagggcatcgtggccgcgtggcggcaacgctcctctcgggacccatcctggcggcagcctgaacggaccatcctccggccgcggttccggcgggaagtggagaagacagcctgtccttcaggcaagaaggcccgcgagatagacgagagcctcatcttctacaagaagtgggagctggaagcctgcgtggatgcggccctgctggccacccagatggaccgcgtgaacgccatccccttcacctacgagcagctggacgtcctaaagcataaactggatgagctctacccacaaggttaccccgagtctgtgatccagcacctgggctacctcttcctcaagatgagccctgaggacattcgcaagtggaatgtgacgtccctggagaccctgaaggctttgcttgaagtcaacaaagggcacgaaatgagtcctcaggctcctcggcggcccctcccacaggtggccaccctgatcgaccgctttgtgaagggaaggggccagctagacaaagacaccctagacaccctgaccgccttctaccctgggtacctgtgctccctcagccccgaggagctgagctccgtgccccccagcagcatctgggcggtcaggccccaggacctggacacgtgtgacccaaggcagctggacgtcctctatcccaaggcccgccttgctttccagaacatgaacgggtccgaatacttcgtgaagatccagtccttcctgggtggggcccccacggaggatttgaaggcgctcagtcagcagaatgtgagcatggacttggccacgttcatgaagctgcggacggatgcggtgctgccgttgactgtggctgaggtgcagaaacttctgggaccccacgtggagggcctgaaggcggaggagcggcaccgcccggtgcgggactggatcctacggcagcggcaggacgacctggacacgctggggctggggctacagggcggcatccccaacggctacctggtcctagacctcagcatgcaagaggccctctcggggacgccctgcctcctaggacctggacctgttctcaccgtcctggcactgctcctagcctccaccctggcctgagggccccactcccttgctggccccagccctgctggggatccccgcctggccaggagcaggcacgggtggtccccgttccaccccaagagaactcgcgctcagtaaacgggaacatgccccctgcagacacgt

SEQ ID NO: 17835 - DNA, 2092 bp, Homo sapiens
  source 1..2092: mol_type = unassigned DNA
ctctacttcccaggggaggaaaccgaggcacacctgtagccagggagcagggggtcccatcctgagtcactgccctccacagacacagaccatggccttgccaacggctcgacccctgttggggtcctgtgggacccccgccctcggcagcctcctgttcctgctcttcagcctcggatgggtgcagccctcgaggaccctggctggagagacagggcaggaggctgcgcccctggacggagtcctggccaacccacctaacatttccagcctctcccctcgccaactccttggcttcccgtgtgcggaggtgtccggcctgagcacggagcgtgtccgggagctggctgtggccttggcacagaagaatgtcaagctctcaacagagcagctgcgctgtctggctcaccggctctctgagccccccgaggacctggacgccctcccattggacctgctgctattcctcaacccagatgcgttctcggggccccaggcctgcacccgtttcttctcccgcatcacgaaggccaatgtggacctgctcccgaggggggctcccgagcgacagcggctgctgcctgcggctctggcctgctggggtgtgcgggggtctctgctgagcgaggctgatgtgcgggctctgggaggcctggcttgcgacctgcctgggcgctttgtggccgagtcggccgaagtgctgctaccccggctggtgagctgcccgggacccctggaccaggaccagcaggaggcagccagggcggctctgcagggcgggggacccccctacggccccccgtcgacatggtctgtctccacgatggacgctctgcggggcctgctgcccgtgctgggccagcccatcatccgcagcatcccgcagggcatcgtggccgcgtggcggcaacgctcctctcgggacccatcctggcggcagcctgaacggaccatcctccggccgcggttccggcgggaagtggagaagacagcctgtccttcaggcaagaaggcccgcgagatagacgagagcctcatcttctacaagaagtgggagctggaagcctgcgtggatgcggccctgctggccacccagatggaccgcgtgaacgccatccccttcacctacgagcagctggacgtcctaaagcataaactggatgagctctacccacaaggttaccccgagtctgtgatccagcacctgggctacctcttcctcaagatgagccctgaggacattcgcaagtggaatgtgacgtccctggagaccctgaaggctttgcttgaagtcaacaaagggcacgaaatgagtcctcaggtggccaccctgatcgaccgctttgtgaagggaaggggccagctagacaaagacaccctagacaccctgaccgccttctaccctgggtacctgtgctccctcagccccgaggagctgagctccgtgccccccagcagcatctgggcggtcaggccccaggacctggacacgtgtgacccaaggcagctggacgtcctctatcccaaggcccgccttgctttccagaacatgaacgggtccgaatacttcgtgaagatccagtccttcctgggtggggcccccacggaggatttgaaggcgctcagtcagcagaatgtgagcatggacttggccacgttcatgaagctgcggacggatgcggtgctgccgttgactgtggctgaggtgcagaaacttctgggaccccacgtggagggcctgaaggcggaggagcggcaccgcccggtgcgggactggatcctacggcagcggcaggacgacctggacacgctggggctggggctacagggcggcatccccaacggctacctggtcctagacctcagcatgcaagaggccctctcggggacgccctgcctcctaggacctggacctgttctcaccgtcctggcactgctcctagcctccaccctggcctgagggccccactcccttgctggccccagccctgctggggatccccgcctggccaggagcaggcacgggtggtccccgttccaccccaagagaactcgcgctcagtaaacgggaacatgccccctgcagacacgt

SEQ ID NO: 17836 - DNA, 2116 bp, Homo sapiens
  source 1..2116: mol_type = unassigned DNA
ctctacttcccaggggaggaaaccgaggcacacctgtagccagggagcagggggtcccatcctgagtcactgccctccacagacacagaccatggccttgccaacggctcgacccctgttggggtcctgtgggacccccgccctcggcagcctcctgttcctgctcttcagcctcggatgggtgcagccctcgaggaccctggctggagagacagggcaggaggctgcgcccctggacggagtcctggccaacccacctaacatttccagcctctcccctcgccaactccttggcttcccgtgtgcggaggtgtccggcctgagcacggagcgtgtccgggagctggctgtggccttggcacagaagaatgtcaagctctcaacagagcagctgcgctgtctggctcaccggctctctgagccccccgaggacctggacgccctcccattggacctgctgctattcctcaacccagatgcgttctcggggccccaggcctgcacccgtttcttctcccgcatcacgaaggccaatgtggacctgctcccgaggggggctcccgagcgacagcggctgctgcctgcggctctggcctgctggggtgtgcgggggtctctgctgagcgaggctgatgtgcgggctctgggaggcctggcttgcgacctgcctgggcgctttgtggccgagtcggccgaagtgctgctaccccggctggtgagctgcccgggacccctggaccaggaccagcaggaggcagccagggcggctctgcagggcgggggacccccctacggccccccgtcgacatggtctgtctccacgatggacgctctgcggggcctgctgcccgtgctgggccagcccatcatccgcagcatcccgcagggcatcgtggccgcgtggcggcaacgctcctctcgggacccatcctggcggcagcctgaacggaccatcctccggccgcggttccggcgggaagtggagaagacagcctgtccttcaggcaagaaggcccgcgagatagacgagagcctcatcttctacaagaagtgggagctggaagcctgcgtggatgcggccctgctggccacccagatggaccgcgtgaacgccatccccttcacctacgagcagctggacgtcctaaagcataaactggatgagctctacccacaaggttaccccgagtctgtgatccagcacctgggctacctcttcctcaagatgagccctgaggacattcgcaagtggaatgtgacgtccctggagaccctgaaggctttgcttgaagtcaacaaagggcacgaaatgagtcctcaggctcctcggcggcccctcccacaggtggccaccctgatcgaccgctttgtgaagggaaggggccagctagacaaagacaccctagacaccctgaccgccttctaccctgggtacctgtgctccctcagccccgaggagctgagctccgtgccccccagcagcatctgggcggtcaggccccaggacctggacacgtgtgacccaaggcagctggacgtcctctatcccaaggcccgccttgctttccagaacatgaacgggtccgaatacttcgtgaagatccagtccttcctgggtggggcccccacggaggatttgaaggcgctcagtcagcagaatgtgagcatggacttggccacgttcatgaagctgcggacggatgcggtgctgccgttgactgtggctgaggtgcagaaacttctgggaccccacgtggagggcctgaaggcggaggagcggcaccgcccggtgcgggactggatcctacggcagcggcaggacgacctggacacgctggggctggggctacagggcggcatccccaacggctacctggtcctagacctcagcatgcaagaggccctctcggggacgccctgcctcctaggacctggacctgttctcaccgtcctggcactgctcctagcctccaccctggcctgagggccccactcccttgctggccccagccctgctggggatccccgcctggccaggagcaggcacgggtggtccccgttccaccccaagagaactcgcgctcagtaaacgggaacatgccccctgcagacacgt

SEQ ID NO: 17837 - DNA, 2169 bp, Homo sapiens
  source 1..2169: mol_type = unassigned DNA
tgccaggctctccacccccacttcccaattgaggaaaccgaggcagaggaggctcagcgccacgcactcctctttctgcctggccggccactcccgtctgctgtgacgcgcggacagagagctaccggtggacccacggtgcctccctccctgggatctacacagaccatggccttgccaacggctcgacccctgttggggtcctgtgggacccccgccctcggcagcctcctgttcctgctcttcagcctcggatgggtgcagccctcgaggaccctggctggagagacagggcaggaggctgcgcccctggacggagtcctggccaacccacctaacatttccagcctctcccctcgccaactccttggcttcccgtgtgcggaggtgtccggcctgagcacggagcgtgtccgggagctggctgtggccttggcacagaagaatgtcaagctctcaacagagcagctgcgctgtctggctcaccggctctctgagccccccgaggacctggacgccctcccattggacctgctgctattcctcaacccagatgcgttctcggggccccaggcctgcacccgtttcttctcccgcatcacgaaggccaatgtggacctgctcccgaggggggctcccgagcgacagcggctgctgcctgcggctctggcctgctggggtgtgcgggggtctctgctgagcgaggctgatgtgcgggctctgggaggcctggcttgcgacctgcctgggcgctttgtggccgagtcggccgaagtgctgctaccccggctggtgagctgcccgggacccctggaccaggaccagcaggaggcagccagggcggctctgcagggcgggggacccccctacggccccccgtcgacatggtctgtctccacgatggacgctctgcggggcctgctgcccgtgctgggccagcccatcatccgcagcatcccgcagggcatcgtggccgcgtggcggcaacgctcctctcgggacccatcctggcggcagcctgaacggaccatcctccggccgcggttccggcgggaagtggagaagacagcctgtccttcaggcaagaaggcccgcgagatagacgagagcctcatcttctacaagaagtgggagctggaagcctgcgtggatgcggccctgctggccacccagatggaccgcgtgaacgccatccccttcacctacgagcagctggacgtcctaaagcataaactggatgagctctacccacaaggttaccccgagtctgtgatccagcacctgggctacctcttcctcaagatgagccctgaggacattcgcaagtggaatgtgacgtccctggagaccctgaaggctttgcttgaagtcaacaaagggcacgaaatgagtcctcaggtggccaccctgatcgaccgctttgtgaagggaaggggccagctagacaaagacaccctagacaccctgaccgccttctaccctgggtacctgtgctccctcagccccgaggagctgagctccgtgccccccagcagcatctgggcggtcaggccccaggacctggacacgtgtgacccaaggcagctggacgtcctctatcccaaggcccgccttgctttccagaacatgaacgggtccgaatacttcgtgaagatccagtccttcctgggtggggcccccacggaggatttgaaggcgctcagtcagcagaatgtgagcatggacttggccacgttcatgaagctgcggacggatgcggtgctgccgttgactgtggctgaggtgcagaaacttctgggaccccacgtggagggcctgaaggcggaggagcggcaccgcccggtgcgggactggatcctacggcagcggcaggacgacctggacacgctggggctggggctacagggcggcatccccaacggctacctggtcctagacctcagcatgcaagaggccctctcggggacgccctgcctcctaggacctggacctgttctcaccgtcctggcactgctcctagcctccaccctggcctgagggccccactcccttgctggccccagccctgctggggatccccgcctggccaggagcaggcacgggtggtccccgttccaccccaagagaactcgcgctcagtaaacgggaacatgccccctgcagacacgt

SEQ ID NO: 17838 - DNA, 2109 bp, Homo sapiens
  source 1..2109: mol_type = unassigned DNA
ggctgccaggctctccacccccacttcccaattgaggaaaccgaggcagaggaggctcagagagctaccggtggacccacggtgcctccctccctgggatctacacagaccatggccttgccaacggctcgacccctgttggggtcctgtgggacccccgccctcggcagcctcctgttcctgctcttcagcctcggatgggtgcagccctcgaggaccctggctggagagacagggcaggaggctgcgcccctggacggagtcctggccaacccacctaacatttccagcctctcccctcgccaactccttggcttcccgtgtgcggaggtgtccggcctgagcacggagcgtgtccgggagctggctgtggccttggcacagaagaatgtcaagctctcaacagagcagctgcgctgtctggctcaccggctctctgagccccccgaggacctggacgccctcccattggacctgctgctattcctcaacccagatgcgttctcggggccccaggcctgcacccgtttcttctcccgcatcacgaaggccaatgtggacctgctcccgaggggggctcccgagcgacagcggctgctgcctgcggctctggcctgctggggtgtgcgggggtctctgctgagcgaggctgatgtgcgggctctgggaggcctggcttgcgacctgcctgggcgctttgtggccgagtcggccgaagtgctgctaccccggctggtgagctgcccgggacccctggaccaggaccagcaggaggcagccagggcggctctgcagggcgggggacccccctacggccccccgtcgacatggtctgtctccacgatggacgctctgcggggcctgctgcccgtgctgggccagcccatcatccgcagcatcccgcagggcatcgtggccgcgtggcggcaacgctcctctcgggacccatcctggcggcagcctgaacggaccatcctccggccgcggttccggcgggaagtggagaagacagcctgtccttcaggcaagaaggcccgcgagatagacgagagcctcatcttctacaagaagtgggagctggaagcctgcgtggatgcggccctgctggccacccagatggaccgcgtgaacgccatccccttcacctacgagcagctggacgtcctaaagcataaactggatgagctctacccacaaggttaccccgagtctgtgatccagcacctgggctacctcttcctcaagatgagccctgaggacattcgcaagtggaatgtgacgtccctggagaccctgaaggctttgcttgaagtcaacaaagggcacgaaatgagtcctcaggtggccaccctgatcgaccgctttgtgaagggaaggggccagctagacaaagacaccctagacaccctgaccgccttctaccctgggtacctgtgctccctcagccccgaggagctgagctccgtgccccccagcagcatctgggcggtcaggccccaggacctggacacgtgtgacccaaggcagctggacgtcctctatcccaaggcccgccttgctttccagaacatgaacgggtccgaatacttcgtgaagatccagtccttcctgggtggggcccccacggaggatttgaaggcgctcagtcagcagaatgtgagcatggacttggccacgttcatgaagctgcggacggatgcggtgctgccgttgactgtggctgaggtgcagaaacttctgggaccccacgtggagggcctgaaggcggaggagcggcaccgcccggtgcgggactggatcctacggcagcggcaggacgacctggacacgctggggctggggctacagggcggcatccccaacggctacctggtcctagacctcagcatgcaagaggccctctcggggacgccctgcctcctaggacctggacctgttctcaccgtcctggcactgctcctagcctccaccctggcctgagggccccactcccttgctggccccagccctgctggggatccccgcctggccaggagcaggcacgggtggtccccgttccaccccaagagaactcgcgctcagtaaacgggaacatgccccctgcagaca

SEQ ID NO: 17839 - DNA, 4125 bp, Homo sapiens
  source 1..4125: mol_type = unassigned DNA
gccattcggcaccggagtcgctccgcgctcccagaatgcaccggcagtccgcgggaaaccaaaatggcgaggggctgtattgaagtgggctgtgtttgaggccggtgtaagaacgctcattctacccccaacccttgtctccaaggacctcggtttgtgcgtgcatatgtgccgggtacccggtggggcgggtgcccagtaagtgctcggactcgcaggggaagcgcccacggggacggattggttgttttttcctgtatgaagcggttggcaccactgaagtgaccgaatgagagactctacaggggcaggtaattcactggtccacaagcggtctcctttacgtcgaaaccaaaagaccccaacatccttgaccaagctgtctttacaggatggacataaagccaaaaagccagcatgtaaatttgaagagggtcaggatgtcctagctagatggtcagatggcttgttttatcttggcactatcaaaaagataaacatattgaaacagagctgcttcatcatatttgaagacagttctaaatcctgggttctctggaaggacattcaaacaggagccactggaagtggggaaatggtctgtacaatatgtcaagaagagtattcagaagctcccaatgaaatggttatatgtgacaagtgtggccaaggatatcatcagttgtgtcacacacctcatattgattgcagtgtgattgattcagatgaaaaatggctctgtcggcagtgtgtttttgcaacaacaacaaagaggggtggtgcacttaagaaaggaccaaatgccaaagcattgcaagtcatgaagcagacattaccctatagtgtggcagaccttgaatgggatgcaggtcataaaaccaatgtccagcagtgttactgctattgtggaggccctggagactggtatttgaagatgctacagtgctgcaaatgtaagcagtggtttcatgaggcttgtgtgcaatgccttcaaaagccaatgctatttggagacagattttatacgtttatatgctctgtctgcagttctggaccagaatacctcaaacgtctaccattacagtgggtagatatagcacacctatgcctttacaacctaagtgttattcataagaagaaatactttgattctgaacttgagcttatgacatacattaatgaaaactgggatagattgcaccctggagagctggcagacacaccaaaatctgaaagatatgagcatgttctggaggcattaaatgattacaagaccatgtttatgtctgggaaagaaataaagaagaagaagcatttgtttgggttgcgaattcgtgttcctcctgtgccaccaaatgtggctttcaaagcagagaaagaacctgaaggaacatctcatgaatttaaaattaaaggcagaaaggcatccaaacctatatctgattcaagggaagtaagcaatggcatagaaaaaaaaggaaagaaaaaatctgtaggtcgtccacctggcccatatacaagaaaaatgattcaaaaaactgctgagccacttttggataaggaatcaatttcagagaatcctactttggatttaccttgttctatagggagaactgagggaactgcacattcatccaatacctcagatgtggatttcacgggtgcttccagtgcaaaagaaactacctcgtctagcatttccaggcattatggattatctgactccagaaaaagaacgcgtacaggaagatcttggcctgctgcaataccacatttgcggagaagaagaggtcgtcttccaagaagagcactccagactcagaactcagaaattgtaaaagatgatgaaggcaaagaagattatcagtttgatgaactcaacacagagattctgaataacttagcagatcaggagttacaactcaatcatctaaagaactccattaccagttattttggtgctgcaggtagaatagcatgtggcgaaaaataccgagttttggcacgtcgggtgacacttgatggaaaggtgcagtatcttgtggaatgggaaggagcaactgcatcctgactgtaggactgaacattatgttcactgcactctgattttctgtaggtacagttcaaagccctaaaggagtctggcttttactatctttcttaaaaaaaaaaaaaagtcaaaaaaattcaaaaaaggggatgatactagccttaacatgtacctgtcaatgttatggatattgtcataaaaaggtatcttttaaaaatcagaacagagacttaattttttaaatcttaagatttgtagaatgtttctaggataggatattaaaaatgattgaaacccatgcatggtgttagacaatttttctaattattccattgagtcagttttttgtgattagtgattatcagagcaaacatcatgtagatagcacaagtatttggagaaacgttgtttgttttgttaccaaaatgttggaaaaatttatttcaataccttttagatttcataaagtgcagtgtatataatgcctactgaaagactgtaaaatattgaaattttctttcaagcaaagtgtaaaaaaatatattgagcctgtaaattgctctgtgactagacttcattgtcgtcttaatatattcttgcatgtgcatatatatacacacgtgtatatatatgtgtgtgattatgtgacctatgcaatacaaattatgggaatgggcagctttggagtatatatcccataattcttttttcaggaatagttgcagtatttacacagcagcatttcttctcaggcttttattgggtgctgttgcttgctatgtatgaagagaaatgtgtcagacaagtttagtgtgttctgaagaagggtgtgaacaacagtgttcatgggcttttagaatgcttttcacttttagtccttgtaactcagctgttcagtacctaaaacaaattcaaataatatgaacattatctcctactagaagtaacgttttcaagttttcatggcacattatgattgtaaatgtctctcatttttaacagtaagtctataggagtcccgtgaagattcctgaaatgtctgtagtaactgttagtcatgtttgaataagtgtagtatgaacaaagtattttattgcacagggttaacaaacagtatgttgccagctgaggctactgctgttttattacaacattacctcttgtttttataaagtgtaccaagatttaaattgataactttattttacttgtaaaaaaaaagtttcttttatcaccagtgttacagttgtcttctgtttctttttgttttgttttatttgttttcctttttagccaaagagtgaacagaagattttcttattttggtggctattcattttacttttaaaagtgattggtggattttagactaattatgggggaatttgccaccaaaataaaaaatatgtaaagtgtagtgattacagagtggttaaaatgtgggttagtacttatttattccattaattgattatttgactgtttataaagaaagttgctttatttctttaaacatcttcaaaagatgatcctttcttgtcacattatagccaaaagaagcagagaacttcattgtctgcatttggttcctggttggccaggtataaatgagctttacaaaagtgcaaattaaaaactgttacttctgtttacctccaccaaaacttgattttcccctagctattaatttaaggttgcctttcctgcagctgcaatattttgaataacacacagagtttgtgttgatttttgaatgtttgtttatatctaggggtaatgaaaaatgtaaatcccgtgtatccttattcactccacctgtatcatattatttcattttccccaaagtcctttaattctaactgaacaccagcagtatttttagaaatttttctttaacatacttggaagatgatttatccagctgaactgtctttagacgtaattattgtgaatgtctgttttattttctcatggtggttcacatggctctgatgttcagtttgtatttttggaattgctttacttagaaattaaaacagaccaacattaaatgtgtgtattttttaaagagctaa

SEQ ID NO: 17840 - DNA, 1951 bp, Homo sapiens
  source 1..1951: mol_type = unassigned DNA
gctgtattgaagtgggctgtgtttgaggccggtgtaagaacgctcattctacccccaacccttgtctccaaggacctcggtttgtgcgtgcatatgtgccgggtacccggtggggcgggtgcccagtaagtgctcggactcgcaggggaagcgcccacggggacggattggttgttttttcctgtatgaagcggttggcaccactgaagtgaccgaatgagagactctacaggggcaggtaattcactggtccacaagcggtctcctttacgtcgaaaccaaaagaccccaacatccttgaccaagctgtctttacaggatggacataaagccaaaaagccagcatgtaaatttgaagagggtcaggatgtcctagctagatggtcagatggcttgttttatcttggcactatcaaaaagataaacatattgaaacagagctgcttcatcatatttgaagacagttctaaatcctgggttctctggaaggacattcaaacaggagccactggaagtggggaaatggtctgtacaatatgtcaagaagagtattcagaagctcccaatgaaatggttatatgtgacaagtgtggccaaggatatcatcagttgtgtcacacacctcatattgattgcagtgtgattgattcagatgaaaaatggctctgtcggcagtgtgtttttgcaacaacaacaaagaggggtggtgcacttaagaaaggaccaaatgccaaagcattgcaagtcatgaagcagacattaccctatagtgtggcagaccttgaatgggatgcaggtcataaaaccaatgtccagcagtgttactgctattgtggaggccctggagactggtatttgaagatgctacagtgctgcaaatgtaagcagtggtttcatgaggcttgtgtgcaatgccttcaaaagccaatgctatttggagacagattttatacgtttatatgctctgtctgcagttctggaccagaatacctcaaacgtctaccattacagtgggtagatatagcacacctatgcctttacaacctaagtgttattcataagaagaaatactttgattctgaacttgagcttatgacatacattaatgaaaactgggatagattgcaccctggagagctggcagacacaccaaaatctgaaagatatgagcatgttctggaggcattaaatgattacaagaccatggaagtaagcaatggcatagaaaaaaaaggaaagaaaaaatctgtaggtcgtccacctggcccatatacaagaaaaatgattcaaaaaactgctgagccacttttggataaggaatcaatttcagagaatcctactttggatttaccttgttctatagggagaactgagggaactgcacattcatccaatacctcagatgtggatttcacgggtgcttccagtgcaaaagaaactacctcgtctagcatttccaggcattatggattatctgactccagaaaaagaacgcgtacaggaagatcttggcctgctgcaataccacatttgcggagaagaagaggtcgtcttccaagaagagcactccagactcagaactcagaaattgtaaaagatgatgaaggcaaagaagattatcagtttgatgaactcaacacagagattctgaataacttagcagatcaggagttacaactcaatcatctaaagaactccattaccagttattttggtgctgcaggtagaatagcatgtggcgaaaaataccgagttttggcacgtcgggtgacacttgatggaaaggtgcagtatcttgtggaatgggaaggagcaactgcatcctgactgtaggactgaacattatgttcactgcactctgattttctgtaggtacagttcaaagccctaaaggagtctggcttttactatctttcttaaaaaaaaaaaaaagtcaaaaaaattcaaaaaa

SEQ ID NO: 17841 - DNA, 1695 bp, Homo sapiens
  source 1..1695: mol_type = unassigned DNA
aaaatggcgaggggctgtattgaagtgggctgtgtttgaggccggtgtaagaacgctcattctacccccaacccttgtctccaaggacctcggtttgtgcgtgcatatgtgccgggtacccggtggggcgggtgcccagtaagtgctcggactcgcaggggaagcgcccacggggacggattggttgttttttcctgtatgaagcggttggcaccactgaagtgaccgaatgagagactctacaggggcaggatggacataaagccaaaaagccagcatgtaaatttgaagagggtcaggatgtcctagctagatggtcagatggcttgttttatcttggcactatcaaaaagataaacatattgaaacagagctgcttcatcatatttgaagacagttctaaatcctgggttctctggaaggacattcaaacaggagccactggaagtggggaaatggtctgtacaatatgtcaagaagagtattcagaagctcccaatgaaatggttatatgtgacaagtgtggccaaggatatcatcagttgtgtcacacacctcatattgattgcagtgtgattgattcagatgaaaaatggctctgtcggcagtgtgtttttgcaacaacaacaaagaggggtggtgcacttaagaaaggaccaaatgccaaagcattgcaagtcatgaagcagacattaccctatagtgtggcagaccttgaatgggatgcaggtcataaaaccaatgtccagcagtgttactgctattgtggaggccctggagactggtatttgaagatgctacagtgctgcaaatgtaagcagtggtttcatgaggcttgtgtgcaatgccttcaaaagccaatgctatttggagacagattttatacgtttatatgctctgtctgcagttctggaccagaatacctcaaacgtctaccattacagtgggtagatatagcacacctatgcctttacaacctaagtgttattcataagaagaaatactttgattctgaacttgagcttatgacatacattaatgaaaactgggatagattgcaccctggagagctggcagacacaccaaaatctgaaagatatgagcatgttctggaggcattaaatgattacaagaccatgtttatgtctgggaaagaaataaagaagaagaagcatttgtttgggttgcgaattcgtgttcctcctgtgccaccaaatgtggctttcaaagcagagaaagaacctgaaggaacatctcatgaatttaaattaaaggcagaaaggcatccaaacctatatctgattcaagggaagtaagcaatggcatagaaaaaaaaggaaagaaaaaatctgtaggtcgtccacctggcccatatacaagaaaaatgattcaaaaaactgctgagccacttttggataaggaatcaatttcagagaatcctactttggatttaccttgttctatagggagaactgagggaactgcacattcatccaatacctcagatgtggatttcacgggtgcttccagtgcaaaagaaactacctcgtctagcatttccaggcattatggattatctgactccagaaaaagaacgcgtacaggaagatcttggcctgctgcaataccacatttgcggagaagaagaggtcgtcttccaagaagagcactccagactcagaactcagaaattgt

SEQ ID NO: 17842 - DNA, 3845 bp, Homo sapiens
  source 1..3845: mol_type = unassigned DNA
gctgccattcggcaccggagtcgctccgcgctcccagaatgcaccggcagtccgcgggaaaccaaaatggcgaggggctgtattgaagtgggctgtgtttgaggccggtgtaagaacgctcattctacccccaacccttgtctccaaggacctcggtttgtgcgtgcatatgtgccgggtacccggtggggcgggtgcccagtaagtgctcggactcgcaggggaagcgcccacggggacggattggttgttttttcctgtatgaagcggttggcaccactgaagtgaccgaatgaggagccactggaagtggggaaatggtctgtacaatatgtcaagaagagtattcagaagctcccaatgaaatggttatatgtgacaagtgtggccaaggatatcatcagttgtgtcacacacctcatattgattgcagtgtgattgattcagatgaaaaatggctctgtcggcagtgtgtttttgcaacaacaacaaagaggggtggtgcacttaagaaaggaccaaatgccaaagcattgcaagtcatgaagcagacattaccctatagtgtggcagaccttgaatgggatgcaggtcataaaaccaatgtccagcagtgttactgctattgtggaggccctggagactggtatttgaagatgctacagtgctgcaaatgtaagcagtggtttcatgaggcttgtgtgcaatgccttcaaaagccaatgctatttggagacagattttatacgtttatatgctctgtctgcagttctggaccagaatacctcaaacgtctaccattacagtgggtagatatagcacacctatgcctttacaacctaagtgttattcataagaagaaatactttgattctgaacttgagcttatgacatacattaatgaaaactgggatagattgcaccctggagagctggcagacacaccaaaatctgaaagatatgagcatgttctggaggcattaaatgattacaagaccatgtttatgtctgggaaagaaataaagaagaagaagcatttgtttgggttgcgaattcgtgttcctcctgtgccaccaaatgtggctttcaaagcagagaaagaacctgaaggaacatctcatgaatttaaaattaaaggcagaaaggcatccaaacctatatctgattcaagggaagtaagcaatggcatagaaaaaaaaggaaagaaaaaatctgtaggtcgtccacctggcccatatacaagaaaaatgattcaaaaaactgctgagccacttttggataaggaatcaatttcagagaatcctactttggatttaccttgttctatagggagaactgagggaactgcacattcatccaatacctcagatgtggatttcacgggtgcttccagtgcaaaagaaactacctcgtctagcatttccaggcattatggattatctgactccagaaaaagaacgcgtacaggaagatcttggcctgctgcaataccacatttgcggagaagaagaggtcgtcttccaagaagagcactccagactcagaactcagaaattgtaaaagatgatgaaggcaaagaagattatcagtttgatgaactcaacacagagattctgaataacttagcagatcaggagttacaactcaatcatctaaagaactccattaccagttattttggtgctgcaggtagaatagcatgtggcgaaaaataccgagttttggcacgtcgggtgacacttgatggaaaggtgcagtatcttgtggaatgggaaggagcaactgcatcctgactgtaggactgaacattatgttcactgcactctgattttctgtaggtacagttcaaagccctaaaggagtctggcttttactatctttcttaaaaaaaaaaaaaagtcaaaaaaattcaaaaaaggggatgatactagccttaacatgtacctgtcaatgttatggatattgtcataaaaaggtatcttttaaaaatcagaacagagacttaattttttaaatcttaagatttgtagaatgtttctaggataggatattaaaaatgattgaaacccatgcatggtgttagacaatttttctaattattccattgagtcagttttttgtgattagtgattatcagagcaaacatcatgtagatagcacaagtatttggagaaacgttgtttgttttgttaccaaaatgttggaaaaatttatttcaataccttttagatttcataaagtgcagtgtatataatgcctactgaaagactgtaaaatattgaaattttctttcaagcaaagtgtaaaaaaatatattgagcctgtaaattgctctgtgactagacttcattgtcgtcttaatatattcttgcatgtgcatatatatacacacgtgtatatatatgtgtgtgattatgtgacctatgcaatacaaattatgggaatgggcagctttggagtatatatcccataattcttttttcaggaatagttgcagtatttacacagcagcatttcttctcaggcttttattgggtgctgttgcttgctatgtatgaagagaaatgtgtcagacaagtttagtgtgttctgaagaagggtgtgaacaacagtgttcatgggcttttagaatgcttttcacttttagtccttgtaactcagctgttcagtacctaaaacaaattcaaataatatgaacattatctcctactagaagtaacgttttcaagttttcatggcacattatgattgtaaatgtctctcatttttaacagtaagtctataggagtcccgtgaagattcctgaaatgtctgtagtaactgttagtcatgtttgaataagtgtagtatgaacaaagtattttattgcacagggttaacaaacagtatgttgccagctgaggctactgctgttttattacaacattacctcttgtttttataaagtgtaccaagatttaaattgataactttattttacttgtaaaaaaaaagtttcttttatcaccagtgttacagttgtcttctgtttctttttgttttgttttatttgttttcctttttagccaaagagtgaacagaagattttcttattttggtggctattcattttacttttaaaagtgattggtggattttagactaattatgggggaatttgccaccaaaataaaaaatatgtaaagtgtagtgattacagagtggttaaaatgtgggttagtacttatttattccattaattgattatttgactgtttataaagaaagttgctttatttctttaaacatcttcaaaagatgatcctttcttgtcacattatagccaaaagaagcagagaacttcattgtctgcatttggttcctggttggccaggtataaatgagctttacaaaagtgcaaattaaaaactgttacttctgtttacctccaccaaaacttgattttcccctagctattaatttaaggttgcctttcctgcagctgcaatattttgaataacacacagagtttgtgttgatttttgaatgtttgtttatatctaggggtaatgaaaaatgtaaatcccgtgtatccttattcactccacctgtatcatattatttcattttccccaaagtcctttaattctaactgaacaccagcagtatttttagaaatttttctttaacatacttggaagatgatttatccagctgaactgtctttagacgtaattattgtgaatgtctgttttattttctcatggtggttcacatggctctgatgttcagtttgtatttttggaattgctttacttagaaattaaaacagaccaacattaaatgtgtgtattttttaaagagct

SEQ ID NO: 17843 - DNA, 4046 bp, Homo sapiens
  source 1..4046: mol_type = unassigned DNA
gctgccattcggcaccggagtcgctccgcgctcccagaatgcaccggcagtccgcgggaaaccaaaatggcgaggggctgtattgaagtgggctgtgtttgaggccggtgtaagaacgctcattctacccccaacccttgtctccaaggacctcggtttgtgcgtgcatatgtgccgggtacccggtggggcgggtgcccagtaagtgctcggactcgcaggggaagcgcccacggggacggattggttgttttttcctgtatgaagcggttggcaccactgaagtgaccgaatgagagactctacaggggcaggatggacataaagccaaaaagccagcatgtaaatttgaagagggtcaggatgtcctagctagatggtcagatggcttgttttatcttggcactatcaaaaagataaacatattgaaacagagctgcttcatcatatttgaagacagttctaaatcctgggttctctggaaggacattcaaacaggagccactggaagtggggaaatggtctgtacaatatgtcaagaagagtattcagaagctcccaatgaaatggttatatgtgacaagtgtggccaaggatatcatcagttgtgtcacacacctcatattgattgcagtgtgattgattcagatgaaaaatggctctgtcggcagtgtgtttttgcaacaacaacaaagaggggtggtgcacttaagaaaggaccaaatgccaaagcattgcaagtcatgaagcagacattaccctatagtgtggcagaccttgaatgggatgcaggtcataaaaccaatgtccagcagtgttactgctattgtggaggccctggagactggtatttgaagatgctacagtgctgcaaatgtaagcagtggtttcatgaggcttgtgtgcaatgccttcaaaagccaatgctatttggagacagattttatacgtttatatgctctgtctgcagttctggaccagaatacctcaaacgtctaccattacagtgggtagatatagcacacctatgcctttacaacctaagtgttattcataagaagaaatactttgattctgaacttgagcttatgacatacattaatgaaaactgggatagattgcaccctggagagctggcagacacaccaaaatctgaaagatatgagcatgttctggaggcattaaatgattacaagaccatgtttatgtctgggaaagaaataaagaagaagaagcatttgtttgggttgcgaattcgtgttcctcctgtgccaccaaatgtggctttcaaagcagagaaagaacctgaaggaacatctcatgaatttaaaattaaaggcagaaaggcatccaaacctatatctgattcaagggaagtaagcaatggcatagaaaaaaaaggaaagaaaaaatctgtaggtcgtccacctggcccatatacaagaaaaatgattcaaaaaactgctgagccacttttggataaggaatcaatttcagagaatcctactttggatttaccttgttctatagggagaactgagggaactgcacattcatccaatacctcagatgtggatttcacgggtgcttccagtgcaaaagaaactacctcgtctagcatttccaggcattatggattatctgactccagaaaaagaacgcgtacaggaagatcttggcctgctgcaataccacatttgcggagaagaagaggtcgtcttccaagaagagcactccagactcagaactcagaaattgtaaaagatgatgaaggcaaagaagattatcagtttgatgaactcaacacagagattctgaataacttagcagatcaggagttacaactcaatcatctaaagaactccattaccagttattttggtgctgcaggtagaatagcatgtggcgaaaaataccgagttttggcacgtcgggtgacacttgatggaaaggtgcagtatcttgtggaatgggaaggagcaactgcatcctgactgtaggactgaacattatgttcactgcactctgattttctgtaggtacagttcaaagccctaaaggagtctggcttttactatctttcttaaaaaaaaaaaaaagtcaaaaaaattcaaaaaaggggatgatactagccttaacatgtacctgtcaatgttatggatattgtcataaaaaggtatcttttaaaaatcagaacagagacttaattttttaaatcttaagatttgtagaatgtttctaggataggatattaaaaatgattgaaacccatgcatggtgttagacaatttttctaattattccattgagtcagttttttgtgattagtgattatcagagcaaacatcatgtagatagcacaagtatttggagaaacgttgtttgttttgttaccaaaatgttggaaaaatttatttcaataccttttagatttcataaagtgcagtgtatataatgcctactgaaagactgtaaaatattgaaattttctttcaagcaaagtgtaaaaaaatatattgagcctgtaaattgctctgtgactagacttcattgtcgtcttaatatattcttgcatgtgcatatatatacacacgtgtatatatatgtgtgtgattatgtgacctatgcaatacaaattatgggaatgggcagctttggagtatatatcccataattcttttttcaggaatagttgcagtatttacacagcagcatttcttctcaggcttttattgggtgctgttgcttgctatgtatgaagagaaatgtgtcagacaagtttagtgtgttctgaagaagggtgtgaacaacagtgttcatgggcttttagaatgcttttcacttttagtccttgtaactcagctgttcagtacctaaaacaaattcaaataatatgaacattatctcctactagaagtaacgttttcaagttttcatggcacattatgattgtaaatgtctctcatttttaacagtaagtctataggagtcccgtgaagattcctgaaatgtctgtagtaactgttagtcatgtttgaataagtgtagtatgaacaaagtattttattgcacagggttaacaaacagtatgttgccagctgaggctactgctgttttattacaacattacctcttgtttttataaagtgtaccaagatttaaattgataactttattttacttgtaaaaaaaaagtttcttttatcaccagtgttacagttgtcttctgtttctttttgttttgttttatttgttttcctttttagccaaagagtgaacagaagattttcttattttggtggctattcattttacttttaaaagtgattggtggattttagactaattatgggggaatttgccaccaaaataaaaaatatgtaaagtgtagtgattacagagtggttaaaatgtgggttagtacttatttattccattaattgattatttgactgtttataaagaaagttgctttatttctttaaacatcttcaaaagatgatcctttcttgtcacattatagccaaaagaagcagagaacttcattgtctgcatttggttcctggttggccaggtataaatgagctttacaaaagtgcaaattaaaaactgttacttctgtttacctccaccaaaacttgattttcccctagctattaatttaaggttgcctttcctgcagctgcaatattttgaataacacacagagtttgtgttgatttttgaatgtttgtttatatctaggggtaatgaaaaatgtaaatcccgtgtatccttattcactccacctgtatcatattatttcattttccccaaagtcctttaattctaactgaacaccagcagtatttttagaaatttttctttaacatacttggaagatgatttatccagctgaactgtctttagacgtaattattgtgaatgtctgttttattttctcatggtggttcacatggctctgatgttcagtttgtatttttggaattgctttacttagaaattaaaacagaccaacattaaatgtgtgtattttttaaagagct

SEQ ID NO: 17844 - DNA, 2366 bp, Homo sapiens
  source 1..2366: mol_type = unassigned DNA
ccctaacgacagctcgcccgtgcttcgccctcgcagctctcctgtgtccccaaaatgcctttcccgcgtcccccgcccttcagcggtgactgcccaggggactctgtaacgcgacactcagactgccgagcctgccaggcacttcgcggagggcgctaggggccgggacgcggccgccgagcgtaggttccggcctttactccgagttgcgcacggagccccagctgcggttgtccgctctggggatcacaggccgcggagacccgggagccacccgccgggccccttcagacgacccgcttccgcaaaccggccgtgggactccggcgccgggcggacgaagcggctccgggaagactcggtcttccccgcccgcctgaggtcgccggggcggggcttcagtgacaggcccgcgcgctaccgcggaaacaggaagttggctgggtgcgcgccggctccggctgcagttcccgggtccctcggccaccgaagccaccctgccctggtgaaagggctcccgcaccgcccggtgctccccatctgcctggcgttgtgcgcagagctggaaagcatggctgttataaatgaattctgattttggggagcagatgccaacttagagcctcgtaccaatctctctgtctttaaaagatgaggtgacttggtgattttcctggaaaattataggtgcccagctaagacctgaatgccatcaccctccccagggctctgcagttttctcgtggtgaacccttgatggatttgttgttgcttgagaaatggcgatgatcgaattggggtttggaagacagaattttcatccattaaagaggaagagttcattgctgttgaaactcatagctgttgtctttgctgtgcttctattttgtgaatttttaatctattacttagcgatctttcagtgtaattggcctgaagtgaaaaccacagcctctgatggtgaacagaccacacgtgagcctgtgctcaaagccatgtttttggctgacacccatttgcttggggaattcctaggccactggctggacaaattacgaagggaatggcagatggagagagcgttccagacagctctgtggttgctgcagccggaagtcgtcttcatcctgggggatatctttgatgaagggaagtggagcacccctgaggcctgggcggatgatgtggagcggtttcagaaaatgttcagacacccaagtcatgtacagctgaaggtagttgctggaaaccatgacattggcttccattatgagatgaacacatacaaagtagaacgctttgagaaagtgttcagctctgaaagactgttttcttggaaaggcattaactttgtgatggtcaacagcgtggcgctgaacggggatggctgtggcatctgctctgaaacagaagcagagctcattgaagtttctcacagactgaactgctcccgagaggcacgtggctccagccggtgtggacctgggcctctgctgcccacgtctgcccctgtcctcctgcagcattatcctctgtatcggagaagtgatgctaactgttctggggaagacgctgctcctgcagaggaaagggacatcccatttaaggagaactatgacgtgctttcacgggaggcatcacaaaagctgctgtggtggctccagccgcgcctggttctcagtggccacacgcacagcgcctgcgaggtgcaccacgggggccgagtccccgagctcagcgtcccatctttcagttggaggaacagaaacaaccccagtttcatcatgggtagcatcacgcccacagactacaccctctccaagtgctacctcccacgtgaggatgtggttttgatcatctactgtggagtggtgggcttccttgtggtcctcacactcactcactttgggcttctagcctcaccttttctttctggtttgaacttgctcggaaagcgtaagacaagatgaagagcaggcgccattataaatatcaaagcccaagaaatggaactttgggcagagatcatgttagaatcaagtggatgatgagaccaattacaggccgtctctctgcacagcacagaaattctcaatcactgaaatgagtaactgcaaaataaatagttgattgtactgttctcatgctataaaagtggacaggtactctacaacaaatctgttttctcatttttatcaaatatatgtatcatcaaaggttgcatctgtacagtatgtaaatgctattaatgtcgtcactcacatgcacgacagtccttgttcccccaggaagggcctggtggccccagcacacacttgggattatgtgtatacataaataaatattgggctgtttccctcttcctg

SEQ ID NO: 17845 - DNA, 2617 bp, Homo sapiens
  source 1..2617: mol_type = unassigned DNA
gcacttcgcggagggcgctaggggccgggacgcggccgccgagcgtaggttccggcctttactccgagttgcgcacggagccccagctgcggttgtccgctctggggatcacaggccgcggagacccgggagccacccgccgggccccttcagacgacccgcttccgcaaaccggccgtgggactccggcgccgggcggacgaagcggctccgggaagactcggtcttccccgcccgcctgaggtcgccggggcggggcttcagtgacaggcccgcgcgctaccgcggaaacaggaagttggctgggtgcgcgccggctccggctgcagttcccgggtccctcggccaccgaagccaccctgccctggtgaaagggctcccgcaccgcccggtgctccccatctgcctggcgttgtgcgcagagctggaaagcatggctgttataaatgaattctgattttggggagcagatgccaacttagagcctcgtaccaatctctctgtctttaaaagatgaggtgacttggtgattttcctggaaaattataggtgcccagctaagacctgaatgccatcaccctccccagggctctgcagttttctcgtggtgaacccttgatggatttgttgttgcttgagaaatggcgatgatcgaattggggtttggaagacagaattttcatccattaaagaggaagagttcattgctgttgaaactcatagctgttgtctttgctgtgcttctattttgtgaatttttaatctattacttagcgatctttcagtgtaattggcctgaagtgaaaaccacagcctctgatggtgaacagaccacacgtgagcctgtgctcaaagccatgtttttggctgacacccatttgcttggggaattcctaggccactggctggacaaattacgaagggaatggcagatggagagagcgttccagacagctctgtggttgctgcagccggaagtcgtcttcatcctgggggatatctttgatgaagggaagtggagcacccctgaggcctgggcggatgatgtggagcggtttcagaaaatgttcagacacccaagtcatgtacagctgaaggtagttgctggaaaccatgacattggcttccattatgagatgaacacatacaaagtagaacgctttgagaaagtgttcagctctgaaagactgttttcttggaaaggcattaactttgtgatggtcaacagcgtggcgctgaacggggatggctgtggcatctgctctgaaacagaagcagagctcattgaagtttctcacagactgaactgctcccgagagctgctgtggtggctccagccgcgcctggttctcagtggccacacgcacagcgcctgcgaggtgcaccacgggggccgagtccccgagctcagcgtcccatctttcagttggaggaacagaaacaaccccagtttcatcatgggtagcatcacgcccacagactacaccctctccaagtgctacctcccacgtgaggatgtggttttgatcatctactgtggagtggtgggcttccttgtggtcctcacactcactcactttgggcttctagcctcaccttttctttctggtttgaacttgctcggaaagcgtaagacaagatgaagagcaggcgccattataaatatcaaagcccaagaaatggaactttgggcagagatcatgttagaatcaagtggatgatgagaccaattacaggccgtctctctgcacagcacagaaattctcaatcactgaaatgagtaactgcaaaataaatagttgattgtactgttctcatgctataaaagtggacaggtactctacaacaaatctgttttctcatttttatcaaatatatgtatcatcaaaggttgcatctgtacagtatgtaaatgctattaatgtcgtcactcacatgcacgacagtccttgttcccccaggaagggcctggtggccccagcacacacttgggattatgtgtatacataaataaatattgggctgtttccctcttcctgtgaagtggttctcaaattcctatgtactgtaaagctgtacccttaaaagtacagatgtggccgggcacagtggctcacacctgtaatcccagcactttgggaggctgaggcgggtggatcacttgaggtcaggagttcaagaccagcctggccaacatggtgaaacctcgtctccgctagaaatacaaaaattagccaagcatggtagcaagtgcctataataccagctgaggctgaggcaggagaatcccttgagcccgggaggcggaggttgcagtgagccaagatcatgccactgcactccagcctgggcaacagagtgagactccgtctcaaaaaatatatttaaaaaaaaaaaagtacagatgtgatgtgcagaacatattgttttcgtagatttttatacttgatcaattaatggaatcagatttttagataagtgtaattttctctataggagaccacgttgctacatctgttaatgcctgtcagtgatcaaaagaaacttaaaaagtggaatgggatatggcttttggtacctgaaaataaatgctttaataattgtaagccagataaaa

SEQ ID NO: 17846 - DNA, 1910 bp, Homo sapiens
  source 1..1910: mol_type = unassigned DNA
accgaagccaccctgccctggtgaaagggctcccgcaccgcccggtgctccccatctgcctggcgttgtgcgcagagctggaaagcatggctgttataaatgaattctgattttggggagcagatgccaacttagagcctcgtaccaatctctctgtctttaaaagatgaggtgacttggtgattttcctggaaaattatagcgatctttcagtgtaattggcctgaagtgaaaaccacagcctctgatggtgaacagaccacacgtgagcctgtgctcaaagccatgtttttggctgacacccatttgcttggggaattcctaggccactggctggacaaattacgaagagatggagttttgctgtgttgcccatgctggttttgaactcctggcctcaagtgatcctccctccttggcctcccaaagcattgaaattacagggaatggcagatggagagagcgttccagacagctctgtggttgctgcagccggaagtcgtcttcatcctgggggatatctttgatgaagggaagtggagcacccctgaggcctgggcggatgatgtggagcggtttcagaaaatgttcagacacccaagtcatgtacagctgaaggtagttgctggaaaccatgacattggcttccattatgagatgaacacatacaaagtagaacgctttgagaaagtgttcagctctgaaagactgttttcttggaaaggcattaactttgtgatggtcaacagcgtggcgctgaacggggatggctgtggcatctgctctgaaacagaagcagagctcattgaagtttctcacagactgaactgctcccgagaggcacgtggctccagccggtgtggacctgggcctctgctgcccacgtctgcccctgtcctcctgcagcattatcctctgtatcggagaagtgatgctaactgttctggggaagacgctgctcctgcagaggaaagggacatcccatttaaggagaactatgacgtgctttcacgggaggcatcacaaaagctgctgtggtggctccagccgcgcctggttctcagtggccacacgcacagcgcctgcgaggtgcaccacgggggccgagtccccgagctcagcgtcccatctttcagttggaggaacagaaacaaccccagtttcatcatgggaacagatgcttagttgagcatcaaggggcaggaagacacctttccctccttgttcctcgctgaccgatgaccctggaactccacggtgcctctctgaatctctgttatggatcccccactatatttgatgggaacccagtgagccaggggccagttttgacagggtagcatcacgcccacagactacaccctctccaagtgctacctcccacgtgaggatgtggttttgatcatctactgtggagtggtgggcttccttgtggtcctcacactcactcactttgggcttctagcctcaccttttctttctggtttgaacttgctcggaaagcgtaagacaagatgaagagcaggcgccattataaatatcaaagcccaagaaatggaactttgggcagagatcatgttagaatcaagtggatgatgagaccaattacaggccgtctctctgcacagcacagaaattctcaatcactgaaatgagtaactgcaaaataaatagttgattgtactgttctcatgctataaaagtggacaggtactctacaacaaatctgttttctcatttttatcaaatatatgtatcatcaaaggttgcatctgtacagtatgtaaatgctattaatgtcgtcactcacatgcacgacagtccttgttcccccaggaagggcctggtggccccagcacacacttgggattatgtgtatacataaataaatattgggctgtttccctctt

SEQ ID NO: 17847 - DNA, 1898 bp, Homo sapiens
  source 1..1898: mol_type = unassigned DNA
gccggctccggctgcagttcccgggtccctcggccaccgaagccaccctgccctggtgaaagggctcccgcaccgcccggtgctccccatctgcctggcgttgtgcgcagagctggaaagcatggctgttataaatgaattctgattttggggagcagatgccaacttagagcctcgtaccaatctctctgtctttaaaagatgaggtgacttggtgattttcctggaaaattataggtgcccagctaagacctgaatgccatcaccctccccagggctctgcagttttctcgtggtgaacccttgatggatttgttgttgcttgagaaatggcgatgatcgaattggggtttggaagacagaattttcatccattaaagaggaagagttcattgctgttgaaactcatagctgttgtctttgctgtgcttctattttgtgaatttttaatctattacttagcgatctttcagtgtaattggcctgaagtgaaaaccacagcctctgatggtgaacagaccacacgtgagcctgtgctcaaagccatgtttttggctgacacccatttgcttggggaattcctaggccactggctggacaaattacgaagggaatggcagatggagagagcgttccagacagctctgtggttgctgcagccggaagtcgtcttcatcctgggggatatctttgatgaagggaagtggagcacccctgaggcctgggcggatgatgtggagcggtttcagaaaatgttcagacacccaagtcatgtacagctgaaggtagttgctggaaaccatgacattggcttccattatgagatgaacacatacaaagtagaacgctttgagaaagtgttcagctctgaaagactgttttcttggaaaggcattaactttgtgatggtcaacagcgtggcgctgaacggggatggctgtggcatctgctctgaaacagaagcagagctcattgaagtttctcacagactgaactgctcccgagagcaggcacgtggctccagccggtgtggacctgggcctctgctgcccacgtctgcccctgtcctcctgcagcattatcctctgtatcggagaagtgatgctaactgttctggggaagacgctgctcctgcagaggaaagggacatcccatttaaggagaactatgacgtgctttcacgggaggcatcacaaaagctgctgtggtggctccagccgcgcctggttctcagtggccacacgcacagcgcctgcgaggtgcaccacgggggccgagtccccgagctcagcgtcccatctttcagttggaggaacagaaacaaccccagtttcatcatgggtagcatcacgcccacagactacaccctctccaagtgctacctcccacgtgaggatgtggttttgatcatctactgtggagtggtgggcttccttgtggtcctcacactcactcactttgggcttctagcctcaccttttctttctggtttgaacttgctcggaaagcgtaagacaagatgaagagcaggcgccattataaatatcaaagcccaagaaatggaactttgggcagagatcatgttagaatcaagtggatgatgagaccaattacaggccgtctctctgcacagcacagaaattctcaatcactgaaatgagtaactgcaaaataaatagttgattgtactgttctcatgctataaaagtggacaggtactctacaacaaatctgttttctcatttttatcaaatatatgtatcatcaaaggttgcatctgtacagtatgtaaatgctattaatgtcgtcactcacatgcacgacagtccttgttcccccaggaagggcctggtggccccagcacacacttgggattatgtgtatacataaataaatat

SEQ ID NO: 17848 - DNA, 1667 bp, Homo sapiens
  source 1..1667: mol_type = unassigned DNA
gcacttcgcggagggcgctaggggccgggacgcggccgccgagcgtaggttccggcctttactccgagttgcgcacggagccccagctgcggttgtccgctctggggatcacaggccgcggagacccgggagccacccgccgggccccttcagacgacccgcttccgcaaaccggccgtgggactccggcgccgggcggacgaagcggctccgggaagactcggtcttccccgcccgcctgaggtcgccggggcggggcttcagtgacaggcccgcgcgctaccgcggaaacaggaagttggctgggtgcgcgccggctccggctgcagttcccgggtccctcggccaccgaagccaccctgccctggtgaaagggctcccgcaccgcccggtgctccccatctgcctggcgttgtgcgcagagctggaaagcatggctgttataaatgaattctgattttggggagcagatgccaacttagagcctcgtaccaatctctctgtctttaaaagatgaggtgacttggtgattttcctggaaaattataggtgcccagctaagacctgaatgccatcaccctccccagggctctgcagttttctcgtggtgaacccttgatggatttgttgttgcttgagaaatggcgatgatcgaattggggtttggaagacagaattttcatccattaaagaggaagagttcattgctgttgaaactcatagctgttgtctttgctgtgcttctattttgtgaatttttaatctattacttagcgatctttcagtgtaattggcctgaagtgaaaaccacagcctctgatggtgaacagaccacacgtgagcctgtgctcaaagccatgtttttggctgacacccatttgcttggggaattcctaggccactggctggacaaattacgaagggaatggcagatggagagagcgttccagacagctctgtggttgctgcagccggaagtcgtcttcatcctgggggatatctttgatgaagggaagtggagcacccctgaggcctgggcggatgatgtggagcggtttcagaaaatgttcagacacccaagtcatgtacagctgaaggtagttgctggaaaccatgacattggcttccattatgagatgaacacatacaaagtagaacgctttgagaaagtgttcagctctgaaagactgttttcttggaaaggcattaactttgtgatggtcaacagcgtggcgctgaacggggatggctgtggcatctgctctgaaacagaagcagagctcattgaagtttctcacagactgaactgctcccgagagcaggcacgtggctccagccggtgtggacctgggcctctgctgcccacgtctgcccctgtcctcctgcagcattatcctctgtatcggagaagtgatgctaactgttctggggaagacgctgctcctgcagaggaaagggacatcccatttaaggagaactatgacgtgctttcacgggaggcatcacaaaagctgctgtggtggctccagccgcgcctggttctcagtggccacacgcacagcgcctgcgaggtgcaccacgggggccgagtccccgagctcagcgtcccatctttcagttggaggaacagaaacaaccccagtttcatcatgggaacagatgcttag

SEQ ID NO: 17849 - DNA, 4236 bp, Homo sapiens
  source 1..4236: mol_type = unassigned DNA
aagcaagtgcataataaatattatagttatcctgattgtctcctttattcatcacacacttcctaagcacatctctggagggcactttccaaggctccgggggaggagaggaaagaggcgcagccaggcctggtgggtcccggaggggcagcgcggcgcgggaggggaacggggaggcacggcctggctgccaccgcgcgcggaacccgggagcggctccggggctgtcagctgcccgcctggctcctccaaggcctggagctcggacgcgggctctgggggcttctggggcgcggaagcgggctcgcggggagcagtggccgcccccggccgccgcggtggctgtgctcagaagccggccctggcgtcaggaggccgggcgcgcggcgcggggcgcgagttcccctgcccgcctgtgcgccccgcaacgggcctttcctgggccctaacgacagctcgcccgtgcttcgccctcgcagctctcctgtgtccccaaaatgcctttcccgcgtcccccgcccttcagcggtgactgcccaggggactctgtaacgcgacactcagactgccgagcctgccaggcacttcgcggagggcgctaggggccgggacgcggccgccgagcgtaggttccggcctttactccgagttgcgcacggagccccagctgcggttgtccgctctggggatcacaggccgcggagacccgggagccacccgccgggccccttcagacgacccgcttccgcaaaccggccgtgggactccggcgccgggcggacgaagcggctccgggaagactcggtcttccccgcccgcctgaggtcgccggggcggggcttcagtgacaggcccgcgcgctaccgcggaaacaggaagttggctgggtgcgcgccggctccggctgcagttcccgggtccctcggccaccgaagccaccctgccctggtgaaagggctcccgcaccgcccggtgctccccatctgcctggcgttgtgcgcagagctggaaagcatggctgttataaatgaattctgattttggggagcagatgccaacttagagcctcgtaccaatctctctgtctttaaaagatgaggtgacttggtgattttcctggaaaattataggtgcccagctaagacctgaatgccatcaccctccccagggctctgcagttttctcgtggtgaacccttgatggatttgttgttgcttgagaaatggcgatgatcgaattggggtttggaagacagaattttcatccattaaagaggaagagttcattgctgttgaaactcatagctgttgtctttgctgtgcttctattttgtgaatttttaatctattacttagcgatctttcagtgtaattggcctgaagtgaaaaccacagcctctgatggtgaacagaccacacgtgagcctgtgctcaaagccatgtttttggctgacacccatttgcttggggaattcctaggccactggctggacaaattacgaagggaatggcagatggagagagcgttccagacagctctgtggttgctgcagccggaagtcgtcttcatcctgggggatatctttgatgaagggaagtggagcacccctgaggcctgggcggatgatgtggagcggtttcagaaaatgttcagacacccaagtcatgtacagctgaaggtagttgctggaaaccatgacattggcttccattatgagatgaacacatacaaagtagaacgctttgagaaagtgttcagctctgaaagactgttttcttggaaaggcattaactttgtgatggtcaacagcgtggcgctgaacggggatggctgtggcatctgctctgaaacagaagcagagctcattgaagtttctcacagactgaactgctcccgagaggcacgtggctccagccggtgtggacctgggcctctgctgcccacgtctgcccctgtcctcctgcagcattatcctctgtatcggagaagtgatgctaactgttctggggaagacgctgctcctgcagaggaaagggacatcccatttaaggagaactatgacgtgctttcacgggaggcatcacaaaagctgctgtggtggctccagccgcgcctggttctcagtggccacacgcacagcgcctgcgaggtgcaccacgggggccgagtccccgagctcagcgtcccatctttcagttggaggaacagaaacaaccccagtttcatcatgggtagcatcacgcccacagactacaccctctccaagtgctacctcccacgtgaggatgtggttttgatcatctactgtggagtggtgggcttccttgtggtcctcacactcactcactttgggcttctagcctcaccttttctttctggtttgaacttgctcggaaagcgtaagacaagatgaagagcaggcgccattataaatatcaaagcccaagaaatggaactttgggcagagatcatgttagaatcaagtggatgatgagaccaattacaggccgtctctctgcacagcacagaaattctcaatcactgaaatgagtaactgcaaaataaatagttgattgtactgttctcatgctataaaagtggacaggtactctacaacaaatctgttttctcatttttatcaaatatatgtatcatcaaaggttgcatctgtacagtatgtaaatgctattaatgtcgtcactcacatgcacgacagtccttgttcccccaggaagggcctggtggccccagcacacacttgggattatgtgtatacataaataaatattgggctgtttccctcttcctgtgaagtggttctcaaattcctatgtactgtaaagctgtacccttaaaagtacagatgtggccgggcacagtggctcacacctgtaatcccagcactttgggaggctgaggcgggtggatcacttgaggtcaggagttcaagaccagcctggccaacatggtgaaacctcgtctccgctagaaatacaaaaattagccaagcatggtagcaagtgcctataataccagctgaggctgaggcaggagaatcccttgagcccgggaggcggaggttgcagtgagccaagatcatgccactgcactccagcctgggcaacagagtgagactccgtctcaaaaaatatatttaaaaaaaaaaaagtacagatgtgatgtgcagaacatattgttttcgtagatttttatacttgatcaattaatggaatcagatttttagataagtgtaattttctctataggagaccacgttgctacatctgttaatgcctgtcagtgatcaaaagaaacttaaaaagtggaatgggatatggcttttggtacctgaaaataaatgctttaataattgtaagccagataaaagttattctttttgttttttttcttaacagtctggctgttgtttgaattaaactcttaaacaggatgtttagttagagggtaattgttgagtaatgatgcatacaacagcatacttccctttcttgctgggggtgcagcttttcagttttcttgttttactttgacagtgcaaggggaactgaaaataatttccattgtattatttatcttagttcagctgagggctttatgagacagtggatggggaggcagtaagacggtgatgagataaaatgtgtgtgttgcactgactgtctataaagttatcctttcttcatgaaaaagtagcatttaaatctggatgagtttataaaggattacaaaatgctgatttatagagtaaactttaaaatattaaagactaaagactaaaagaagagtaataatgaagtaatgtaggctgtcacttctctagatttgtattgttgaaaatttaactttggacatctttatagattattattttagacctacaaaaactaccctcaactctgtggctacagctagaatatgaagcatcattgctacaccagttcttactttctagatattgttggtgtgtcataatgtttgaggctgtatttgtaagtcttgcaagtgtgagaaagagccgtatcttttgactttatacttcagattaaggttttgtaatgtttcttcttcaaaaggcaagtgaagctgtcatcctcattctcctaggccagacacaaacattgacacgtcaaggttttttttttttttttttttggcctgagtctcactttgatgtccaggctggagtgcgatggcacgacctcggctcactgcaat

SEQ ID NO: 17850 - DNA, 582 bp, Homo sapiens
  source 1..582: mol_type = unassigned DNA
cacttgcagcctcggacgcgcggcgaggcggccgccgccggaggagcccccgcccctgcgcgcctccctcccgggagcccctgcctccctcggtgcgcgctgctgctcgcagccgccgcggccgccgaagaggagcccggggccagtctgtttccaggtctggcggggggccgggctgcggtggcggcagcggtgggagatgccggggcggccggcggaggtccatgtggcgctctaggtgggatgccagcgtcctgaaggcggaggccctggccctcctcccctgcggcctgggcatggcattctcccagtcccacgtgatggccgctcggcggcaccagcacagccggctcatcatcgaggtggacgagtacagctccaaccccacccaggccttcaccttctacaacatcaaccagggccgcttccagccaccgcatgtgcagatggtggacccggtgcctcacgatgcccccaaacctccaggctacacccgcttcgtctgcgtctctgatacccactcgaggacggaccccatccagatgccgtacggcgacgtgctgatccacgctggggacttca

SEQ ID NO: 17851 - DNA, 949 bp, Homo sapiens
  source 1..949: mol_type = unassigned DNA
acttgcagcctcggacgcgcggcgaggcggccgccgccggaggagcccccgcccctgcgcgcctccctcccgggagcccctgcctccctcggtgcgcgctgctgctcgcagccgccgcggccgccgaagaggagcccggggccagggtggacccggtgcctcacgatgcccccaaacctccaggctacacccgcttcgtctgcgtctctgatacccactcgaggacggaccccatccagatgccgtacggcgacgtgctgatccacgctggggacttcactgagctggggctcccgagcgaggtgaagaagttcaacgagtggctgggcagcctgccctacgagtacaagatcgtgatcgcaggcaaccacgagctgacctttgaccaggagttcatggccgacctcatcaagcaggacttttactacttcccatctgtgtcgaagctgaagccggagaactatgagaatgtgcagtcgctgctgaccaactgcatctaccttcaggactcggaggtcaccgtgcggggcttccggatctatggctccccatggcagccctggttctacggctggggcttcaacctcccgcgaggccaagccctgctggagaaatggaacctcattcccgaaggcgtagacatcctgataacccatggaccaccactgggcttcctggactgggtccccaagaagatgcagcgggtgggctgtgtggagctgctcaacacggtgcagaggcgcgtccagccgcggttacatgtctttggccacatccacgaagggtatggtgtcatggcagatgggacgaccacctatgtgaatgcgtccgtatgcactgtgaactaccagcccgtgaacccgcccatagtcatcgacctccccacaccccggaactcctgactgctccccactgcccctgccctgcccgcccgtgtcagctccacagg

SEQ ID NO: 17852 - DNA, 2729 bp, Homo sapiens
  source 1..2729: mol_type = unassigned DNA
agcaaggcagggcctctttacactgggtgtcgcgccgtctgagttcctgacttgtttacccatcccgttggggctccggccgctgcaggctacctgctgtgcccgggattggggacctgtgactcccgagtggaagagatggtggcccaggaggaggaccccgacctattcagactgggagctggggtcagagtgtctccgtctccggagggggaccttccagaccccgggcgggaggggcccacagcagggtgccccggcggccccaggagggggtccgggcctcgggcgaaggctgcggcgccccggaaggagccgcgcacgcccctgcacgcggtgcccgctgcggaggccacggatccggagtctgtttccaggtctggcggggggccgggctgcggtggcggcagcggtgggagatgccggggcggccggcggaggtccatgtggcgctctaggtgggatgccagcgtcctgaaggcggaggccctggccctcctcccctgcggcctgggcatggcattctcccagtcccacgtgatggccgctcggcggcaccagcacagccggctcatcatcgaggtggacgagtacagctccaaccccacccaggccttcaccttctacaacatcaaccagggccgcttccagccaccgcatgtgcagatggtggacccggtgcctcacgatgcccccaaacctccaggctacacccgcttcgtctgcgtctctgatacccactcgaggacggaccccatccagatgccgtacggcgacgtgctgatccacgctggggacttcactgagctggggctcccgagcgaggtgaagaagttcaacgagtggctgggcagcctgccctacgagtacaagatcgtgatcgcaggcaaccacgagctgacctttgaccaggagttcatggccgacctcatcaagcaggacttttactacttcccatctgtgtcgaagctgaagccggagaactatgagaatgtgcagtcgctgctgaccaactgcatctaccttcaggactcggaggtcaccgtgcggggcttccggatctatggctccccatggcagccctggttctacggctggggcttcaacctcccgcgaggccaagccctgctggagaaatggaacctcattcccgaaggcgtagacatcctgataacccatggaccaccactgggcttcctggactgggtccccaagaagatgcagcgggtgggctgtgtggagctgctcaacacggtgcagaggcgcgtccagccgcggttacatgtctttggccacatccacgaagggtatggtgtcatggcagatgggacgaccacctatgtgaatgcgtccgtatgcactgtgaactaccagcccgtgaacccgcccatagtcatcgacctccccacaccccggaactcctgactgctccccactgcccctgccctgcccgcccgtgtcagctccacaggcctggcccggccactgttccttccatgctgagttgcctggacgacccatctggctgcggggactggcctagcaggcaggtcagggccttggaacgactctttagccttctgtcacctggagttgggaccctgcgcatccccatcaggggttctgtgctcatttactttttctgcgtgtacatcctgcgtgtacctcgttaaaggacctactaagctcatggccctgtcatgtttgggaaatgactaaatcttcattcttctcccttggacgccctcctggtttgggaagctgctgctcttgaatgggttttggaagttacacaaaatctccctctaaccacgggtctgtgtggcggcatgcccctgggttggggtgggtgggaggattcgtgagctgcacacagacagtccctttctctcctcccaagtgagggaggagacaggcccaaggcggaggccctccgagggagcatttagggacatctcaggaattcagaccgcacctggccaggcccacagctgtttgcctggcattgttcccccctttttcttcccataggcatttttgtttacttgaacaatgacctgagtgtcctaggcattcactcggagcctggatgatgggggctggttctacagaatgagccactggcattcgtgcccaggaccagtgagagcgttcccagtcatggggggatgacccttggtcccacggggaacacactgctctgtagaatgcggtagcctggatggagggtctgcaggcttaggctgcagcaggcctgccatgggtgtgaacccatgtccaggcacgcaccgacacacatgcacgcacgcacccctcttaattgaaccaagtgggtcctgtgtttctcttttctgccccgtagtgaggttctgttccttggtgcggcttcccttgcaccgttaggattctgtctggcatgcctgcagccgaggaagcccaggaccagccggccctgtgaattggagggtggcacagggaccgagcgggccccaggctccagcagccccaccttggacagcttctttttcttctttgaattaggactggagggggtggggccagggcggtggtgggaaccggtagggcctagatgaggggcaggcagtcaggcagaaatgggcaagttcagggtcagattctgtcgttatttaatattttgttcatcatggactttttctgcatttattttgatttttaacgttgcattaaagtagtattatttgtcctga

SEQ ID NO: 17853 - DNA, 1074 bp, Homo sapiens
  source 1..1074: mol_type = unassigned DNA
acttgcagcctcggacgcgcggcgaggcggccgccgccggaggagcccccgcccctgcgcgcctccctcccgggagcccctgcctccctcggtgcgcgctgctgctcgcagccgccgcggccgccgaagaggagcccggggccaggcagcctgccctacgagtacaagatcgtgatcgcaggcaaccacgagctgacctttgaccaggagttcatggccgacctcatcaagcaggacttttactacttcccatctgtgtcgaagctgaagccggagaactatgagaatgtgcagtcgctgctgaccaactgcatctaccttcaggactcggaggtcaccgtgcggggcttccggatctatggctccccatggcagccctggttctacggctggggcttcaacctcccgcgaggccaagccctgctggagaaatggaacctcattcccgaaggcgtagacatcctgataacccatggaccaccactgggcttcctggactgggtccccaagaagatgcagcgggtgggctgtgtggagctgctcaacacggtgcagaggcgcgtccagccgcggttacatgtctttggccacatccacgaagggtatggtgtcatggcagatgggacgaccacctatgtgaatgcgtccgtatgcactgtgaactaccagcccgtgaacccgcccatagtcatcgacctccccacaccccggaactcctgactgctccccactgcccctgccctgcccgcccgtgtcagctccacaggcctggcccggccactgttccttccatgctgagttgcctggacgacccatctggctgcggggactggcctagcaggcaggtcagggccttggaacgactctttagccttctgtcacctggagttgggaccctgcgcatccccatcaggggttctgtgctcatttactttttctgcgtgtacatcctgcgtgtacctcgttaaaggacctactaagctcatggccctgtcatgtttgggaaatgactaaatcttcattcttctcccttggacgccctcctggtttgggaagctgctgctcttgaatggg

SEQ ID NO: 17854 - DNA, 2507 bp, Homo sapiens
  source 1..2507: mol_type = unassigned DNA
acttgcagcctcggacgcgcggcgaggcggccgccgccggaggagcccccgcccctgcgcgcctccctcccgggagcccctgcctccctcggtgcgcgctgctgctcgcagccgccgcggccgccgaagaggagcccggggccagtctgtttccaggtctggcggggggccgggctgcggtggcggcagcggtgggagatgccggggcggccggcggaggtccatgtggcgctctaggtgggatgccagcgtcctgaaggcggaggccctggccctcctcccctgcggcctgggcatggcattctcccagtcccacgtgatggccgctcggcggcaccagcacagccggctcatcatcgaggtggacgagtacagctccaaccccacccaggccttcaccttctacaacatcaaccagggccgcttccagccaccgcatgtgcagatggtggacccggtgcctcacgatgcccccaaacctccaggctacacccgcttcgtctgcgtctctgatacccactcgaggacggaccccatccagatgccgtacggcgacgtgctgatccacgctggggacttcactgagctggggctcccgagcgaggtgaagaagttcaacgagtggctgggcagcctgccctacgagtacaagatcgtgatcgcaggcaaccacgagctgacctttgaccaggagttcatggccgacctcatcaagcaggacttttactacttcccatctgtgtcgaagctgaagccggagaactatgagaatgtgcagtcgctgctgaccaactgcatctaccttcaggactcggaggtcaccgtgcggggcttccggatctatggctccccatggcagccctggttctacggctggggcttcaacctcccgcgaggccaagccctgctggagaaatggaacctcattcccgaaggcgtagacatcctgataacccatggaccaccactgggcttcctggactgggtccccaagaagatgcagcgggtgggctgtgtggagctgctcaacacggtgcagaggcgcgtccagccgcggttacatgtctttggccacatccacgaagggtatggtgtcatggcagatgggacgaccacctatgtgaatgcgtccgtatgcactgtgaactaccagcccgtgaacccgcccatagtcatcgacctccccacaccccggaactcctgactgctccccactgcccctgccctgcccgcccgtgtcagctccacaggcctggcccggccactgttccttccatgctgagttgcctggacgacccatctggctgcggggactggcctagcaggcaggtcagggccttggaacgactctttagccttctgtcacctggagttgggaccctgcgcatccccatcaggggttctgtgctcatttactttttctgcgtgtacatcctgcgtgtacctcgttaaaggacctactaagctcatggccctgtcatgtttgggaaatgactaaatcttcattcttctcccttggacgccctcctggtttgggaagctgctgctcttgaatgggttttggaagttacacaaaatctccctctaaccacgggtctgtgtggcggcatgcccctgggttggggtgggtgggaggattcgtgagctgcacacagacagtccctttctctcctcccaagtgagggaggagacaggcccaaggcggaggccctccgagggagcatttagggacatctcaggaattcagaccgcacctggccaggcccacagctgtttgcctggcattgttcccccctttttcttcccataggcatttttgtttacttgaacaatgacctgagtgtcctaggcattcactcggagcctggatgatgggggctggttctacagaatgagccactggcattcgtgcccaggaccagtgagagcgttcccagtcatggggggatgacccttggtcccacggggaacacactgctctgtagaatgcggtagcctggatggagggtctgcaggcttaggctgcagcaggcctgccatgggtgtgaacccatgtccaggcacgcaccgacacacatgcacgcacgcacccctcttaattgaaccaagtgggtcctgtgtttctcttttctgccccgtagtgaggttctgttccttggtgcggcttcccttgcaccgttaggattctgtctggcatgcctgcagccgaggaagcccaggaccagccggccctgtgaattggagggtggcacagggaccgagcgggccccaggctccagcagccccaccttggacagcttctttttcttctttgaattaggactggagggggtggggccagggcggtggtgggaaccggtagggcctagatgaggggcaggcagtcaggcagaaatgggcaagttcagggtcagattctgtcgttatttaatattttgttcatcatggactttttctgcatttattttgatttttaacgttgcattaaagtagtattatttgtcctg

SEQ ID NO: 17855 - DNA, 728 bp, Homo sapiens
  source 1..728: mol_type = unassigned DNA
aaattgtatttgaatcctgagcaaccacagccctctagcctcttcccctccctagccatatctgaacagcttcccatttcaactccatagatacgtgactctccaagtgctttattttgaaaactaggacgtagcactttgcagaagaaaaatcagtccacttgctattatttatgtgatcgctgatctgctagatggatatagaaagcaccaagaattataataatttatggagtagagcactggtttacaaacatatttctctgcccgagctttgtgtgtttctttgcgtctcggggctcgttctgtgcaatgggaatggagaatattcagaatttgaagacaagcccggcgagccgactgcattcatagctaaaattaaaggaataagtgagcagctatttgtggcagacaggacatgatccatctgtttccaggtctggcggggggccgggctgcggtggcggcagcggtgggagatgccggggcggccggcggaggtccatgtggcgctctaggtgggatgccagcgtcctgaaggcggaggccctggccctcctcccctgcggcctgggcatggcattctcccagtcccacgtgatggccgctcggcggcaccagcacagccggctcatcatcgaggtggacgagtacagctccaaccccacccaggccttcaccttctacaacatcaaccagggccgcttccagccaccgcatgtgcagat

SEQ ID NO: 17856 - DNA, 1838 bp, Homo sapiens
  source 1..1838: mol_type = unassigned DNA
ttttctctgcatcgccctgagccaccggcctgaagacaggcagctgcacttttggctgtcccatcagagaggctggggctattcagtcgctcctactctcagttaaaggccccaagaggagacggagccaaggtgcgtctaggatcctggtgaaagctttccaaggtggggttcctcagaacgccgcagcggggatggctgttgggggagatgtttctctggaagcttctcatgcttaataagacagtcgtttctgtgtgctcattgactgtcatccgagttttggacccaggacagcaccatattatgctagccccccagtgattgttaaagagctgccgatgaatggaagagaaacacagtctgtttccaggtctggcggggggccgggctgcggtggcggcagcggtgggagatgccggggcggccggcggaggtccatgtggcgctctaggtgggatgccagcgtcctgaaggcggaggccctggccctcctcccctgcggcctgggcatggcattctcccagtcccacgtgatggccgctcggcggcaccagcacagccggctcatcatcgaggtggacgagtacagctccaaccccacccaggccttcaccttctacaacatcaaccagggccgcttccagccaccgcatgtgcagatggtggacccggtgcctcacgatgcccccaaacctccaggctacacccgcttcgtctgcgtctctgatacccactcgaggacggaccccatccagatgccgtacggcgacgtgctgatccacgctggggacttcactgagctggggctcccgagcgaggtgaagaagttcaacgagtggctgggcagcctgccctacgagtacaagatcgtgatcgcaggcaaccacgagctgacctttgaccaggagttcatggccgacctcatcaagcaggacttttactacttcccatctgtgtcgaagctgaagccggagaactatgagaatgtgcagtcgctgctgaccaactgcatctaccttcaggactcggaggtcaccgtgcggggcttccggatctatggctccccatggcagccctggttctacggctggggcttcaacctcccgcgaggccaagccctgctggagaaatggaacctcattcccgaaggcgtagacatcctgataacccatggaccaccactgggcttcctggactgggtccccaagaagatgcagcgggtgggctgtgtggagctgctcaacacggtgcagaggcgcgtccagccgcggttacatgtctttggccacatccacgaagggtatggtgtcatggcagatgggacgaccacctatgtgaatgcgtccgtatgcactgtgaactaccagcccgtgaacccgcccatagtcatcgacctccccacaccccggaactcctgactgctccccactgcccctgccctgcccgcccgtgtcagctccacaggcctggcccggccactgttccttccatgctgagttgcctggacgacccatctggctgcggggactggcctagcaggcaggtcagggccttggaacgactctttagccttctgtcacctggagttgggaccctgcgcatccccatcaggggttctgtgctcatttactttttctgcgtgtacatcctgcgtgtacctcgttaaaggacctactaagctcatggccctgtcatgtttgggaaatgactaaatcttcattcttctcccttggacgccctcctggtttgggaagctgctgctcttgaatgggttttggaagttacacaaaatctccctctaaccacgggtctgtgtggcggcatgcccctgggtt

SEQ ID NO: 17857 - DNA, 1483 bp, Homo sapiens
  source 1..1483: mol_type = unassigned DNA
gtttctttgcgtctcggggctcgttctgtgcaatgggaatggagaatattcagaatttgaagacaagcccggcgagccgactgcattcatagctaaaattaaaggaataagtgagcagctatttgtggcagacaggacatgatccatctgtttccaggtctggcggggggccgggctgcggtggcggcagcggtgggagatgccggggcggccggcggaggtccatgtggcgctctaggtgggatgccagcgtcctgaaggcggaggccctggccctcctcccctgcggcctgggcatggcattctcccagtcccacgtgatggccgctcggcggcaccagcacagccggctcatcatcgaggtggacgagtacagctccaaccccacccaggccttcaccttctacaacatcaaccagggccgcttccagccaccgcatgtgcagatggtggacccggtgcctcacgatgcccccaaacctccaggctacacccgcttcgtctgcgtctctgatacccactcgaggacggaccccatccagatgccgtacggcgacgtgctgatccacgctggggacttcactgagctggggctcccgagcgaggtgaagaagttcaacgagtggctgggcagcctgccctacgagtacaagatcgtgatcgcaggcaaccacgagctgacctttgaccaggagttcatggccgacctcatcaagcaggacttttactacttcccatctgtgtcgaagctgaagccggagaactatgagaatgtgcagtcgctgctgaccaactgcatctaccttcaggactcggaggtcaccgtgcggggcttccggatctatggctccccatggcagccctggttctacggctggggcttcaacctcccgcgaggccaagccctgctggagaaatggaacctcattcccgaaggcgtagacatcctgataacccatggaccaccactgggcttcctggactgggtccccaagaagatgcagcgggtgggctgtgtggagctgctcaacacggtgcagaggcgcgtccagccgcggttacatgtctttggccacatccacgaagggtatggtgtcatggcagatgggacgaccacctatgtgaatgcgtccgtatgcactgtgaactaccagcccgtgaacccgcccatagtcatcgacctccccacaccccggaactcctgactgctccccactgcccctgccctgcccgcccgtgtcagctccacaggcctggcccggccactgttccttccatgctgagttgcctggacgacccatctggctgcggggactggcctagcaggcaggtcagggccttggaacgactctttagccttctgtcacctggagttgggaccctgcgcatccccatcaggggttctgtgctcatttactttttctgcgtgtacatcctgcgtgtacctcgttaaaggacctactaagctcatggccctgtcatg

SEQ ID NO: 17858 - DNA, 1898 bp, Homo sapiens
  source 1..1898: mol_type = unassigned DNA
acttgcagcctcggacgcgcggcgaggcggccgccgccggaggagcccccgcccctgcgcgcctccctcccgggagcccctgcctccctcggtgcgcgctgctgctcgcagccgccgcggccgccgaagaggagcccggggccagtctgtttccaggtctggcggggggccgggctgcggtggcggcagcggtgggagatgccggggcggccggcggaggtccatgtggcgctcattctcccagtcccacgtgatggccgctcggcggcaccagcacagccggctcatcatcgaggtggacgagtacagctccaaccccacccaggccttcaccttctacaacatcaaccagggccgcttccagccaccgcatgtgcagatggtggacccggtgcctcacgatgcccccaaacctccaggctacacccgcttcgtctgcgtctctgatacccactcgaggacggaccccatccagatgccgtacggcgacgtgctgatccacgctggggacttcactgagctggggctcccgagcgaggtgaagaagttcaacgagtggctgggcagcctgccctacgagtacaagatcgtgatcgcaggcaaccacgagctgacctttgaccaggagttcatggccgacctcatcaagcaggacttttactacttcccatctgtgtcgaagctgaagccggagaactatgagaatgtgcagtcgctgctgaccaactgcatctaccttcaggactcggaggtcaccgtgcggggcttccggatctatggctccccatggcagccctggttctacggctggggcttcaacctcccgcgaggccaagccctgctggagaaatggaacctcattcccgaaggcgtagacatcctgataacccatggaccaccactgggcttcctggactgggtccccaagaagatgcagcgggtgggctgtgtggagctgctcaacacggtgcagaggcgcgtccagccgcggttacatgtctttggccacatccacgaagggtatggtgtcatggcagatgggacgaccacctatgtgaatgcgtccgtatgcactgtgaactaccagcccgtgaacccgcccatagtcatcgacctccccacaccccggaactcctgactgctccccactgcccctgccctgcccgcccgtgtcagctccacaggcctggcccggccactgttccttccatgctgagttgcctggacgacccatctggctgcggggactggcctagcaggcaggtcagggccttggaacgactctttagccttctgtcacctggagttgggaccctgcgcatccccatcaggggttctgtgctcatttactttttctgcgtgtacatcctgcgtgtacctcgttaaaggacctactaagctcatggccctgtcatgtttgggaaatgactaaatcttcattcttctcccttggacgccctcctggtttgggaagctgctgctcttgaatgggttttggaagttacacaaaatctccctctaaccacgggtctgtgtggcggcatgcccctgggttggggtgggtgggaggattcgtgagctgcacacagacagtccctttctctcctcccaagtgagggaggagacaggcccaaggcggaggccctccgagggagcatttagggacatctcaggaattcagaccgcacctggccaggcccacagctgtttgcctggcattgttcccccctttttcttcccataggcatttttgtttacttgaacaatgacctgagtgtcctaggcattcactcggagcctggatgatgggggctggttctacagaatgagccactggcattcgtgcccaggaccagtgagagcgttcccagtcatggggggatgacccttggtcccac

SEQ ID NO: 17859 - DNA, 2252 bp, Homo sapiens
  source 1..2252: mol_type = unassigned DNA
agaaatgcacagcggtattgatgagtagatccttggattcagaggttggctgaaacgcaccatgcctgcttccatcttttgctctgtaaagttgtgaattgctcatgcctatagggaggaaggatggcacatgggattccttctcaaggcaaagttaccataacggtggatgagtacagctcaaaccccacccaggcattcacgcactacaacatcaaccagagcagattccagcctccacatgtacatatggtcgaccccatcccatatgacactccaaaaccagcgggccacacgcggtttgtctgcatctcagacacacactccagaacagatggtatccagatgccttatggggacatccttctccacacaggcgatttcaccgagctgggactgccctcagaggttaagaagtttaatgactggttaggaaacctgccatatgaatataaaatagtgattgctgggaatcatgaactgacatttgataaggaattcatggcagaccttgttaaacaggactactaccgtttcccctctgtgtccaaattgaaaccagaggactttgacaatgttcagtccctcctgacaaacagtatttacttacaagattcggaggtaacagtgaagggattcaggatatacggtgcaccttggaccccgtggtttaatggatggggctttaacctacccagaggtcagtctctgctggacaagtggaacctcatccctgagggcattgacatactcatgacacatggacctcctctaggttttcgagactgggttccaaaggagcttcaaagagtgggctgtgtggagctgttaaacacggttcagaggcgagtccggcccaagctccatgtgtttggtggaatccatgaaggttatggcatcatgaccgacggttacacaacgtacatcaatgcctcgacgtgtacagtcagctttcaaccgaccaaccctccaattatatttgaccttccaaacccacagggttcctgaagctctaaatgccctattggaatgtgagggaaggtctataaactgccatttttctaattataaacttacattctcttacttatttacaaaccctgtgagttctttttgtaaattgttggaacacaaatgatgctagaggttgtgcttcttattttattttattttaaatggggcatccatttgaaatcagaggaacattgtgaatttgtaaaatgacttctgttttctcaaaggccatgccattgtaaattgttagtgttcgccaaaggacagccaagctttcttttaaaaagtgataaaagtcttattttaatatgctttaagctgaaagaaaaaaaaataagaaacaggcagtgttttaaaaaccaacacagatttgcacaactgtttaagagtattgtttgaaatattttaattttcaatgttttgttgttgttgttttcttggtaatgcttcttttttgcagatgtggtcccaatttatagcaatcttctcaacagaagtaggcatggaaaagacttcttttcatactctcactataaagaaagctgcattgagaagaaaatggctgtcatttaaaggatggtttaactagtgagattcctattgtggttatacaaggtctcattgtttgtttgtttcttttaaattatttcagctttaaaaatacagaaatggaatctgtcaagagcaggtatttcatacggttaaaaaaatgaacatgcagactccttttcaatatgggtttatatatataagtattttttgtgtattatgactacgttaggagtttattattgtcaaggacagtacaactgcaaagggatgctgtatagcaacacatcagaagtcggaaggaactgacacattctctcagagctcaaggtcttaaagagcttgagttaaatctaggtacagttacaggcatgtatagacttaaatggatgcaatggaagctaactaaaataaggcttagttgtcctttctatttaaataccccaagttgtcttcttacttcctctcccctctcccattttgcactgtgtgtcgatgcaatcttcgctagcacaaaatattgtcgctaatagtcatttctgttttcccattgtaaatgctgttgagctttattctattttatgttactttgttaatgaaatttaggaaagcagttgtttctttaaatttattgtgatattctatatctagcggcctttatatgcaaataaaattgcaagatttttaaa

SEQ ID NO: 17860 - DNA, 5591 bp, Homo sapiens
  source 1..5591: mol_type = unassigned DNA
cccagatcgaggctgctcgggtcctttctccccccgcctccctctagcgccgcgccccctggcccccagccccagcctgcggcgggacctccggggtcgaaggttctggcccgctcgcgcccctcgccgcccccgcgcgcccccagcgctcctccagccggctcgggccgctcggctatggatcgcctgctcgccgggcgctgaaggcatccccgggatccggagcgcagcccgggaaagaaatgcacagcggtattgatgagtagatccttggattcagaggttggctgaaacgcaccatgcctgcttccatcttttgctctgtaaagttgtgaattgctcatgcctatagggaggaaggatggcacatgggattccttctcaaggcaaagttaccataacggtggatgagtacagctcaaaccccacccaggcattcacgcactacaacatcaaccagagcagattccagcctccacatgtacatatggtcgaccccatcccatatgacactccaaaaccagcgggccacacgcggtttgtctgcatctcagacacacactccagaacagatggtatccagatgccttatggggacatccttctccacacaggcgatttcaccgagctgggactgccctcagaggttaagaagtttaatgactggttaggaaacctgccatatgaatataaaatagtgattgctgggaatcatgaactgacatttgataaggaattcatggcagaccttgttaaacaggactactaccgtttcccctctgtgtccaaattgaaaccagaggactttgacaatgttcagtccctcctgacaaacagtatttacttacaagattcggaggtaacagtgaagggattcaggatatacggtgcaccttggaccccgtggtttaatggatggggctttaacctacccagaggtcagtctctgctggacaagtggaacctcatccctgagggcattgacatactcatgacacatggacctcctctaggttttcgagactgggttccaaaggagcttcaaagagtgggctgtgtggagctgttaaacacggttcagaggcgagtccggcccaagctccatgtgtttggtggaatccatgaagtaaaccctgtgagcatctccaaggcactgaggacaaaaatatgttctctgccttcaaaaacttcctagtctagaggaaactggcatagacacaattaattgatgatctgatgaattagcattgtgtgagctacaatcctggcatgaatcaagaactagagaggcacacaggaaggaaggaagatgcctctccttggtgaagacaaagaaggcatgaggaggaggcgacagggaagctcacctggtggacaacaggaaagactgcggaggagggctctgctggaagaggaaacagactggggaggtggggccagtgcataaagggccactgcaggaaggggttgtaggagaaaaggaaagacagatcagtcactgatgaccccctccaccccaggtctgcagacagagctgattccttctctaagcctcggcatcccctaccaacagtccctcctgctccttctctcccaagtcctctaaacagcttcatgcccaaaccacaaagagaacattctcaggcctaaggcaggccttcccagcacagaatgtttggagccctctgtgggagagcggctggcccccttaactgtcccccttccctccgggagccaaggcaggcactgtgcacctgcccctgaattgtgtgcggcagttgccggcctggagctgagtgacacagcaggtgcctccagcctgaagacaattccatatttcaatggagcgtcgccaccaaagcttattatctagggcaataaagtttaggattagggggattcaggatgattgtgtgattctccacaaagcttatcttctaatagaccagctgctttattaggccgcccccacccgcaccaggcccttcccaaagcatcccaagtcccaggcagccgacgggggccttgaaggcggcagtggtagacagctgggggtatcatatcaccctcagtctccatctgcgattattaaattacgggcggcttccagctgggcacaccccagctcccaccttcctcctacaaagccagcatcatcgtcaggcatctgccaaggacacgatgtggctgcctctcccctgctgatccctactgttgaactctaaaagggccaggtctgggtatttacttgctattagggctgtcactgtcacagtgtggaatgcagtggagtggaggcctggagagagggggggaccatggaaatttctgttgcaaatggggctttgctgggactgttcactataaacaaaaaaagaagatggaatcatgcaccacagaacctcaaagaagctggcatgcttaccaagctcccacatatttctcccaaaatgaaattcattaacgttgagtgttctagggaccacctccacatgctccctgatcccattgctccgttccttttctgatgggagcagagcatgggatggtgtctctccaaccccgtgtggtcagcagcactgaggctactctcgtttcctatccctccctgacagtctcctttatcctcagcccctgacagactatctgttcagagtaggaatttatcaataagtactgataagcatgctgaaaggaatatgggggactgggaatatgcctgaaacataatgaatgtttcaaagaaatgaaacgttctgaaaatggaattttcaaagattctgacaagcacacagcatctgcttgcagattttaggaaaacttagtcatagaattattcagagttcacatttcagccatggggatgttgtgtgcctgttgacagcagaggtccctgtagacgtttgttttttactgtgtctatgtgtgattcactaatgagagagtggcttagatgctcagagtaattaattgtagtattgagataatagtggctttgaaatccagctgtgcttatatgcgtgcacgctgtgcagttagatgctcccaggttcagatctgcttccatcactactaactatgtggccttgttttctgatctgcaagccatggattgtattgcttactttgcgggactgtggtaaacgttaggcatatatgaggcaagtgcaatgcccaacatttggcagatgcttaataagtgttggctattattattactactactactactattgcttttgctattgctattatgtgtgacctgtataataatcctactaatatgagtgaaggcaagaatcatggactatgcacccagcataatcaggagggtttgactgttgtgaatgaattcaagggcaggacaagcagcgacaagagttactgaagttcatctgatttgagttctgttcattcatttatttgggatccaaattctgaaccccagctctgtgctagacactgttctaggtgctgggaaaacagtcatgtgttagtctgtttttgctgccataaaggaatccctgagactgggtattttataaagaaaagaggtttatttaaatcacagttctgcaagcctaacacctggtggaagctgccaaggcttacagcttataccctctcaagcagcaccctaatctataccttgagccaagactggaattggagctgccatgatgcaggaagcagtgtcccaaggatgtgcagagcagtggggtcctgaatgtggccccccaaaccattcttttctcctaggcctctaggcctgtgatgggggggtggccttgaaaatctctgaaatgccttcaaggcctttttcccattgtcttggttattagcacttggctcccctttagccatgctaatctgtctagcaagtggttgctccacagcctgctcatatttcactcctgaaaatgttctttccttctccaccacacaaccagtttgtgaattttccaaacttttatgctctgcttcccttttaattatcaatttcccagcctcagatattcctttatagtaatgcaaatggactaacagaagcaatgaataagaaggggtcctggcccctctacaactcatcttctattgagaaagaaagaagaaaaaatgaaaataagttaaaaaaactcaaattttgataaaccctatgaagaaaataagaaatgggatagaagttagctggcatggcagggtggagtgggtgagtgacattaaggagggtgacaacagagaaactttctgataaaaaacccagtaagtaaaggtctaagtgatgtggatgaggcagccacttgaagacctgggacaaaagtgttcaggcagagaatatagcaggtacagagctttttgtataagaaggtagcaaaaaggccagtatagccagagaacagaggaggtaaggagaaagataggggatgaggcaggtgctaactcatcaacatccttgcaggccttgatgagagttaagatttcattataattgcaataagaagacagtggaaggttttttggcgggggtgggggtggtcaatgacatgattggattgatatgttggaaaagcccatctggcgactgtgttcagtaacagtgtgcttgcatgaagatccctcacagcagcagacaacacaaatgccccctcccacccatcatgaaaatttggaaagccaagccaataggaaactgaagctacaaagacccagcccctagaaagcaatataaacaagaccagaaaaagcatgtgttcaggacaagttcacattgaagtaaaaccatattgacattgattgcattccctacctgcttaggggttttgcttcacctaaactagtaccttgagaatctgtaaaagcttacaatttgagaaaagcaagagatgacacctgattatcctttgaattggcttccatgtctgtggctgttttccctaagttcctgtcccttacacacacgttacaaaactttgtctcaattctttgcttttaaaggatttgactttaacaaattcacattgggtacttgcttagtaggaaaggaaataatgactctcaccccctatgttataaaacttttaggagtattacacacaggcacatacagggcacactggtatggcttgtcattttgtgacaaattcttgtcagtttgtggtctggtggaaagcatatggaattagcaatcaagaaaggtgagatttagttctggctctgcttctaactagcaatgcaatcttggacaagagatttattctttcaagtctcagtttcatcttgtcatatggacatagagtgatacttccttttaaaagaacctgggtatcctggccaggcgcggtggctcatgcctcccagcactttgggaggccgaggcgggtggatcacaaggtcaggagatcgagaccatcctggccaacatggtgaaaccccgtctctactaaaaatacaaaaattagttgggcgtggtagtcccagctactcgggagactgaggcaggagaatttcttgaaccctggaggcggaggtagcagtgagccccgaggtcgtgccactgaactccagcctggcaacagagcgagactctgtct

SEQ ID NO: 17861 - DNA, 381 bp, Homo sapiens
  source 1..381: mol_type = unassigned DNA
agatcagcagatgggagggaacctagggtcgccttcctaggtctgagcgaagtgtcccagccgctccccttacccctgcggtgagccctgcgtcctggaacggtgccaggactcctgacagagcctggcagaaatgcacagcggtattgatgagtagatccttggattcagaggttggctgaaacgcaccatgcctgcttccatcttttgctctgtaaagttgtgaattgctcatgcctatagggaggaaggatggcacatgggattccttctcaaggcaaagttaccataacggtggatgagtacagctcaaaccccacccaggcattcacgcactacaacatcaaccagagcagattccagcctccacatgtacatatg

SEQ ID NO: 17862 - DNA, 394 bp, Homo sapiens
  source 1..394: mol_type = unassigned DNA
accaagccttccacgtgcgccttatagcctctcaacttcttgcttgggatctccaacctcaccgcggctcgaaatggaccccaactgctcctgcgccactggtggctcctgcacctgcactggctcctgcaaatgcaaagagtgcaaatgcacctcctgcaagaagagctgctgctcctgctgccccatgagctgtgccaagtgtgcccagggctgcatctgcaaaggggcatcagagaagtgcagctgctgtgcctgatgtccggacagccctgctcgaagatatagaaagagtgacctgcacaaacttggaattttttttccatacaaccctgacccatttactgtattttttttaatgaaatatgtgaatgataataaaagttgctgactt

SEQ ID NO: 17863 - DNA, 380 bp, Homo sapiens
  source 1..380: mol_type = unassigned DNA
cctgccctgacttctcatatcttgcctaggaactccaggcttgtcttggctccaaatggatcccaactgctcctgcaccacaggtggctcctgtgcctgcgccggctcctgcaagtgcaaagagtgcaaatgtacctcctgcaagaagtgctgctgctcttgctgccccgtgggctgtgccaagtgtgcccagggctgtgtctgcaaaggctcatcagagaagtgccgctgctgtgcctgatgttgggagagccctgctcccagacataaatagagcaaccagtactaacctggatttttttttttaactaccctgaccggtttgctacattcttttttctattcaatatgtgaaagacaataaaacacttttgacttga

SEQ ID NO: 17864 - DNA, 704 bp, Homo sapiens
  source 1..704: mol_type = unassigned DNA
cggaacacgctgggaggagggtggaaggcaacctcggggaaactgggaaaggcggcctggacttcgggaacaccgcgtacctgcgggggcacagccccacccgagcgaacgggctccaaaggggaggtcccgcggtgcccaccgcgcagagctcagggggtggtgcgcccggcccttctgcggcgcacagcccagcccaggaacgcgggcggtgcggactcagcgggccgggtgcaggcgcggagctgggcctctgcgcccggcccgacctccgtctataaatagagcagccagttgcagggctccattctgctttccaactgcctgactgcttgttcgtctcactggtgtgagctccagcatcccctttgctcgaaatggaccccaactgctcttgcgccactggtggctcctgcacgtgcgccggctcctgcaagtgcaaagagtgcaaatgcacctcctgcaagaagagctgctgttcctgctgccccgtgggctgtgccaagtgtgcccagggctgcgtctgcaaaggggcatcggagaagtgcagctgctgtgcctgatgtgggaacagctcttctcccagatgtaaatagaacaacctgcacaacctggatttttttaaaaatacaacactgagccatttgctgcatttctttttatactaaatatgtgactgacaataaaaacaattttgactttaa

SEQ ID NO: 17865 - DNA, 721 bp, Homo sapiens
  source 1..721: mol_type = unassigned DNA
cttgttcgtctcactggtgtgagctccagcatcccctttgctcgaaatggaccccaactgctcttgcgccactggtggctcctgcacgtgcgccggctcctgcaagtgcaaagagtgcaaatgcacctcctgcaagaagagtgagtgcggggccatctccaggaatctggggctgtggctcaggttgggagggaactcaaggctggccctgagtgcatccttctggggaactgggctttctttgccctcattgcccgtgtcattccctctccaggctttctgccctaaattcagatggggcaggacagcatttttctcgtgggacacaaaccccaactgtaccccctatggtttcagaacagagctgtgccagacgaaaaaaagcatcctctgggtctgggttctgagctcgagccaggcttgctattagggcagggaggtgcccggtcaagtctactgccacctctcactctccccttcttccccaggctgctgttcctgctgccccgtgggctgtgccaagtgtgcccagggctgcgtctgcaaaggggcatcggagaagtgcagctgctgtgcctgatgtgggaacagctcttctcccagatgtaaatagaacaacctgcacaacctggatttttttaaaaatacaacactgagccatttgctgcatttctttttatactaaatatgtgactgacaataaaaacaattttgactttaa

SEQ ID NO: 17866 - DNA, 440 bp, Homo sapiens
  source 1..440: mol_type = unassigned DNA
gccccctcccctgactatcaaagcagcggccggctgttggggtccaccacgccttccacctgccccactgcttcttcgcttctctcttggaaagtccagtctctcctcggcttgcaatggaccccaactgctcctgcgccgctggtgtctcctgcacctgcgctggttcctgcaagtgcaaagagtgcaaatgcacctcctgcaagaagagctgctgctcctgctgccccgtgggctgtagcaagtgtgcccagggctgtgtttgcaaaggggcgtcagagaagtgcagctgctgcgactgatgccaggacaacctttctcccagatgtaaacagagagacatgtacaaacctggattttttttttataccaccttgacccatttgctacattccttttcctgtgaaatatgtgagtgataattaaacactttagacctg

SEQ ID NO: 17867 - DNA, 443 bp, Homo sapiens
  source 1..443: mol_type = unassigned DNA
gccccctcccctgactatcaaagcagcggccggctgttggggtccaccacgccttccacctgccccactgcttcttcgcttctctcttggaaagtccagtctctcctcggcttgcaatggaccccaactgctcctgcgccgctgcaggtgtctcctgcacctgcgctggttcctgcaagtgcaaagagtgcaaatgcacctcctgcaagaagagctgctgctcctgctgccccgtgggctgtagcaagtgtgcccagggctgtgtttgcaaaggggcgtcagagaagtgcagctgctgcgactgatgccaggacaacctttctcccagatgtaaacagagagacatgtacaaacctggattttttttttataccaccttgacccatttgctacattccttttcctgtgaaatatgtgagtgataattaaacactttagacctg

SEQ ID NO: 17868 - DNA, 405 bp, Homo sapiens
  source 1..405: mol_type = unassigned DNA
actccgccttccacgtgcacccactgcctcttcccttctcgcttgggaactctagtctcgcctcgggttgcaatggaccccaactgctcctgtgccgctgcaggtgtctcctgcacctgcgccagctcctgcaagtgcaaagagtgcaaatgcacctcctgcaagaagagctgctgctcctgctgccctgtgggctgtgccaagtgtgcccagggctgcatctgcaaaggggcatcggagaagtgcagctgctgcgcctgatgtcgggacagccctgctcccaagtacaaatagagtgacccgtaaaatccaggattttttgttttttgctacaatcttgacccctttgctacattcctttttttctgtgaaatatgtgaataataattaaacacttagacttga

SEQ ID NO: 17869 - DNA, 402 bp, Homo sapiens
  source 1..402: mol_type = unassigned DNA
actccgccttccacgtgcacccactgcctcttcccttctcgcttgggaactctagtctcgcctcgggttgcaatggaccccaactgctcctgtgccgctggtgtctcctgcacctgcgccagctcctgcaagtgcaaagagtgcaaatgcacctcctgcaagaagagctgctgctcctgctgccctgtgggctgtgccaagtgtgcccagggctgcatctgcaaaggggcatcggagaagtgcagctgctgcgcctgatgtcgggacagccctgctcccaagtacaaatagagtgacccgtaaaatccaggattttttgttttttgctacaatcttgacccctttgctacattcctttttttctgtgaaatatgtgaataataattaaacacttagacttga

SEQ ID NO: 17870 - DNA, 397 bp, Homo sapiens
  source 1..397: mol_type = unassigned DNA
accacgccctccacgtgttccactgcctcttctcttctcgcttgggaactccagtctcacctcggcttgcaatggaccccaactgctcctgcgaggctggtggctcctgcgcctgcgccggctcctgcaagtgcaaaaagtgcaaatgcacctcctgcaagaagagctgctgctcctgttgccccctgggctgtgccaagtgtgcccagggctgcatctgcaaaggggcgtcagagaagtgcagctgctgtgcctgatgtcgggacagccctgctgtcagatgaaaacagaatgacacgtaaaatccaggattttttttttctacaactccgactcatttgctacattcctttttttctgtgaaatatgtgaataataattaaacacttagacttga

SEQ ID NO: 17871 - DNA, 450 bp, Homo sapiens
  source 1..450: mol_type = unassigned DNA
ggccctcttcccggactataaagagagccgccggcttctgggctccaccacgcttttcatctgtcccgctgcgtgttttcctcttgatcgggaactcctgcttctccttgcctcgaaatggaccccaactgctcctgctcgcctgttggctcctgtgcctgtgccggctcctgcaaatgcaaagagtgcaaatgcacctcctgcaagaagagctgctgctcctgctgccctgtgggctgtgccaagtgtgcccagggctgcatctgcaaagggacgtcagacaagtgcagctgctgtgcctgatgccaggacagctgtgctctcagatgtaaatagagcaacctatataaacctggattttttttttttttttttttgtacaaccctgacccgtttgctacatctttttttctatgaaatatgtgaatggcaataaattcatctagacta

SEQ ID NO: 17872 - DNA, 786 bp, Homo sapiens
  source 1..786: mol_type = unassigned DNA
aagcagcattcccaagtcccgctttcacccgcgcgctaacggctcaggttcgagtacaggacaggagggaggggagctgtgcacacggcggaggcgcacggcgtgggcacccagcacccggtacactgtgtcctcccgctgcacccagccccttccgcgccgaggcgtccccgaggcgcaagtgggccgccttcagggaactgaccgcccgcggcccgtgtgcagagccgggtgcgcccggcccagtgcgcgcggccgggtgtttcgcctggagccgcaagtgactcagcgcggggcgtgtgcaggcagcgcccggccggggcggggcttttgcactcgtcccggctctttctagctataaacactgcttgccgcgctgcactccaccacgcctcctccaagtcccagcgaacccgcgtgcaacctgtcccgactctagccgcctcttcagctcgccatggatcccaactgctcctgcgccgccggtgactcctgcacctgcgccggctcctgcaaatgcaaagagtgcaaatgcacctcctgcaagaaaagctgctgctcctgctgccctgtgggctgtgccaagtgtgcccagggctgcatctgcaaaggggcgtcggacaagtgcagctgctgcgcctgatgctgggacagccccgctcccagatgtaaagaacgcgacttccacaaacctggattttttatgtacaaccctgaccgtgaccgtttgctatattcctttttctatgaaataatgtgaatgataataaaacagctttgacttga

SEQ ID NO: 17873 - DNA, 665 bp, Homo sapiens
  source 1..665: mol_type = unassigned DNA
gcgcgcacagcggcggcgagtgggtcgtgcacgcggatgcggggtgggagtgggggcgcacgcgcgggcgtgggcgagcgggccccggcagtgcacacacacggcaggggcgggcgacagatgcagtgcgtgcgccggagcccaagcgcacaaacggaaagagcgggcgcggtgcgcaggggcgggcgcccagcgggcttggcatgcgcgcccccgcccgaggctataaaagcatcgccacctgctgccactagccaagccgcgcgtccagttgcttggagaagcccgttcaccgcctccagctgctgctctcctcgacatggaccctgagacctgcccctgcccttctggtggctcctgcacctgcgcggactcctgcaagtgcgagggatgcaaatgcacctcctgcaagaagagctgctgctcctgctgccctgcggagtgtgagaagtgtgccaaggactgtgtgtgcaaaggcggagaggcagctgaggcagaagcagagaagtgcagctgctgccagtgagaaggcacccctccgtgtggagcacgtggagatagtgccaggtggctcagtgccacctatgcctgtggtgaagtgtggctggtgtccccttcccctgctgaccttggaggaatgacaataaatcccatgaacagcatga

SEQ ID NO: 17874 - DNA, 294 bp, Homo sapiens
  source 1..294: mol_type = unassigned DNA
atggggagcctctggctgctgctcactcagcctcccttccccagccgtgacagcactggagcctttcggacacctggaccatggaccccagggaatgtgtctgcatgtctggaggaatctgcatgtgtggagacaactgcaaatgcacaacctgcaactgtaaaacatattggaagagctgctgtccctgctgccccccgggctgtgccaaatgtgcccggggctgcatctgcaaaggaggctcagacaagtgcagctgctgcccatgaaagccatccatcgtgcccacccctt

SEQ ID NO: 17875 - DNA, 2579 bp, Homo sapiens
  source 1..2579: mol_type = unassigned DNA
actgcccgggcgcctcttcccctccccccaggttcctgtccctcacccttcccccttctccaaccgccaacggccgcctgcgcctgaggcccggcccacgccccatcccgctcgctccacgctgcggcagccccggcggccccaggtgcgcggcccccgccatcccgccccgccgccctgcgccatggaggagggccctctgccgggcgggctgcccagccccgaggatgcgatggtgacggagctcttaagccccgagggtccgttcgcttcggagaacatcggcctgaaggcccccgtgaagtacgaggaggacgagttccacgtcttcaaagaagcgtacctgggcccggcggaccccaaggaacccgtcctgcacgcgttcaaccccgcgctgggcgccgactgcaagggccaggtcaaggcgaagctcgcggggggcgacagcgacggcggggagctcctcggggagtaccccgggatcccagagctcagcgcgctggaggacgtcgcgctcctgcaggccccgcagccgcccgcctgcaacgtgcacttcctgtcctcgctgctacccgcgcaccgcagcccggcggtgttgcccctgggcgcctgggtcctggaaggagcctcccacccgggcgtccgcatgatcccagttgaaatcaaggaagcaggtggtactactacaagtaataatccggaagaagcaactttgcagaatcttcttgctcaggaatcctgttgcaagttcccatcgtcccaggaactagaggatgcctcctgctgttctcttaagaaagattccaacccaatggtgatatgccaattgaaagggggcacacaaatgctatgtatagacaattctagaacaagagaactaaaagcactccatttggttcctcagtatcaagatcaaaataattatctacagtcagatgtccctaaaccaatgactgctttagtagggagatttttgccagcatcaacaaaattaaatctcattacacaacaacttgagggagccttaccatcggtagtcaacgggtctgctttcccctcgggatcaactcttccaggaccaccaaaaataactttggctgggtactgtgactgctttgccagtggggacttttgcaacaactgcaattgtaataattgttgcaacaacttgcatcatgatattgaacggtttaaagccattaaggcatgtcttggtagaaatccagaagctttccagccaaaaattgggaagggccaattgggcaatgtcaagccccagcacaacaaagggtgcaactgcaggaggtcaggctgcctgaagaattactgcgagtgctatgaggcccaaattatgtgttcttctatttgcaaatgcattggttgcaaaaattatgaagaaagcccagaacgaaagacactaatgagcatgccaaactacatgcagactggaggtttggaaggcagccattacctgccaccaacgaaattttcaggacttccaagattcagtcacgataggcggccttcctcatgcatctcctgggaggtggtggaggccacatgcgcctgcctgcttgctcagggagaagaggccgagaaagaacactgctccaagtgcctggcagagcagatgatcctggaggaatttggaaggtgcttatcacagattctccacactgagtttaaatctaagggattgaaaatggagtagagtataaagtgtgaatgcatgttgattttgtcttagtctagaaatctctagtttagaaaggatgtttaggggaacatgaggctggctctgcagcaacaaccaggctcccctgcatccctgggcccagggagtttactcagagctctctgaagatgtggcaacccatgcccccttttctgaggaggtgcatggcctgagcattgtttgtctggcccagaggagagagcttgggttcccatagtcctgggagagtgtctgcagggcggcggagggcagagcagggcaggggagggcacagcaggccctgcgaagggcagagcggggcaggggagggcagagcaggccctgcggagagctcactctggtcgactcttcctctcagagaatgttgctctggaggctgctctgcatgaaaaccctaatggtttcttgtttgtttttcaaattatttagaaataagttctccggatgggctgttgtgataccacttaaaatctctagagaactactgaacacctaaagattttctgtagcgtagatatttccccagaggcacgcgaactgtcagtctttcctaaggcccccgggagacgcaggcaatggggcctcgcaggccaggcttgcaccagcatgtcttgagttagaggacttaaaattatccagtttcttctgtgtttctacttgaattgtggaaaagctctattatccaattaacttctccataattattgttgtaatattattattgtttgtaaaacatggttcacataactagcttgtggaaaccagcaggtaaaatgaattcttaagttgacgcttttggttctgttgtaaagcaaagatgaataaaaatttccaatgtcttcaa

SEQ ID NO: 17876 - DNA, 3495 bp, Homo sapiens
  source 1..3495: mol_type = unassigned DNA
acgccccatcccgctcgctccacgctgcggcagccccggcggccccaggtgcgcggcccccgccatcccgccccgccgccctgcgccatggaggagggccctctgccgggcgggctgcccagccccgaggatgcgatggtgacggagctcttaagccccgagggtccgttcgcttcggagaacatcggcctgaaggcccccgtgaagtacgaggaggacgagttccacgtcttcaaagaagcgtacctgggcccggcggaccccaaggaacccgtcctgcacgcgttcaaccccgcgctgggcgccgactgcaagggccaggtcaaggcgaagctcgcggggggcgacagcgacggcggggagctcctcggggagtaccccgggatcccagagctcagcgcgctggaggacgtcgcgctcctgcaggccccgcagccgcccgcctgcaacgtgcacttcctgtcctcgctgctacccgcgcaccgcagcccggcggtgttgcccctgggcgcctgggtcctggaaggagcctcccacccgggcgtccgcatgatcccagttgaaatcaaggaagcaggtggtactactacaagtaataatccggaagaagcaactttgcagaatcttcttgctcaggaatcctgttgcaagttcccatcgtcccaggaactagaggatgcctcctgctgttctcttaagaaagattccaacccaatggtgatatgccaattgaaagggggcacacaaatgctatgtatagacaattctagaacaagagaactaaaagcactccatttggttcctcagtatcaagatcaaaataattatctacagtcagcttgagggagccttaccatcggtagtcaacgggtctgctttcccctcgggatcaactcttccaggaccaccaaaaataactttggctgggtaaggattagaagcaatacattgtcactctaatgtaataatttaagagactcttggatacgttcacgattttcttctatactataaaatgagcttcactgcacaccttcatgacttctgagaaatgtttttaccatcagcaatgccactaacggtgttgctgtctgtgtctggtttcactggggctgcaaaggctgctggaaagtctggcccataacctgcatctgtccctgtcctcctgtccgctgtcctatgttggtgtttctgaggcttgttgccatttatagctctttgtcttcattccatgttgattcaaactgtactggcctctcttttttgctgtcgtccgtggaaataatggtgtggcagccatgcagcatgaacggggggctgcagagtgccctccagctgcctccgcccgctgccttccatgctgagttggctcgagctctatggcaggtgctaatgcatgatctgtcttcacatctccaggtggacataggctgcacttatctgggacctcatcttgctatttcttgcctgtcttgtgtttataatcttgctatttcttgcctgtcttgtgtttataattgttgctaattaaactaatcagctggttgaaattatcaggttaacatttatgtattaacagtggtttgggcaaccctctccattcgttgagccctgtagttgattatggagatcagcatattcctgcctccaagaggtgtttgtttgtttgtttgttttttcttgttttttgtttgtttgtttgttttgtttttttgagacggactcttgctctgtcacccaggctggaatacaatggcatgatctctgctcactgcaacctccgcctcctgggttcaagcaattctccttcctcagcctcccgagtagctgggaccacaggcgcataccactataccaggctaatttttgtattttttagtagagactgggttttaccatgttggccaggctggtcttgaaatactgacctcagatgatccgcccatctcagcctcccaaagtgctgggattacaggcgtgcccggcctgcctgcaggagttctttgggcccacagtctaaggcaaacacataccctgggcctgagagacagcagtcaaacaccttacaggatacagcccgcagcctccagtgctttccaggctcctgcagagttctgccatcgggcatggcttcgtgatggccttggtaagtgtgaggagagtggtttggggctggaatgaaaggccgtgaatctggaaacacactggaaccgatcaacgctatcagccctcatggtcgctgaagggcgttggttgctcctgggcaccgctgcttcagtttctgcagtggctctttcagctgttgtaattctgtgcctaggctgttgacaacttttgctgagttggacagaataagactgtgggccatgctgcttgcttcactctctgggtgtgatggatcggtgagggtgcagttgctatgattgtaattggtcatctcatcatggctgttaacatttctggaccaaacaaaaatgacttcagctacttccagattctgctgatacattacacaggatgatctaaaaggctacagttctgaagatactcatctttcttgtaatctgggggcatctggtcaatagtattgcctctgtgctgtattgtgtctagaacattcaaggacatttgatacttctcatactttaattgcgtgctctcccagttgcagcaccctctgaggcttctatgtgttgcagccgatgggcatttgcacagagcagcagtcatgacagcgttttcagggcagctatttctccttttcccccttttcctctcccccggcttcccattctcctcctcctccttcctcttctcgtcccctcctcctcctctttgttctcctccccctgctcttcttcctctctccttttcctccttctgtgtctatactagattattttcaatcagtcacatgtttttctttattttgaatgttacaaaatatttctctattgtaaacggtgtgccaggaaaaacatgagatgtgtatttgtattttttatgcacataattacttaatccaatgcctctccacttaattgggcctgatgatttttatctcgacatctgcaatactgatgatatactggaatctctaccaatttatttttggtggtaagaaagcagtcagagaacgttttgctggttatttcattccgtgtgagttcccaaccaagactgtcagcccagtgtggttcagccatatctaacctatagaggccatagaagcagttcagcttaggctggaggccagcaggctgagtgtgcgagctgacccgatggtcatttgttagggttggggggtgaactggctaacttattaactagcttatcatattaataaaaactctttaatacaaatccttgtcctgacactctgtagctttaataatcctattaccaatctggtaataaatgtgaattctgacacattgttgatgctactggttttagtaacataatgaacatcataataaagaatattcaagagtc

SEQ ID NO: 17877 - DNA, 1235 bp, Homo sapiens
  source 1..1235: mol_type = unassigned DNA
atcccgctcgctccacgctgcggcagccccggcggccccaggtgcgcggcccccgccatcccgccccgccgccctgcgccatggaggagggccctctgccgggcgggctgcccagccccgaggatgcgatggtgacggagctcttaagccccgagggtccgttcgcttcggagaacatcggcctgaaggcccccgtgaagtacgaggaggacgagttccacgtcttcaaagaagcgtacctgggcccggcggaccccaaggaacccgtcctgcacgcgttcaaccccgcgctgggcgccgactgcaagggccaggtcaaggcgaagctcgcggggggcgacagcgacggcggggagctcctcggggagtaccccgggatcccagagctcagcgcgctggaggacgtcgcgctcctgcaggccccgcagccgcccgcctgcaacgtgcacttcctgtcctcgctgctacccgcgcaccgcagcccggcggtgttgcccctgggcgcctgggtcctggaaggagcctcccacccgggcgtccgcatgatcccagttgaaatcaaggaagcaggtggtactactacaagtaataatccggaagaagcaactttgcagaatcttcttgctcaggaatcctgttgcaagttcccatcgtcccaggaactagaggatgcctcctgctgttctcttaagaaagattccaacccaatggtgatatgccaattgaaagggggcacacaaatgctatgtatagacaattctagaacaagagaactaaaagcactccatttggttcctcagtatcaagatcaaaataattatctacagtcagatgtccctaaaccaatgactgctttagtagggagatttttgccagcatcaacaaaattaaatctcattacacaacaacttgagggagccttaccatcggtagtcaacgggtctgctttcccctcgggatcaactcttccaggaccaccaaaaataactttggctgggtaaggattagaagcaatacattgtcactctaatgtaataatttaagagactcttggatacgttcacgattttcttctatactataaaatgagcttcactgcacaccttcatgacttctgagaaatgtttttaccatcagcaatgccactaacggtgttgctgtctgtgtctggtttcactggggctgcaaaggctgctggaaagtctggcccataacctgcatctgtccctgtcctc

SEQ ID NO: 17878 - DNA, 3360 bp, Homo sapiens
  source 1..3360: mol_type = unassigned DNA
ggaagtgacgttaggggaaggtgggggcaatcatggtgccgctggggaggggagaagctgctgctgccgccgttgccgggagccgcggagacaagtcattacgttttcatttctcacaactgggctgagcacaactgaaccatgggggaacacagtccagacaacaacatcatctactttgaggcagaggaagatgagctgacccccgatgataaaatgctcaggtttgtggataaaaacggactggtgccttcctcatctggaactgtttatgataggaccactgttcttattgagcaggaccctggcactttggaggatgaagatgacgacggacagtgcggagaacacttgccttttctagtagggggtgaagagggctttcacctgatagatcatgaagcaatgtcccagggttatgtgcagcacattatctcaccagatcagattcatttgacaataaaccctggttccacacccatgccaagaaatattgaaggtgcaaccctcactctgcagtcggaatgtccggaaacaaaacgtaaagaagtaaagcggtaccaatgtacctttgagggctgtccccgcacctacagcacagcaggcaacctgcgaacccaccagaagactcaccgaggagagtacacctttgtctgtaatcaggagggctgtggcaaagccttccttacctcttacagcctcaggatccacgtgcgagtgcacacgaaggagaagccatttgagtgtgacgtgcagggctgtgagaaggcattcaacacactgtacaggctgaaagcacatcagaggcttcacacagggaaaacgtttaactgtgaatctgaaggctgcagcaaatacttcaccacactcagtgatctgaggaagcacattcgaactcatacaggggaaaagccatttcggtgcgatcacgatggctgtggaaaagcatttgcagcaagccaccaccttaaaactcacgttcgtacacatactggtgaaagacccttcttctgccccagtaatggctgtgagaaaacattcagcactcaatacagtctcaaaagtcacatgaaaggtcatgataacaaaggacactcatacaatgcacttccacaacacaatggatcagaggatacaaatcactcactttgtctaagtgacttgagccttctgtccacagattctgaattgcgagaaaattccagtacgacccagggccaggacctcagcacaatttcaccagcaatcatctttgaatcaatgttccagaattcagatgatacggcaattcaggaagatcctcaacagacagcttccttgactgaaagttttaatggtgatgcagagtcagtcagtgatgttccgccatccacaggaaattcagcatctttatctcttccacttgtactgcaacctggcctctccgagccaccccagcctctactacctgcctcagctccgtctgctcctccgcctgctccctccctaggacctggctcccagcaagctgcatttggcaacccccctgctctcttacaacctccagaagtgcctgttccccacagcacacagtttgctgctaatcatcaagagtttcttccgcacccccaggcaccgcagcccattgtaccaggactttctgttgttgctggggcttctgcatcagcagcggcagtggcatcagctgtggcagcaccagccccaccacaaagtactactgagcccctgccagccatggtccagactctgcccctgggtgccaactctgtcctaactaataatcccacaataaccatcaccccaactcccaacacagctatcctgcagtccagcctagtcatgggagaacagaacttacaatggatattaaatggtgccaccagttctccacaaaaccaagaacaaattcagcaagcatctaaagttgagaaggtgttttttaccactgcagtaccagtagccagtagcccagggagctctgtccagcagattggcctcagtgttcctgtgatcatcatcaaacaagaagaggcatgtcagtgtcagtgtgcatgccgggactctgcaaaggagcgggcatccagcaggagaaagggctgctcctccccaccccctccagagccgagcccccaggctcctgatgggcccagcctgcagctcccagcgcagactttctcttcagcccctgttcccgggtcatcatcctctaccttgccctcctcctgtgagcaaagccgacaagcagagactccttcagaccctcagacagaaacattaagtgccatggatgtgtcagagtttctatccctccagagcctggacaccccgtccaatctgattcccattgaagcactactgcagggggaggaggagatgggcctcaccagcagcttctccaagtgaagggcccatgtgtgctcacctctgggaaaagcgggtgagcaggaggcatgaggtacaatgcctgccatcatgggtcagaaatttgaaggatgaagaaatctactgtttgaaatcctcacctttcagacgtattttctttattcacatcccaggagcatccattttaaggaactattctttggaaaaaaacaaaaaacaaaaaaaacaacaaaaaaagctaagttataagtgaactgtttggctgcactgtatgtcacttttgcttgttgtcatgtgaacttggaaactaaggttactcgtgtgcataaaaattctaaatgaaagggtgtggtttccatcaatctgatgctgcccatcgcttgcactggggtctttgtggatcgggcaggagttttcagtgtgttgggtgttgctccttcctatgtgtcttttgaatctgaggctgacatttgcttggaaggccagacccttgctccatcagagagggcagtggcaaaggccagtgaggcagctgtgagttggacagggttcaggtgagatggtgttgtcatttgtgcttagtgttggtggtgctcagggtggataacacgggtcgttctgcagcccgcttcagcacaaataggcagcttaaggcctggctcacaggctgtggggttgatctggctctgcagaggccctaggcagcttgttgactgctgtctgttgatgacgtgtgtgcaaagcaggctctagcaacatgatcactgtccttgccttcctggttctttctctcggttggttgccagggcttgcagatcgcagtgaattttccttggggaacatcgctgttttgtcctagagtgaacttgtggcttatggccagtgctgtttggtggtctgccttctttttaatggtattttcttcctcagagcagaagggctgcattttgcttatcagaagaaggtgcagatttaagg

SEQ ID NO: 17879 - DNA, 600 bp, Homo sapiens
  source 1..600: mol_type = unassigned DNA
aaacaaagccaggtaaagcggtaccaatgtacctttgagggctgtccccgcacctacagcacagcaggcaacctgcgaacccaccagaagactcaccgaggagagtacacctttgtctgtaatcaggagggctgtggcaaagccttccttacctcttacagcctcaggatccacgtgcgagtgcacacgaaggagaagccatttgagtgtgacgtgcagggctgtgagaaggcattcaacacactgtacaggctgaaagcacatcagaggcttcacacagggaaaacgtttaactgtgaatctgaaggctgcagcaaatacttcaccacactcagtgatctgaggaagcacattcgaactcatacaggggaaaagccatttcggtgcgatcacgatggctgtggaaaagcatttgcagcaagccaccaccttaaaactcacgttcgtacacatactggtgaaagacccttcttctgccccagtaatggctgtgagaaaacattcagcactcaatacagtctcaaaagtcacatgaaaggtcatgataacaaaggacactcatacaatgcacttccacaacacaatggatcagagtctact

SEQ ID NO: 17880 - DNA, 2994 bp, Homo sapiens
  source 1..2994: mol_type = unassigned DNA
atacggagcaaggcatgtttgaagagtacccgggtttggtagagtgacttctattcactaaaaccatgtgtctgaactgaagaagcttgggctcacttccacaaatgtggaaaaatgctaatcactgaaagaaaacattttcggtcaggaagaattgcacaaagtatgtctgaagcaaatttgattgacatggaagctggaaaactctcaaaaagttgcaatattacagaatgccaggacccagacttgcttcacaattggccggatgctttcacccttcgtggtaataatgcttccaaagttgcaaatccattctggaatcaactgtctgcttctaacccatttttggatgacataactcaactaagaaataacaggaagagaaataatatttccatcttaaaggaagatccttttcttttctgtagagaaatagaaaatggaaattcttttgattcctccggtgatgaacttgatgtgcatcagttacttaggcagacttcctcaagaaattctggaagatctaaaagtgtttcagaacttctggacattttagacgacacagcacatgcccatcagagtatacataactctgaccagatcctactacacgacttagagtggcttaaaaatgatcgggaggcttataaaatggcttggttaagtcaacgccagctggcccgctcctgccttgatttgaatacaattagtcagagccctggatgggcccagacacaacttgcggaggtcaccatagcttgcaaagtaaaccatcaaggagggtcagtacaattacctgaatcagacatcactgttcatgtgccccaaggtcatgtggctgtgggagaattccaagaggtgtctctaagggctttccttgatccgccacacatgcttaaccatgatctttcgtgcactgtgagcccgttgttggaaatcatgttaggcaacctcaatacaatggaagcccttttgctggagatgaaaattggggctgaagtaagaaaggatcctttcagccaagtcatgacagaaatggtgtgtttacacagcttgggtaaagaaggcccttttaaagttttaagcaactgctacatttataaagacaccatccaagtcaagctaatcgacttgagtcaggtaatgtatctagtggttgctgcacaagctaaagctcttccgtcaccagctgccaccatttgggattatatccacaaaaccacctcaattggaatttatggacccaaatatatccatcccagttttactgttgttttaacagtttgtggacacaattatatgccaggacagcttacaatttctgatattaagaagggtggaaaaaacatatctccagttgtgtttcagctctgggggaagcagtcatttttacttgacaagccacaagatttaagtatttctattttttcctgtgatcctgattttgaagtaaagacagaaggagaaaggaaagaaattaaacaaaagcagttggaagcaggtgaagtagttcatcaacaatttttattttctttagttgagcacagagagatgcacttgtttgatttttgtgttcaagtggagcctcccaatggtgaaccagttgcacagttctctatcactactcctgatccaaccccaaacctaaaaagactctcgaatctgccaggctatttgcagaagaaggaggaaatcaagtctgctcctttatcaccaaaaattcttgttaaatatcctacatttcaagataaaacattgaactttagcaactatggggtaaccctgaaggcagtgctaagacaaagcaagattgattacttccttgaatatttcaaaggggacacaatagctctcctcggggaaggtaaggtaaaagctattggtcagtccaaagtgaaagaatggtatgtaggagtcctcagaggtaagattggacttgtacactgcaaaaatgtcaaggtgatttcaaaggagcaagtaatgtttatgtcagatagtgtctttacaaccagaaatcttcttgaacagattgtcctgcctttaaaaaaattgacttatatctactcagttgtattaaccttggtgtcagaaaaagtttatgattggaaagttttagctgatgtcctgggttactcacatctgtccctggaagattttgatcaaattcaagcagacaaagaatcagagaaagtttcttatgttataaagaagttaaaggaagattgccacacagagagaaatacaaggaagtttctgtatgaacttattgtggctcttctgaaaatggattgccaagagttagtcgcacgtctcatccaagaagctgctgttctgacttcagctgtcaagcttggaaaaggctggagggaactagctgaaaagttagtacgactcacaaagcaacaaatggaggcatatgaaattcctcatcgaggaaacactggagatgttgctgttgagatgatgtggaaacctgcctatgattttctgtatacctggagtgctcactatggaaataactacagagatgtgttacaagaccttcagtcagctttggacagaatgaaaaaccctgtgactaaacactggagagaattaactggagttttaatactagtaaattctttggaggttttgagagtaactgcattctccacttctgaggaagtatagaaacaaagcgtgtgtttttgatgggagggaaaatgaggtaatggtgtgtgtgtgtgtgtgtctgtgtgtgtctgtgtgtgtctctgtgtgtctgtgtgtgtgtgtctgtgtgtgtgtgtctgtgtgtgtgtgtgtgtgtgtgtaggaaagaaagaatctcagaaaagcattatattaattttcttcatgctcaaaaccagtttttttttcctgatgaaagcacagcctaactgataaccaagatgggttttatcctcaaatatgtatttttgtgtatgtttcaaatacaagtattaggctgctttgttcttagaaaggaaa

SEQ ID NO: 17881 - DNA, 7417 bp, Homo sapiens
  source 1..7417: mol_type = unassigned DNA
atgtttgaagagtacccgggtttggtagagtgacttctattcactaaaaccatgtgtctgaactgaagaagcttgggctcacttccacaaatgtagccttgtcagatgatatgcaaatgattcacatcagtgtttgaagttcaaaccaaggaaaactatcagaaaaggcttctgctttctttaaaaaataaaactacttgaaaagaaaaaaatcaagaattagaaagaagagtataacaataaagaaggaggggtcacaggtgaacgagatgtggtcaacacacacaaaggagaacaaaaagtggaaaaatgctaatcactgaaagaaaacattttcggtcaggaagaattgcacaaagtatgtctgaagcaaatttgattgacatggaagctggaaaactctcaaaaagttgcaatattacagaatgccaggacccagacttgcttcacaattggccggatgctttcacccttcgtggtaataatgcttccaaagttgcaaatccattctggaatcaactgtctgcttctaacccatttttggatgacataactcaactaagaaataacaggaagagaaataatatttccatcttaaaggaagatccttttcttttctgtagagaaatagaaaatggaaattcttttgattcctccggtgatgaacttgatgtgcatcagttacttaggcagacttcctcaagaaattctggaagatctaaaagtgtttcagaacttctggacattttagacgacacagcacatgcccatcagagtatacataactctgaccagatcctactacacgacttagagtggcttaaaaatgatcgggaggcttataaaatggcttggttaagtcaacgccagctggcccgctcctgccttgatttgaatacaattagtcagagccctggatgggcccagacacaacttgcggaggtcaccatagcttgcaaagtaaaccatcaaggagggtcagtacaattacctgaatcagacatcactgttcatgtgccccaaggtcatgtggctgtgggagaattccaagaggtgtctctaagggctttccttgatccgccacacatgcttaaccatgatctttcgtgcactgtgagcccgttgttggaaatcatgttaggcaacctcaatacaatggaagcccttttgctggagatgaaaattggggctgaagtaagaaaggatcctttcagccaagtcatgacagaaatggtgtgtttacacagcttgggtaaagaaggcccttttaaagttttaagcaactgctacatttataaagacaccatccaagtcaagctaatcgacttgagtcaggtaatgtatctagtggttgctgcacaagctaaagctcttccgtcaccagctgccaccatttgggattatatccacaaaaccacctcaattggaatttatggacccaaatatatccatcccagttttactgttgttttaacagtttgtggacacaattatatgccaggacagcttacaatttctgatattaagaagggtggaaaaaacatatctccagttgtgtttcagctctgggggaagcagtcatttttacttgacaagccacaagatttaagtatttctattttttcctgtgatcctgattttgaagtaaagacagaaggagaaaggaaagaaattaaacaaaagcagttggaagcaggtgaagtagttcatcaacaatttttattttctttagttgagcacagagagatgcacttgtttgatttttgtgttcaagtggagcctcccaatggtgaaccagttgcacagttctctatcactactcctgatccaaccccaaacctaaaaagactctcgaatctgccaggctatttgcagaagaaggaggaaatcaagtctgctcctttatcaccaaaaattcttgttaaatatcctacatttcaagataaaacattgaactttagcaactatggggtaaccctgaaggcagtgctaagacaaagcaagattgattacttccttgaatatttcaaaggggacacaatagctctcctcggggaaggtaaggtaaaagctattggtcagtccaaagtgaaagaatggtatgtaggagtcctcagaggtaagattggacttgtacactgcaaaaatgtcaaggtgatttcaaaggagcaagtaatgtttatgtcagatagtgtctttacaaccagaaatcttcttgaacagattgtcctgcctttaaaaaaattgacttatatctactcagttgtattaaccttggtgtcagaaaaagtttatgattggaaagttttagctgatgtcctgggttactcacatctgtccctggaagattttgatcaaattcaagcagacaaagaatcagagaaagtttcttatgttataaagaagttaaaggaagattgccacacagagagaaatacaaggaagtttctgtatgaacttattgtggctcttctgaaaatggattgccaagagttagtcgcacgtctcatccaagaagctgctgttctgacttcagctgtcaagcttggaaaaggctggagggaactagctgaaaagttagtacgactcacaaagcaacaaatggaggcatatgaaattcctcatcgaggaaacactggagatgttgctgttgagatgatgtggaaacctgcctatgattttctgtatacctggagtgctcactatggaaataactacagagatgtgttacaagaccttcagtcagctttggacagaatgaaaaaccctgtgactaaacactggagagaattaactggagttttaatactagtaaattctttggaggttttgagagtaactgcattctccacttctgaggaagtatagaaacaaagcgtgtgtttttgatgggagggaaaatgaggtaatggtgtgtgtgtgtgtgtgtctgtgtgtgtctgtgtgtgtctctgtgtgtctgtgtgtgtgtgtctgtgtgtgtgtgtctgtgtgtgtgtgtgtgtgtgtgtaggaaagaaagaatctcagaaaagcattatattaattttcttcatgctcaaaaccagtttttttttcctgatgaaagcacagcctaactgataaccaagatgggttttatcctcaaatatgtatttttgtgtatgtttcaaatacaagtattaggctgctttgttcttagaaaggaaagaaaaaagaaaagtgccctctctctctttcagtgttattttaaatttactaagtcaaagctgtttgaataattacatcacacagatatctgggtaaactagagactatcaacatgatcaaggcagtgttcccaggaggcagctagaaagaggggaagcaagcacacaccctgtggccagtcacggctgcccgctttccacacctgacctcttcagttcatcagtggggttcaccagcatcacccccatttttcatggggagaaactcagaagtggagagaacgtctgaggctacatagccagtacaaagtaggttttctgcttgaaaaacctgtttctatttctttttaaaaaatcatactgcataacagaatagtaaaaacaaaatgcgtgttaagacttacagggaaacagttgccgtttcattttaagtgagacttgctactctttttcatcgtctcttgaaagactgacagaaggaaaatatgacttatcagaaatctgttgtctgcatgcatggacctagtgttttcatcagctcccttcagcatcttgggacctctctaatcctgcctaatttgggactttttctgcaggattgtaatgtaaaatagttctttagctcttggagatttttaataatacgagttattaaaaaccaccaccaccagaaacttgattaacttgattaccctgttgagtagagaggtcttaaccaccgaaaacactgatatctttatgttggcatgctcatgcaaacacatgtgtgtgtgtgtgtgtgtgtgtgtgtgtgtgtgtgtaccacagtgttttataaagcacagcctaattgattatataggacaaaaattgtataggaccctgggtcagtataaatgctaatggctgacaaagttcacaaagagatgtattttgcttactcctctgttcaatcctctggttgcctgccagtgtttatgtgtgtatttggacagacattcatttattgtcattcagtcaataggtagagtatatgtgtctattttttggcaggcatatagatgcttgaggctaatgggaaaaaaccagcatgaactctgactttagtagtgctaagtaatagataattttaaaaaatgacaccgttaaatagaaaatggcatgcatactaacagttgcaatggagaggctgtgatgctacgagatataaacgtagagatgccatcatgtgaaactggaagtgggggtgggtcagggaaatttgttcttggaaagaaataatgaacctcaaggaagagtaggcattgtcctggtgtggtggggtgtaagcggtgatcccacaaagcactgaagctcttagatgggtgggagctgaataggtgcagatagcaggggtgaaggagtgaaaggataaaagattcaaggttgagatgaggatggagcaagaagaagccacattagggccattaaggctgctagaatttagaaagaaaacacacagcctcaaagaaatgtgggtaagccaaagaaggattttgttttgggaacctgaataaaagatgtccatttggctaaaaagtaaaagcagaatctttttagggcttttaatatacccaccctgggatatttggtatgctggcaatggtaattcaaattggcgtttaagaataatcttggccgggcgcgatggctcatgcctgaaatcccagcactttgggaggccgaggcgggcagatcactaggtcaggagatcgagaccatcctggctaacgcggtgaaaccccgtctctactaaaaatacaaaaaattagccgggcgtggtggcaggcgcctgtagtcccagctactcaggaggctgaggcaggagaatggcgtgaacccgggaggcggagcttgcagtgagccgagttcatgccactgcactccagcctgggtgacaggctgtctcaaaaaaaaaaaaaggaataatctgtacggctttcagtatttatatttgattataagggaacacagcctgaccaaataattatgtatacacattcaaggacagaatttattttaattaaaaataaattatgagagaaggaaaaaaaagcacagtttttactttcagaacacagtccttttttgtggtgattttgctttctttagaacattcttggaatcttattaacatgtcagctaaccagagaattttgggaagggatagtggggattaataactgggtttttccaggctccaagatctaagaagacagagatcttgttagctgattagtgtagtaagattaaataaataatttaaggtttacattgcatcatgtattatgattgtgattgagaataataagagtttaaaaaaatgaaaaacaagatctctgtaatttgaggatgaaacaatggttctaatattaatacacacaaatatattttataatcttgtaacaaatccttccaggggaaattttttttttttttttttttttttttttttgagccagagtctggctctgttgcccagactggagtgcggtgtttcaatcttgactcactgcaacctccacctcctgggttcaaaagatccttctgcctccgcctcccaagtagctgggattacaggcatgcaccaccttgtccgggtaatttttgtatttttagtggagacaaggttttaccattttggccagactggtctggaactcctgacctcaggtcatccacctgcctcggcctcccagagtgctaggattacaggcatgagccactgctcccagccttccagaggaattttaagcccatgtccaaacattctgtttgtataaatatattctaatttttaaataaatagtttctacttttctgaactttatattttttcttgctataatggattttcataatcagaaaagattaaattagtaatcatgaattgccttcaatatttggcagtaagtcaatgaaataataaggcacttatataccatctttgacatcattaaaagtatcaaatcccattaatctaaaacttctttaagcattttgaaagcagaaaatgtttacatggttctttcagttcctcaggctttttgtctaatgatgcgtgacttaggataagatttgaattaagtgcccagcttgaaacataataatttttctgtataagccacagatcctctacctcctttgtgttaaagcctttatatgaaacaattaagtagaagcattcaatagtgtgtcattaactgttcatactaataaatggatacagcacattttcatggcctgtaatgtagaacatactatataaagttctcagtttggggatgactaggtttctggaaggaatagaatgctaaatcaatggatggcattgggctgagaaacactgctgctactaatcagccttgaatgtgtaatgtgaacatgcaaaagagaacatgcatacactcaaatttgtacaatgctataactggaagttgaaggacttgaatttttatattgtgctattgttatgttttctgtaattgtttatatctaaggaatttttgaggtaatataaaagaaaaagagaataatgaacaatgatgtcactggagggtttttacattaaattagatcatttttcttcttattcacaataataatcttaatctttaagaattaattataatttaatattataattcataatctttaagaattaataattataatttaatattataattaataatctttaagaattaataatataatttaatattataattaataatctttaagaattaataattacaattaataattaataataatcttaatctttaagaattaataataatccttaatcgcaataataatcgcaaggaggagaagtaagtccctcctccttctgtatgaacttttctcccacatgctgctgtatggtttagtgagagtgaagttctaaagaacatcaatatgattggtgggataatccaaagacattttttcagaatcaaatggcatgtcgaaggtttgtttcttgcatatgtatttactggtccacagcacaaaataaagtgaccacatatacataggaaagttgaatttgtacacatacagcatctgaaatgtatctgatgttcagcatcaagatttcactgaacattgtagaaatgtgtatcttttgcatgtatattttacattgattttctatttatgtacatctagaaagttttaaccctaataaatagttttgtaattttgaa

SEQ ID NO: 17882 - DNA, 1441 bp, Homo sapiens
  source 1..1441: mol_type = unassigned DNA
tggaaaacatgctgctcgggggacccccccgcagtccccgctcggggacgagccccaaggggccctggagcagtacaggccacgtgcagtttggcaagagcccccagacctggcccaggcgcacaagaccccgctctccagagcctgccgcgccttcaggggttcggggctccacttggacgaggcgccgtgacactccgaggcgcgccgggccgacagcgctgtcccgctacgtgggccacctctggatgggccggcggccgccctcccccgaggcccgcggcccagtcccccgcagttcagctgccagtcgggccagaagaagcctcgcctccccggggatctccccaggccccctgaccgcaacgatcggaggggcggtggcggggggcgggcccaggcaggggagggcagaagcacacaaggaagtgtttccgggacagagggtgggcaagatggcggcgcccatggagctgttctgctggtcagggggctgggggctgccgtcagtggacctggacagcctggccgtgctgacctatgccagatttactggtgctccactgaaggtacacaagatcagcaacccctggcagagcccttcaggaactctgcctgcccttcggaccagtcatggagaggtcatctcagttccacacaagatcatcacccaccttcgaaaagaggtacatactttttggatagacaccaagaactacgtggaagtgacccggaagtggtatgcagaggctatgccctttcccctcaacttcttcctgcctggccgcatgcagcggcagtacatggaacggctacagctgctgactggggagcacaggcctgaggacgaggaagagctggagaaggagctgtaccgagaggctcgggagtgtctgaccctgctctctcagcgcctgggctctcaaaagttcttctttggagatgcccctgcctccttggacgccttcgtcttcagctacttggccctgctgctgcaggcaaagctgcccagtgggaagctgcaggtccacctgcgtgggctgcacaacctctgtgcctattgtacccacattctcagtctctacttcccctgggatggagctgaggtaccaccgcaacgccagacaccagcaggcccagagactgaggaggagccataccggcgccggaaccagatcctatctgtgctggcaggactggcagccatggtgggctacgccttgctcagcggcattgtctccatccagcgggcaacgcctgctcgggccccaggcacccggaccctgggcatggctgaggaggatgaagaggaatgatttgtcctcacgctcccaagactggtttttctactctcatgcattccagaggcccccgtgcctcctcgttgttggtacagccggacacggggtgctgccacccagaataaagccactcacactga

SEQ ID NO: 17883 - DNA, 1632 bp, Homo sapiens
  source 1..1632: mol_type = unassigned DNA
aagccccagcccggcctccgctccggccgccgccaccgcccctgttttgtttccatggcgacaggcggcgcagggcccgctccaaacataacgcgctgtggaaaacatgctgctcgggggacccccccgcagtccccgctcggggacgagccccaaggggccctggagcagtacaggccacgtgcagtttggcaagagcccccagacctggcccaggcgcacaagaccccgctctccagagcctgccgcgccttcaggggttcggggctccacttggacgaggcgccgtgacactccgaggcgcgccgggccgacagcgctgtcccgctacgtgggccacctctggatgggccggcggccgccctcccccgaggcccgcggcccagtcccccgcagttcagctgccagtcgggccagaagaagcctcgcctccccggggatctccccaggccccctgaccgcaacgatcggaggggcggtggcggggggcgggcccaggcaggggagggcagaagcacacaaggaagtgtttccgggacagagggtgggcaagatggcggcgcccatggagctgttctgctggtcagggggctgggggctgccgtcagtggacctggacagcctggccgtgctgacctatgccagatttactggtgctccactgaaggtacacaagatcagcaacccctggcagagcccttcaggaactctgcctgcccttcggaccagtcatggagaggtcatctcagttccacacaagatcatcacccaccttcgaaaagagaagtacaatgctgattatgatctgtcagctcggcaaggggcagacaccctggccttcatgtctctcctggaggagaagttgctcccggtgctggtacatactttttggatagacaccaagaactacgtggaagtgacccggaagtggtatgcagaggctatgccctttcccctcaacttcttcctgcctggccgcatgcagcggcagtacatggaacggctacagctgctgactggggagcacaggcctgaggacgaggaagagctggagaaggagctgtaccgagaggctcgggagtgtctgaccctgctctctcagcgcctgggctctcaaaagttcttctttggagatgcccctgcctccttggacgccttcgtcttcagctacttggccctgctgctgcaggcaaagctgcccagtgggaagctgcaggtccacctgcgtgggctgcacaacctctgtgcctattgtacccacattctcagtctctacttcccctgggatggagctgaggtaccaccgcaacgccagacaccagcaggcccagagactgaggaggagccataccggcgccggaaccagatcctatctgtgctggcaggactggcagccatggtgggctacgccttgctcagcggcattgtctccatccagcgggcaacgcctgctcgggccccaggcacccggaccctgggcatggctgaggaggatgaagaggaatgatttgtcctcacgctcccaagactggtttttctactctcatgcattccagaggcccccgtgcctcctcgttgttggtacagccggacacggggtgctgccacccagaataaagccactcacactga

SEQ ID NO: 17884 - DNA, 946 bp, Homo sapiens
  source 1..946: mol_type = unassigned DNA
agagggtgggcaagatggcggcgcccatggagctgttctgctggtcagggggctgggggctgccgtcagtggacctggacagcctggccgtgctgacctatgccagatttactggtgctccactgaaggtacacaagatcagcaacccctggcagagcccttcaggtacccagtatcccttgggggaactctgcctgcccttcggaccagtcatggagaggtcatctcagttccacacaagatcatcacccaccttcgaaaagagaagtacaatgctgattatgatctgtcagctcggcaaggggcagacaccctggccttcatgtctctcctggaggagaagttgctcccggtgctggtacatactttttggatagacaccaagaactacgtggaagtgacccggaagtggtatgcagaggctatgccctttcccctcaacttcttcctgcctggccgcatgcagcggcagtacatggaacggctacagctgctgactggggagcacaggcctgaggacgaggaagagctggagaaggagctgtaccgagaggctcgggagtgtctgaccctgctctctcagcgcctgggctctcaaaagttcttctttggagatgcccctgcctccttggacgccttcgtcttcagctacttggccctgctgctgcaggcaaagctgcccagtgggaagctgcaggtccacctgcgtgggctgcacaacctctgtgcctattgtacccacattctcagtctctacttcccctgggatggagctgaggtaccaccgcaacgccagacaccagcaggcccagagactgaggaggagccataccggcgccggaaccagatcctatctgtgctggcaggactggcagccatggtgggctacgccttgctcagcggcattgtctccatccagcgggcaacgcctgctcgggccccaggc

SEQ ID NO: 17885 - DNA, 1654 bp, Homo sapiens
  source 1..1654: mol_type = unassigned DNA
aaagacaagcctgttgggttgaaagaagaagaagaagaagaaaaaaaaactcaggcaaagtcacagcctcaaaattgttcactgaaagaagcgtgagtggagaagtgtgagaagatgaatggaccggtggatggcttgtgtgaccactctctaagtgaaggagtcttcatgttcacatcggagtctgtgggagagggacacccggataagatctgtgaccagatcagtgatgcagtgctggatgcccatctcaagcaagaccccaatgccaaggtggcctgtgagacagtgtgcaagaccggcatggtgctgctgtgtggtgagatcacctcaatggccatggtggactaccagcgggtggtgagggacaccatcaagcacatcggctacgatgactcagccaagggctttgacttcaagacttgcaacgtgctggtggctttggagcagcaatccccagatattgcccagtgcgtccatctggacagaaatgaggaggatgtgggggcaggagatcagggtttgatgttcggctatgctaccgacgagacagaggagtgcatgcccctcaccatcatccttgctcacaagctcaacgcccggatggcagacctcaggcgctccggcctcctcccctggctgcggcctgactctaagactcaggtgacagttcagtacatgcaggacaatggcgcagtcatccctgtgcgcatccacaccatcgtcatctctgtgcagcacaacgaagacatcacgctggaggagatgcgcagggccctgaaggagcaagtcatcagggccgtggtgccggccaagtacctggacgaagacaccgtctaccacctgcagcccagtgggcggtttgtcatcggaggtccccagggggatgcgggtgtcactggccgtaagattattgtggacacctatggcggctggggggctcatggtggtggggccttctctgggaaggactacaccaaggtagaccgctcagctgcatatgctgcccgctgggtggccaagtctctggtgaaagcagggctctgccggagagtgcttgtccaggtttcctatgccattggtgtggccgagccgctgtccatttccatcttcacctacggaacctctcagaagacagagcgagagctgctggatgtggtgcataagaacttcgacctccggccgggcgtcattgtcagggatttggacttgaagaagcccatctaccagaagacagcatgctacggccatttcggaagaagcgagttcccatgggaggttcccaggaagcttgtattttagagccagggggagctgggcctggtctcaccctggaggcacctggtggccatgctcctcttccccagacgcctggctgctgatcgccttccccacccaccaaccctcagggcaaagccaggtccctctcatttagcctgtcctgtcatcatcatggccagctggaggcaggggcttcctggtgctggaggttggatcttgatgtaaggatgggcatggtgttctcctgctgctccctcagactggggcaatgttaatttagtggaaaaggcacccccgtcaagagtgaattccctcactcgtctcccccaacagctggaccctgaggttactggaaattaggggattaacccac

SEQ ID NO: 17886 - DNA, 3410 bp, Homo sapiens
  source 1..3410: mol_type = unassigned DNA
atataggagtcgctcaggagcaagctgtggcaagctggagggagggacacatcccgtgttccatccactccctcccttctcagcagtcctcgcctgttctcacgtgctcacaggcagttaggcagaagtgatccccgtggctctgccaaagacaagcctgttgggttgaaagaagaagaagaagaagaaaaaaaaactcaggcaaagtcacagcctcaaaattgttcactgaaagaagcgtgagtggagaagtgtgagaagatgaatggaccggtggatggcttgtgtgaccactctctaagtgaaggagtcttcatgttcacatcggagtctgtgggagagggacacccggataagatctgtgaccagatcagtgatgcagtgctggatgcccatctcaagcaagaccccaatgccaaggtggcctgtgagacagtgtgcaagaccggcatggtgctgctgtgtggtgagatcacctcaatggccatggtggactaccagcgggtggtgagggacaccatcaagcacatcggctacgatgactcagccaagggctttgacttcaagacttgcaacgtgctggtggctttggagcagcaatccccagatattgcccagtgcgtccatctggacagaaatgaggaggatgtgggggcaggagatcagggtttgatgttcggctatgctaccgacgagacagaggagtgcatgcccctcaccatcatccttgctcacaagctcaacgcccggatggcagacctcaggcgctccggcctcctcccctggctgcggcctgactctaagactcaggtgacagttcagtacatgcaggacaatggcgcagtcatccctgtgcgcatccacaccatcgtcatctctgtgcagcacaacgaagacatcacgctggaggagatgcgcagggccctgaaggagcaagtcatcagggccgtggtgccggccaagtacctggacgaagacaccgtctaccacctgcagcccagtgggcggtttgtcatcggaggtccccagggggatgcgggtgtcactggccgtaagattattgtggacacctatggcggctggggggctcatggtggtggggccttctctgggaaggactacaccaaggtagaccgctcagctgcatatgctgcccgctgggtggccaagtctctggtgaaagcagggctctgccggagagtgcttgtccaggtttcctatgccattggtgtggccgagccgctgtccatttccatcttcacctacggaacctctcagaagacagagcgagagctgctggatgtggtgcataagaacttcgacctccggccgggcgtcattgtcagggatttggacttgaagaagcccatctaccagaagacagcatgctacggccatttcggaagaagcgagttcccatgggaggttcccaggaagcttgtattttagagccagggggagctgggcctggtctcaccctggaggcacctggtggccatgctcctcttccccagacgcctggctgctgatcgccttccccacccaccaaccctcagggcaaagccaggtccctctcatttagcctgtcctgtcatcatcatggccagctggaggcaggggcttcctggtgctggaggttggatcttgatgtaaggatgggcatggtgttctcctgctgctccctcagactggggcaatgttaatttagtggaaaaggcacccccgtcaagagtgaattccctcactcgtctcccccaacagctggaccctgaccagctccccctccctccccttgcctgtgccaggtgaggtcagcacatctcaacaggcctcagggctccttgtgggcctgggctcctggacccccctttcacaggcagccagtgccctgagccagggtctccagaaagccccacccaggccaggcatgtggcaggggttagagcaggactgatgtctcctaagcacctgtaatgtgcgagggacccagctaataactgatctcgttttttcttcactgcaacatgatgaggtagtaccttttatatcccatttatagatgggggaaagcaaagcacagagagtctggataacttccacagggtcccacagccacgtgtttagacctagatgtataactaggagctttgactcaggagcctgtgacataccccctcccccaccgttgtctcatgccagtaacaggctcaaacaatgacaaagcagattcagaaatgaggccatggactctgtcctgaaggcctgaggttactggaaattaggggattaacccactagctcttgttgagccgtgggcaattgtctgaaaagtgaagacagaaccacagggctattttgtttgcttcatgtgtcccagaagatgactgagggtgagttggcttacctggcccatcagggtaggctggagttagggactgaccagcagctttagaatcccagccccctgaccactcagagacatgcagagattgggtttttggacttctggggtaagtggtctaagtccagtccagtcctatctgggcttcctggagcagaagcagcaacttgtcctagcacagatggccagccccttagacagaggccctcaagtctttctctttccctggtcccttgtatcccctgcaggctgagtgcatttggagggagtgagtggccctttcggatccagggaggctggtcctatggcctcatgttaaataggcggggcttgccttctggtgttggacaagcttctgagacgtcatgaggagattctgcctttgccaggtgactgtctggggagcgggtctgctcccaaggggcctgagcagtccttggcctgctaaggtcttggaacttgcctgcctttccatccatggccagcagcacctgccctacctgccccacttgtccttagcctggacctctgacagcagcatctctaccttctccccagctcccaggaccacaggctcaggcaggggcctccatgggccccaggggaacactggggacttggcctctctctagggtacatggtgctgggagaggcagcccaggaagtctcatctggggagcaggcagccagcatctgggccttggcctggagcacaaagaccctggctttcattttctctcaggtgaaaggaaattaaggcaacaaaagaagcccggctcctggtcacctaggaagcctcagattccttcccatggagggagggagtggtttgcaggtggccaagttcctctaacttggctcacactcgacatgaaaattcagaattttatactttccctaccctctagagaaataagatcttttttgtcagtttgtttgtatgaaactaaagcctttatttgttaatagttcctgctaaaacaatgaataaaaactcaaggagcaacta

SEQ ID NO: 17887 - DNA, 435 bp, Homo sapiens
  source 1..435: mol_type = unassigned DNA
gagtctgtgggagagggacacccggataagatctgtgaccagatcagtgatgcagtgctggatgcccatctcaagcaagaccccaatgccaaggtggcctgtggctttgacttcaagacttgcaacgtgctggtggctttggagcagcaatccccagatattgcccagtgcgtccatctggacagaaatgaggaggatgtgggggcaggagatcagggtttgatgttcggctatgctaccgacgagacagaggagtgcatgcccctcaccatcatccttgctcacaagctcaacgcccggatggcagacctcaggcgctccggcctcctcccctggctgcggcctgactctaagactcaggtgacagttcagtacatgcaggacaatggcgcagtcatccctgtgcgcatccacaccatcgtcatctctgtgcag

SEQ ID NO: 17888 - DNA, 2819 bp, Homo sapiens
  source 1..2819: mol_type = unassigned DNA
ttcgttcgctccgcgccgcccgcctgctacgagtagaacgctgtccgcagcttgcgcatttcgcagccgctgccgcctcgccgctgctccttcgtaaggccacttccgcacaccgacaccaacatgaacggacagctcaacggcttccacgaggcgttcatcgaggagggcacattccttttcacctcagagtcggtcggggaaggccacccagataagatttgtgaccaaatcagtgatgctgtccttgatgcccaccttcagcaggatcctgatgccaaagtagcttgtgaaactgttgctaaaactggaatgatccttcttgctggggaaattacatccagagctgctgttgactaccagaaagtggttcgtgaagctgttaaacacattggatatgatgattcttccaaaggttttgactacaagacttgtaacgtgctggtagccttggagcaacagtcaccagatattgctcaaggtgttcatcttgacagaaatgaagaagacattggtgctggagaccagggcttaatgtttggctatgccactgatgaaactgaggagtgtatgcctttaaccattgtcttggcacacaagctaaatgccaaactggcagaactacgccgtaatggcactttgccttggttacgccctgattctaaaactcaagttactgtgcagtatatgcaggatcgaggtgctgtgcttcccatcagagtccacacaattgttatatctgttcagcatgatgaagaggtttgtcttgatgaaatgagggatgccctaaaggagaaagtcatcaaagcagttgtgcctgcgaaataccttgatgaggatacaatctaccacctacagccaagtggcagatttgttattggtgggcctcagggtgatgctggtttgactggacgcaaaatcattgtggacacttatggcggttggggtgctcatggaggaggtgccttttcaggaaaggattataccaaggtcgaccgttcagctgcttatgctgctcgttgggtggcaaaatcccttgttaaaggaggtctgtgccggagggttcttgttcaggtctcttatgctattggagtttctcatccattatctatctccattttccattatggtacctctcagaagagtgagagagagctattagagattgtgaagaagaatttcgatctccgccctggggtcattgtcagggatctggatctgaagaagccaatttatcagaggactgcagcctatggccactttggtagggacagcttcccatgggaagtgcccaaaaagcttaaatattgaaagtgttagccttttttccccagacttgttggcgtaggctacagagaagccttcaagctctgagggaaagggccctccttcctaaattttcctgtcctctttcagctcctgaccagttgcagtcactctagtcaatgacatgaattttagcttttgtgggggactgtaagttgggcttgctattctgtccctaggtgttttgttcaccattataatgaatttagtgagcataggtgatccatgtaactgcctagaaacaacactgtagtaaataatgctttgaaattgaacctttgtgccctatcacccaacgctccaaagtcataattgcattgactttccccaccagatgctgaaaatgtccttgtgatgtgcacgtaaagtacttgtagttccacttatagcctctgtctggcaatgccacagccctgtcagcatgaatttgtaatgtcttgagctctattatgaatgtgaagccttccccttatcctccctgtaacttgatccatttctaattatgtagctctttgtcagggagtgttccctatccaatcaatcttgcatgtaacgcaagttcccagttggagctccagcctgacatcaaaaaaggcagttaccattaaaccatctccctggtgcttatgctcttaattgccacctctaacagcaccaaatcaaaatctctccactttcagctgtcttttggaggacgtacgtaataaggttttaatttagtaaaccaatcctatgcatggtttcagcactagccaaacctcaccaactcctagttctagaaaaacaggcacttggcagccttgtgatgtcatacagagaagtcacagggcagtacctgagggtctgtaggttgcacactttggtaccagataacttttttttttctttataagaaagcctgagtactccacactgcacaataactcctcccagggttttaactttgttttattttcaaaaccaggtccaatgagctttctgaacagctggtgtagctacagagaaaccagcttccttcagagagcagtgcttttggcggggaggaggaaatcccttcatacttgaacgttttctaattgcttatttattgtattctggggtatggcgtaagtacagagaagccatcacctcagatggcagcttttaaaagattttttttttttctctcaacaccatgattcctttaacaacatgtttccagcattcccaggtaggccaaggtgtcctacagaaaaaccttgggttagacctacagggggtctggctggtgttaacagaagggagggcagagctggtgcggctggccatggagaaagctgacttggctggtgtggtacagagaagccagcttgtttacatgcttattccatgactgcttgccctaagcagaaagtgcctttcaggatctatttttggaggtttattacgtatgtctggttctcaattccaacagtttaatgaagatctaaataaaatgctaggttctaccttaa

SEQ ID NO: 17889 - DNA, 2144 bp, Homo sapiens
  source 1..2144: mol_type = unassigned DNA
cgcccgcctgctacgagtagaacgctgtccgcagcttgcgcatttcgcagccgctgccgcctcgccgctgctccttcgtaaggccacttccgcacaccgacaccaacatgaacggacagctcaacggcttccacgaggcgttcatcgaggagggcacattccttttcacctcagagtcggtcggggaaggccacccagataagatttgtgaccaaatcggtgatgctggtttgactggacgcaaaatcattgtggacacttatggcggttggggtgctcatggaggaggtgccttttcaggaaaggattataccaaggtcgaccgttcagctgcttatgctgctcgttgggtggcaaaatcccttgttaaaggaggtctgtgccggagggttcttgttcaggtctcttatgctattggagtttctcatccattatctatctccattttccattatggtacctctcagaagagtgagagagagctattagagattgtgaagaagaatttcgatctccgccctggggtcattgtcagggatctggatctgaagaagccaatttatcagaggactgcagcctatggccactttggtagggacagcttcccatgggaagtgcccaaaaagcttaaatattgaaagtgttagccttttttccccagacttgttggcgtaggctacagagaagccttcaagctctgagggaaagggccctccttcctaaattttcctgtcctctttcagctcctgaccagttgcagtcactctagtcaatgacatgaattttagcttttgtgggggactgtaagttgggcttgctattctgtccctaggtgttttgttcaccattataatgaatttagtgagcataggtgatccatgtaactgcctagaaacaacactgtagtaaataatgctttgaaattgaacctttgtgccctatcacccaacgctccaaagtcataattgcattgactttccccaccagatgctgaaaatgtccttgtgatgtgcacgtaaagtacttgtagttccacttatagcctctgtctggcaatgccacagccctgtcagcatgaatttgtaatgtcttgagctctattatgaatgtgaagccttccccttatcctccctgtaacttgatccatttctaattatgtagctctttgtcagggagtgttccctatccaatcaatcttgcatgtaacgcaagttcccagttggagctccagcctgacatcaaaaaaggcagttaccattaaaccatctccctggtgcttatgctcttaattgccacctctaacagcaccaaatcaaaatctctccactttcagctgtcttttggaggacgtacgtaataaggttttaatttagtaaaccaatcctatgcatggtttcagcactagccaaacctcaccaactcctagttctagaaaaacaggcacttggcagccttgtgatgtcatacagagaagtcacagggcagtacctgagggtctgtaggttgcacactttggtaccagataacttttttttttctttataagaaagcctgagtactccacactgcacaataactcctcccagggttttaactttgttttattttcaaaaccaggtccaatgagctttctgaacagctggtgtagctacagagaaaccagcttccttcagagagcagtgcttttggcggggaggaggaaatcccttcatacttgaacgttttctaattgcttatttattgtattctggggtatggcgtaagtacagagaagccatcacctcagatggcagcttttaaaagattttttttttttctctcaacaccatgattcctttaacaacatgtttccagcattcccaggtaggccaaggtgtcctacagaaaaaccttgggttagacctacagggggtctggctggtgttaacagaagggagggcagagctggtgcggctggccatggagaaagctgacttggctggtgtggtacagagaagccagcttgtttacatgcttattccatgactgcttgccctaagcagaaagtgcctttcaggatctatttttggaggtttattacgtatgtctggttctcaattccaacagtttaatgaagatctaaataaaatgctaggttctacctt

SEQ ID NO: 17890 - DNA, 1803 bp, Homo sapiens
  source 1..1803: mol_type = unassigned DNA
cgactagcgcaggcggacgggagagaatgggggaggggtgggatgggagcaggggcagagacgggcagagggcagagggcggagcggcgccggagcgggcgtcatggcgcggctcctctggttgctccggggcctgaccctcggaactgcgcctcggcgggcggtgcggggccaagcgggcggcggcgggcccggcaccgggccgggactgggggaggcagggtctcttgcaacgtgtgagctgcctcttgccaagagtgagtggcaaaagaaactaaccccggagcagttctacgtcacaagagaaaagggaacggaaccgcctttcagtgggatctacctgaataacaaggaagcaggaatgtatcattgcgtgtgctgcgacagtccactcttcagttctgagaaaaagtactgctctggcactgggtggccttcgttttccgaggctcatggtacgtctggctctgatgaaagccacacagggatcctgagacgtctggatacctcgttaggatcagctcgcacagaggttgtctgcaagcagtgtgaagctcatctaggtcacgtgtttcctgatggacctgggcccaatggtcagaggttttgcatcaacagtgtggctttgaagttcaaaccaaggaaacactgaccatcttcaagagtcccgttcccttgccaccccttcacgtgcaccctcaatttccacaattcacttgaatgacttgttttatttgcaataaaactgggctgaatttgctgctgtctccagcgagtcattgcttctcttaatttatttacctggaatcaacttaatcctgtgtgttaggctgttcttgtgttgctataaagaagtacctgatcaggatctgggagaatttgaaaaaaaaagaaaaactagaaaaataaacaaaattaaaaagaaaaaaaaatacctgagactgagtaacttataaagaaaagaggtttaattgactcacagttctgcagggtgtacagaaagcatggtgccagcatttgctcggattctggggagacctgagggagcttttactcatggcagaaggtgaagggggagccggcgtctcacatggcaaagcaggagcaagagagagtggtagggaggtgccacatacttttaaacagccagatctctcaagaactcactcactgtcaccaggacagcaccaagccatgagggatccaccctcatgacccagttacctcccggcagggcccacctccggcactaggaattatacttcaacataagatttggagagggaaaacatccaaaccatatcacccaactcccacttggagtagaacttcacaaaacgacagagggacagctgtttccatcaaacacttccacagcttcacctgagacgagggcatgactctgggaacatcaggaggctgatggactattaagccaaacaattcctacaaaaattccctgcaccttccactgcgtttcagtccttgacagacataagtaagggatcaagtgagaagaggaaggaaaatacaggatccaaggaatcaacaatgctagcactgaagagcaggattacggaggagctgtgctctgggagcatatatggtgatcaatcagatgcatgacttttttttcaaaattttaaatgtcttgagcatgctacttccaaccattctacccacaaataaactgcaataggacttggttagatttcaatgattatgaataaatgttcaccttcataccttctggttacaaagctaaactttaaaatgtccaaataaaatattcactaaaattta

SEQ ID NO: 17891 - DNA, 4417 bp, Homo sapiens
  source 1..4417: mol_type = unassigned DNA
atatttggactcggctgcccgtgcccaggaatttcccgtcatgcctcccgccgccccgtccgtcgcccggagccggggagggagggagcgaggttcggacaccggcggcggctgcctggcctttccatgagcccgcggcggaccctcccgcgccccctctcgctctgcctctccctctgcctctgcctctgcctggccgcggctctgggaagtgcgcagtccgctcttgcccctgttctttgcttctcgttttgttggtgaagatatcacagtgatgtctgcattcaacctgctgcatttggtgacaaagagccagccagtagcccttcgagcctgtgggcttccctcagggtcgtgtagggataaaaagaactgtaaggtggtcttttcccagcaggaactgaggaagcggctaacacccctgcagtaccatgtcactcaggagaaagggaccgaaagtgcctttgaaggagaatacacacatcacaaagatcctggaatatataaatgtgttgtttgtggaactccattgtttaagtcagaaaccaaatttgactccggttcaggttggccttcattccacgatgtgatcaattctgaggcaatcacattcacagatgacttttcctatgggatgcacagggtggaaacaagctgctctcagtgtggtgctcaccttgggcacatttttgatgatgggcctcgtccaactgggaaaagatactgcataaattcggctgccttgtcttttacacctgcggatagcagtggcaccgccgagggaggcagtggggtcgccagcccggcccaggcagacaaagcggagctctagagtaatggagagtgatggaaacaaagtgtacttaatgcacagcttattaaaaaaatcaaaattgttatcttaatagatatattttttcaaaaactataagggcagttttgtgctattgatattttttcttcttttgcttaaacagaagccctggccatccatgtattttgcaattgactagatcaagaactgtttatagctttagcaaatggagacagctttgtgaaacttcttcacaagccacttataccctttggcattcttttctttgagcacatggcttcttttgcagtttttccccctttgattcagaagcagagggttcatggtcttcaaacatgaaaatagagatctcctctgcagtgtagagaccagagctgggcagtgcagggcatggagacctgcaagacacatggccttgaggcctttgcacagacccacctaagataaggttggagtgatgttttaatgagactgttcagctttgtggaaagtttgagctaaggtcatttttttttttctcactgaaagggtgtgaaggtctaaagtctttccttatgttaaattgttgccagatccaaaggggcatactgagtgttgtggcagagaagtaaacattaccacactgttaggcctttattttattttattttccatcgaaagcattggaggcccagtgcaatggctcacgcctgtgatcccagcactttgggaggccaaggcgggtggatcacgaggtcaggagatggagaccatcctggctaacatggtgaaaccccgtctctactaaaaatacgaaaaattagccaggcgtggtggtgggcacctgtagtcccagctactcaggaggctgaggcaggagaatggcgtgaacccggaaggcggagcttgcagttagccgagatcatgccactgcactccagcctacatgacaatgtgacactccatctcaaaaaataataataataacaatataagaactagctgggcatggtggcgcatgcatgtagtcccagctactcctgaggctcagtcaggagaatcgcttgaacttgggaggcggaggttgcagtgagctgagctcataccactgcactccagcctgaacagagtgagatcctgtcaaaaaagaaaagaaaaagaaagcagcattcaaatgtaagacaactgtaaaatattgagccccacttggtctaaaattcaaaaagaagaacgcctgtccatcgcctttttataagtccttctctccacacctaaaagcagctgcagctggaagggcacaaattccactgtgtaaaataaaatattaggggcaacacacttcatcaaggcagcaggaatgagagagagcagagaagatcaaggatgaagtcttgggtactgaaaaattcagtgctgggcagaaaaactgacagggcagtacaagtaacaaacagaatccaagtggggtggcccttgtgcacagagctccaggtgacctctggagagacatgggcattcacatggaaagctaaaacggaagctcaagtttcatactcaacataatcttctgtgtgacaaaggacaagccatgtagcctctctgtgcctatttcttcatgcataaactgggactcataatatttgtaaaatgtattgatactctcagggcaaattcactatattgctatacagttgagatcagtgttgtaaaattaaactgatctggttctaattgcctcaaaggccaaagcccaggcatttgaaatggaaagaagcagagaggaggctgacttagctgattggtatggaaacagttgggccaagagccagaatttccctttgtagcaacacggctagttttactttgagaagctctgctcagctgctttataacattaagtctggcggaatggatgtcactgtgcacaataaagttttcacaagtataaacaatggtgatgtaagtcaacattgctgtagccaggtgtgaaggttgtatggtgtgtgacgaatgtacatcatgtttgtaggtttggatgctaatcttgaattgtagtttaaaaaatacgtatttttgtaactctttgaaagtttatgaagactgacagctttccttgtaagcactaagagaaaaaaaagaaagagggacatttgacaattttaaagaaacaacaagaaattagaatgaaaatctgtgacaaacagcgtcagtgtggccatgtccacattcctacatgtctctctctacaagcacctctctaagaagcctgacatcccggtggactctttatagtcatgtacacttgattccagatgagctctggtcttatctggatgctcagataagaggtttctatctgagcatccagatgttccctcaggttccaagacatttcaccccaggccctgggttcactctggaattcgtaggcttcacgtctctctagaaatgacgtgtaaaatttaagaccagacctcagccatcagcgtccagaccatcctagaagtctttcccaatctcacagagaaagccctagtatttcccagtgaccccaggattccacgttggggtggccaaagaaataggtctctcagggctttgccacagcctccagcccatccttcagaggcacacacagcacctctcggctgctccagctctgtaggatagcctcccctggggtccgtgggacgcgggccacagtgttgaggtagacaaggaggatcagtgagaggcctcttccctctccacagagactggattgtcattgttccttcatttatatcgtagggcttaacatttcactcaaaaaaaagcccctctttttctaatccttagtctttgtttcaaggaaagccagtttttcttctaccacattttccaggatcgactttaagaaaaatgcaacatctattgaaaaaaagtggggtgtatgcatgtggtttaattccagattgcttttgggtttaagtggtatcaaatttcagtatatttctgtcttatgtgaaagaaatatattactaaaacgtcagtgagcaataatgtcagctgtcaagcactagatttatttttgcaggatatggagtgcaatgaactgagtcaatatggcaaggtgtatgtgatctgtgggagttatgccatttaacataggaagtgcatgggactttccctctctgcactccagctcttactgtaccattagaagatgcagaattctgttggtgtgcaaaaagtatagccttacattcaagcagaatggatctgaagaaagcagcaatatctgttactagagaacattcccatgtgtttaaactcttcacttcttagatgcatttaaattcttaatgcaaatgacgtagcaatttgaaaacttctccgtattacttgtgtttaaaatgtcttgctttaaatacaaaacaaatggtaaaggggattatcttttgtttagatggttaaatattatttttgccttagatagctttgtaataatttttctccagacagttcaacacttttgaaaaatgacatgaattttcattaaaaacccttttcctatgtttattgtatacaagaattatgcaataaaatttctttataaaaata

SEQ ID NO: 17892 - DNA, 4289 bp, Homo sapiens
  source 1..4289: mol_type = unassigned DNA
atatttggactcggctgcccgtgcccaggaatttcccgtcatgcctcccgccgccccgtccgtcgcccggagccggggagggagggagcgaggttcggacaccggcggcggctgcctggcctttccatgagcccgcggcggaccctcccgcgccccctctcgctctgcctctccctctgcctctgcctctgcctggccgcggctctgggaagtgcgcagtccgggtcgtgtagggataaaaagaactgtaaggtggtcttttcccagcaggaactgaggaagcggctaacacccctgcagtaccatgtcactcaggagaaagggaccgaaagtgcctttgaaggagaatacacacatcacaaagatcctggaatatataaatgtgttgtttgtggaactccattgtttaagtcagaaaccaaatttgactccggttcaggttggccttcattccacgatgtgatcaattctgaggcaatcacattcacagatgacttttcctatgggatgcacagggtggaaacaagctgctctcagtgtggtgctcaccttgggcacatttttgatgatgggcctcgtccaactgggaaaagatactgcataaattcggctgccttgtcttttacacctgcggatagcagtggcaccgccgagggaggcagtggggtcgccagcccggcccaggcagacaaagcggagctctagagtaatggagagtgatggaaacaaagtgtacttaatgcacagcttattaaaaaaatcaaaattgttatcttaatagatatattttttcaaaaactataagggcagttttgtgctattgatattttttcttcttttgcttaaacagaagccctggccatccatgtattttgcaattgactagatcaagaactgtttatagctttagcaaatggagacagctttgtgaaacttcttcacaagccacttataccctttggcattcttttctttgagcacatggcttcttttgcagtttttccccctttgattcagaagcagagggttcatggtcttcaaacatgaaaatagagatctcctctgcagtgtagagaccagagctgggcagtgcagggcatggagacctgcaagacacatggccttgaggcctttgcacagacccacctaagataaggttggagtgatgttttaatgagactgttcagctttgtggaaagtttgagctaaggtcatttttttttttctcactgaaagggtgtgaaggtctaaagtctttccttatgttaaattgttgccagatccaaaggggcatactgagtgttgtggcagagaagtaaacattaccacactgttaggcctttattttattttattttccatcgaaagcattggaggcccagtgcaatggctcacgcctgtgatcccagcactttgggaggccaaggcgggtggatcacgaggtcaggagatggagaccatcctggctaacatggtgaaaccccgtctctactaaaaatacgaaaaattagccaggcgtggtggtgggcacctgtagtcccagctactcaggaggctgaggcaggagaatggcgtgaacccggaaggcggagcttgcagttagccgagatcatgccactgcactccagcctacatgacaatgtgacactccatctcaaaaaataataataataacaatataagaactagctgggcatggtggcgcatgcatgtagtcccagctactcctgaggctcagtcaggagaatcgcttgaacttgggaggcggaggttgcagtgagctgagctcataccactgcactccagcctgaacagagtgagatcctgtcaaaaaagaaaagaaaaagaaagcagcattcaaatgtaagacaactgtaaaatattgagccccacttggtctaaaattcaaaaagaagaacgcctgtccatcgcctttttataagtccttctctccacacctaaaagcagctgcagctggaagggcacaaattccactgtgtaaaataaaatattaggggcaacacacttcatcaaggcagcaggaatgagagagagcagagaagatcaaggatgaagtcttgggtactgaaaaattcagtgctgggcagaaaaactgacagggcagtacaagtaacaaacagaatccaagtggggtggcccttgtgcacagagctccaggtgacctctggagagacatgggcattcacatggaaagctaaaacggaagctcaagtttcatactcaacataatcttctgtgtgacaaaggacaagccatgtagcctctctgtgcctatttcttcatgcataaactgggactcataatatttgtaaaatgtattgatactctcagggcaaattcactatattgctatacagttgagatcagtgttgtaaaattaaactgatctggttctaattgcctcaaaggccaaagcccaggcatttgaaatggaaagaagcagagaggaggctgacttagctgattggtatggaaacagttgggccaagagccagaatttccctttgtagcaacacggctagttttactttgagaagctctgctcagctgctttataacattaagtctggcggaatggatgtcactgtgcacaataaagttttcacaagtataaacaatggtgatgtaagtcaacattgctgtagccaggtgtgaaggttgtatggtgtgtgacgaatgtacatcatgtttgtaggtttggatgctaatcttgaattgtagtttaaaaaatacgtatttttgtaactctttgaaagtttatgaagactgacagctttccttgtaagcactaagagaaaaaaaagaaagagggacatttgacaattttaaagaaacaacaagaaattagaatgaaaatctgtgacaaacagcgtcagtgtggccatgtccacattcctacatgtctctctctacaagcacctctctaagaagcctgacatcccggtggactctttatagtcatgtacacttgattccagatgagctctggtcttatctggatgctcagataagaggtttctatctgagcatccagatgttccctcaggttccaagacatttcaccccaggccctgggttcactctggaattcgtaggcttcacgtctctctagaaatgacgtgtaaaatttaagaccagacctcagccatcagcgtccagaccatcctagaagtctttcccaatctcacagagaaagccctagtatttcccagtgaccccaggattccacgttggggtggccaaagaaataggtctctcagggctttgccacagcctccagcccatccttcagaggcacacacagcacctctcggctgctccagctctgtaggatagcctcccctggggtccgtgggacgcgggccacagtgttgaggtagacaaggaggatcagtgagaggcctcttccctctccacagagactggattgtcattgttccttcatttatatcgtagggcttaacatttcactcaaaaaaaagcccctctttttctaatccttagtctttgtttcaaggaaagccagtttttcttctaccacattttccaggatcgactttaagaaaaatgcaacatctattgaaaaaaagtggggtgtatgcatgtggtttaattccagattgcttttgggtttaagtggtatcaaatttcagtatatttctgtcttatgtgaaagaaatatattactaaaacgtcagtgagcaataatgtcagctgtcaagcactagatttatttttgcaggatatggagtgcaatgaactgagtcaatatggcaaggtgtatgtgatctgtgggagttatgccatttaacataggaagtgcatgggactttccctctctgcactccagctcttactgtaccattagaagatgcagaattctgttggtgtgcaaaaagtatagccttacattcaagcagaatggatctgaagaaagcagcaatatctgttactagagaacattcccatgtgtttaaactcttcacttcttagatgcatttaaattcttaatgcaaatgacgtagcaatttgaaaacttctccgtattacttgtgtttaaaatgtcttgctttaaatacaaaacaaatggtaaaggggattatcttttgtttagatggttaaatattatttttgccttagatagctttgtaataatttttctccagacagttcaacacttttgaaaaatgacatgaattttcattaaaaacccttttcctatgtttattgtatacaagaattatgcaataaaatttctttataaaaat

SEQ ID NO: 17893 - DNA, 630 bp, Homo sapiens
  source 1..630: mol_type = unassigned DNA
ctgcggggacagcccctgcctcagccgagaaggggagcagaagggttgcgccccgcgccagcggtgaggggccgaacggaaggagctcttgcccctgttctttgcttctcgttttgttggtgaagatatcacagtgatgtctgcattcaacctgctgcatttggtgacaaagagccagccagtagcccttcgagcctgtgggcttccctcagggtcgtgtagggataaaaagaactgtaaggtggtcttttcccagcaggaactgaggaagcggctaacacccctgcagtaccatgtcactcaggagaaagggaccgaaagtgcctttgaaggagaatacacacatcacaaagatcctggaatatataaatgtgttgtttgtggaactccattgtttaagtcagaaaccaaatttgactccggttcaggttggccttcattccacgatgtgatcaattctgaggcaatcacattcacagatgacttttcctatgggatgcacagggtggaaacaagctgctctcagtgtggtgctcaccttgggcacatttttgatgatgggcctcgtccaactgggaaaagatactgcataaattcggctgccttgtcttttacacctgcggatagcag

SEQ ID NO: 17894 - DNA, 964 bp, Homo sapiens
  source 1..964: mol_type = unassigned DNA
caccggcggcggctgcctggcctttccatgagcccgcggcggaccctcccgcgccccctctcgctctgcctctccctctgcctctgcctctgcctggccgcggctctgggaagtgcgcagtccgagtgacatcactgcctctcttcctgtgcgctggctttgacataagccagatggccaccgtggttggtaggcgcccaggctgcctggtacaggagttgatgaaacagaataggaagacgttttatggtcagctgtggaagcacagtgagactgcagctttgctaactcttgcccctgttctttgcttctcgttttgttggtgaagatatcacagtgatgtctgcattcaacctgctgcatttggtgacaaagagccagccagtagcccttcgagcctgtgggcttccctcagggtcgtgtagggataaaaagaactgtaaggtggtcttttcccagcaggaactgaggaagcggctaacacccctgcagtaccatgtcactcaggagaaagggaccgaaagtgcctttgaaggagaatacacacatcacaaagatcctggaatatataaatgtgttgtttgtggaactccattgtttaagtcagaaaccaaatttgactccggttcaggttggccttcattccacgatgtgatcaattctgaggcaatcacattcacagatgacttttcctatgggatgcacagggtggaaacaagctgctctcagtgtggtgctcaccttgggcacatttttgatgatgggcctcgtccaactgggaaaagatactgcataaattcggctgccttgtcttttacacctgcggatagcagtggcaccgccgagggaggcagtggggtcgccagcccggcccaggcagacaaagcggagctctagagtaatggagagtgatggaaacaaagtgtacttaatgcacagcttattaaaaaaatcaaaattgtta

SEQ ID NO: 17895 - DNA, 527 bp, Homo sapiens
  source 1..527: mol_type = unassigned DNA
acgttagggtgtgaccccgagccgggattccattctgcgcctgctgcgccccctcggccacctgcggggacagcccctgcctcagccgagaaggggagcagaagggttgcgccccgcgccagcgctcttgcccctgttctttgcttctcgttttgttggtgaagatatcacagtgatgtctgcattcaacctgctgcatttggtgacaaagagccagccagtagcccttcgagcctgtgggcttccctcagggtcgtgtagggataaaaagaactgtaaggtggtcttttcccagcaggaactgaggaagcggctaacacccctgcagtaccatgtcactcaggagaaagggaccgaaagtgcctttgaaggagaatacacacatcacaaagatcctggaatatataaatgtgttgtttgtggaactccattgtttaagtcagaaaccaaatttgactccggttcaggttggccttcattccacgatgtgatcaattctgaggcaatcacattcacagatgactttt

SEQ ID NO: 17896 - DNA, 2905 bp, Homo sapiens
  source 1..2905: mol_type = unassigned DNA
agtctactttccggtagcggtgccagggcagtggcctaatacggaactccatttcccggcgtgcctcgcggaggccgctgaactcagaagcgggaggccggttccggttgcatcagcgagggattcacggcgaaatgagactgttcgtgagtgatggcgtcccgggttgcttgccggtgctggccgccgccgggagagcccggggcagagcagaggtgctcatcagcactgtaggcccggaagattgtgtggtcccgttcctgacccggcctaaggtccctgtcttgcagctggatagcggcaactacctcttctccactagtgcaatctgccgatatttttttttgttatctggctgggagcaagatgacctcactaaccagtggctggaatgggaagcgacagagctgcagccagctttgtctgctgccctgtactatttagtggtccaaggcaagaagggggaagatgttcttggttcagtgcggagagccctgactcacattgaccacagcttgagtcgtcagaactgtcctttcctggctggggagacagaatctctagccgacattgttttgtggggagccctatacccattactgcaagatcccgcctacctccctgaggagctgagtgccctgcacagctggttccagacactgagtacccaggaaccatgtcagcgagctgcagagactgtactgaaacagcaaggtgtcctggctctccggccttacctccaaaagcagccccagcccagccccgctgagggaagggctgtcaccaatgagcctgaggaggaggagctggctaccctatctgaggaggagattgctatggctgttactgcttgggagaagggcctagaaagtttgcccccgctgcggccccagcagaatccagtgttgcctgtggctggagaaaggaatgtgctcatcaccagtgccctcccttacgtcaacaatgtcccccaccttgggaacatcattggttgtgtgctcagtgccgatgtctttgccaggtactctcgcctccgccagtggaacaccctctatctgtgtgggacagatgagtatggtacagcaacagagaccaaggctctggaggagggactaaccccccaggagatctgcgacaagtaccacatcatccatgctgacatctaccgctggtttaacatttcgtttgatatttttggtcgcaccaccactccacagcagaccaaaatcacccaggacattttccagcagttgctgaaacgaggttttgtgctgcaagatactgtggagcaactgcgatgtgagcactgtgctcgcttcctggctgaccgcttcgtggagggcgtgtgtcccttctgtggctatgaggaggctcggggtgaccagtgtgacaagtgtggcaagctcatcaatgctgtcgagcttaagaagcctcagtgtaaagtctgccgatcatgccctgtggtgcagtcgagccagcacctgtttctggacctgcctaagctggagaagcgactggaggagtggttggggaggacattgcctggcagtgactggacacccaatgcccagtttatcacccgttcttggcttcgggatggcctcaagccacgctgcataacccgagacctcaaatggggaacccctgtacccttagaaggttttgaagacaaggtattctatgtctggtttgatgccactattggctatctgtccatcacagccaactacacagaccagtgggagagatggtggaagaacccagagcaagtggacctgtatcagttcatggccaaagacaatgttcctttccatagcttagtctttccttgctcagccctaggagctgaggataactataccttggtcagccacctcattgctacagagtacctgaactatgaggatgggaaattctctaagagccgcggtgtgggagtgtttggggacatggcccaggacacggggatccctgctgacatctggcgcttctatctgctgtacattcggcctgagggccaggacagtgctttctcctggacggacctgctgctgaagaataattctgagctgcttaacaacctgggcaacttcatcaacagagctgggatgtttgtgtctaagttctttgggggctatgtgcctgagatggtgctcacccctgatgatcagcgcctgctggcccatgtcaccctggagctccagcactatcaccagctacttgagaaggttcggatccgggatgccttgcgcagtatcctcaccatatctcgacatggcaaccaatatattcaggtgaatgagccctggaagcggattaaaggcagtgaggctgacaggcaacgggcaggaacagtgactggcttggcagtgaatatagctgccttgctctctgtcatgcttcagccttacatgcccacggttagtgccacaatccaggcccagctgcagctcccacctccagcctgcagtatcctgctgacaaacttcctgtgtaccttaccagcaggacaccagattggcacagtcagtcccttgttccaaaaattggaaaatgaccagattgaaagtttaaggcagcgctttggagggggccaggcaaaaacgtccccgaagccagcagttgtagagactgttacaacagccaagccacagcagatacaagcgctgatggatgaagtgacaaaacaaggaaacattgtccgagaactgaaagcacaaaaggcagacaagaacgaggttgctgcggaggtggcgaaactcttggatctaaagaaacagttggctgtagctgaggggaaaccccctgaagcccctaaaggcaagaagaaaaagtaaaagaccttggctcatagaaagtcactttaatagatagggacagtaataaataaatgtacaatctctat

SEQ ID NO: 17897 - DNA, 2702 bp, Homo sapiens
  source 1..2702: mol_type = unassigned DNA
gcatcagcgagggattcacggcgaaatgagactgttcgtgagtgatggcgtcccgggttgcttgccggtgctggccgccgccgggagagcccggggcagagcagaggtgctcatcagcactgtaggcccggaagattgtgtggtcccgttcctgacccggcctaaggtccctgtcttgcagctggatagcggcaactacctcttctccactagtgcaatctgccgatatttttttttgttatctggctgggagcaagatgacctcactaaccagtggctggaatgggaagcgacagagctgcagccagctttgtctgctgccctgtactatttagtggtccaaggcaagaagggggaagatgttcttggttcagtgcggagagccctgactcacattgaccacagcttgagtcgtcagaactgtcctttcctggctgggaggagctgagtgccctgcacagctggttccagacactgagtacccaggaaccatgtcagcgagctgcagagactgtactgaaacagcaaggtgtcctggctctccggccttacctccaaaagcagccccagcccagccccgctgagggaagggctgtcaccaatgagcctgaggaggaggagctggctaccctatctgaggaggagattgctatggctgttactgcttgggagaagggcctagaaagtttgcccccgctgcggccccagcagaatccagtgttgcctgtggctggagaaaggaatgtgctcatcaccagtgccctcccttacgtcaacaatgtcccccaccttgggaacatcattggttgtgtgctcagtgccgatgtctttgccaggtactctcgcctccgccagtggaacaccctctatctgtgtgggacagatgagtatggtacagcaacagagaccaaggctctggaggagggactaaccccccaggagatctgcgacaagtaccacatcatccatgctgacatctaccgctggtttaacatttcgtttgatatttttggtcgcaccaccactccacagcagaccaaaatcacccaggacattttccagcagttgctgaaacgaggttttgtgctgcaagatactgtggagcaactgcgatgtgagcactgtgctcgcttcctggctgaccgcttcgtggagggcgtgtgtcccttctgtggctatgaggaggctcggggtgaccagtgtgacaagtgtggcaagctcatcaatgctgtcgagcttaagaagcctcagtgtaaagtctgccgatcatgccctgtggtgcagtcgagccagcacctgtttctggacctgcctaagctggagaagcgactggaggagtggttggggaggacattgcctggcagtgactggacacccaatgcccagtttatcacccgttcttggcttcgggatggcctcaagccacgctgcataacccgagacctcaaatggggaacccctgtacccttagaaggttttgaagacaaggtattctatgtctggtttgatgccactattggctatctgtccatcacagccaactacacagaccagtgggagagatggtggaagaacccagagcaagtggacctgtatcagttcatggccaaagacaatgttcctttccatagcttagtctttccttgctcagccctaggagctgaggataactataccttggtcagccacctcattgctacagagtacctgaactatgaggatgggaaattctctaagagccgcggtgtgggagtgtttggggacatggcccaggacacggggatccctgctgacatctggcgcttctatctgctgtacattcggcctgagggccaggacagtgctttctcctggacggacctgctgctgaagaataattctgagctgcttaacaacctgggcaacttcatcaacagagctgggatgtttgtgtctaagttctttgggggctatgtgcctgagatggtgctcacccctgatgatcagcgcctgctggcccatgtcaccctggagctccagcactatcaccagctacttgagaaggttcggatccgggatgccttgcgcagtatcctcaccatatctcgacatggcaaccaatatattcaggtgaatgagccctggaagcggattaaaggcagtgaggctgacaggcaacgggcaggaacagtgactggcttggcagtgaatatagctgccttgctctctgtcatgcttcagccttacatgcccacggttagtgccacaatccaggcccagctgcagctcccacctccagcctgcagtatcctgctgacaaacttcctgtgtaccttaccagcaggacaccagattggcacagtcagtcccttgttccaaaaattggaaaatgaccagattgaaagtttaaggcagcgctttggagggggccaggtgagaaagctaaaggctgtgccctcgctccacaacagccacagcatcacttccctaatttccctaagtagtcctcacccatcactctttccatcttttggccctgccgcttcctcacttacagtttttctttcctgtcttaactagaagagaccttcgacttaaaggtaaccactttccctctgagatgctgtataaaactggaggttaggggatatttatggttgctggtgataactttgttgttctccaggcaaaaacgtccccgaagccagcagttgtagagactg

SEQ ID NO: 17898 - DNA, 3592 bp, Homo sapiens
  source 1..3592: mol_type = unassigned DNA
tgttgttgataggatggatatgtacactaacttccactttgtcactaattccgcacatggtaactccgaactctaaaactctgaccgttaagagcttgcatcgagagccactgcgagtagctgctgttatgacatggccatttcattctccacaacaagagaagcagccgcggcttcagtcaccgccctccagcagcgtaagaggataaaagtgcgacttgccctaaaacctaaacgtctcttctggatctccagaaaaaaagtgctgctctaggccgggcgcagtggctcacgcctgtaatcctagcactttggcaggccgaggcgggcggatcatctgaggtgaggacttcgagaccagcctagccaaaatggtcaaagcccgcctctactaaaaatacaaaaattagccgagcgtggtggcacgtgcctgtagtcccagctgcatgggaggctgaggccggagaatcacttgaaccctggaggcagaggttgcagcgagccaagaccgtgccactgcacttcagcccagcgttgcatgatgggagaaatagtctactttccggtagcggtgccagggcagtggcctaatacggaactccatttcccggcgtgcctcgcggaggccgctgaactcagaagcgggaggccggttccggttgcatcagcgagggattcacggcgaaatgagactgttcgtgagtgatggcgtcccgggttgcttgccggtgctggccgccgccgggagagcccggggcagagcagaggtgctcatcagcactgtaggcccggaagattgtgtggtcccgttcctgacccggcctaaggtccctgtcttgcagctggatagcggcaactacctcttctccactagtgcaatctgccgatatttttttttgttatctggctgggagcaagatgacctcactaaccagtggctggaatgggaagcgacagagctgcagccagctttgtctgctgccctgtactatttagtggtccaaggcaagaagggggaagatgttcttggttcagtgcggagagccctgactcacattgaccacagcttgagtcgtcagaactgtcctttcctggctggggagacagaatctctagccgacattgttttgtggggagccctatacccattactgcaagatcccgcctacctccctgaggagctgagtgccctgcacagctggttccagacactgagtacccaggaaccatgtcagcgagctgcagagactgtactgaaacagcaaggtgtcctggctctccggccttacctccaaaagcagccccagcccagccccgctgagggaagggctgtcaccaatgagcctgaggaggaggagctggctaccctatctgaggaggagattgctatggctgttactgcttgggagaagggcctagaaagtttgcccccgctgcggccccagcagaatccagtgttgcctgtggctggagaaaggaatgtgctcatcaccagtgccctcccttacgtcaacaatgtcccccaccttgggaacatcattggttgtgtgctcagtgccgatgtctttgccaggtactctcgcctccgccagtggaacaccctctatctgtgtgggacagatgagtatggtacagcaacagagaccaaggctctggaggagggactaaccccccaggagatctgcgacaagtaccacatcatccatgctgacatctaccgctggtttaacatttcgtttgatatttttggtcgcaccaccactccacagcagaccaaaatcacccaggacattttccagcagttgctgaaacgaggttttgtgctgcaagatactgtggagcaactgcgatgtgagcactgtgctcgcttcctggctgaccgcttcgtggagggcgtgtgtcccttctgtggctatgaggaggctcggggtgaccagtgtgacaagtgtggcaagctcatcaatgctgtcgagcttaagaagcctcagtgtaaagtctgccgatcatgccctgtggtgcagtcgagccagcacctgtttctggacctgcctaagctggagaagcgactggaggagtggttggggaggacattgcctggcagtgactggacacccaatgcccagtttatcacccgttcttggcttcgggatggcctcaagccacgctgcataacccgagacctcaaatggggaacccctgtacccttagaaggttttgaagacaaggtattctatgtctggtttgatgccactattggctatctgtccatcacagccaactacacagaccagtgggagagatggtggaagaacccagagcaaccctaggagctgaggataactataccttggtcagccacctcattgctacagagtacctgaactatgaggatgggaaattctctaagagccgcggtgtgggagtgtttggggacatggcccaggacacggggatccctgctgacatctggcgcttctatctgctgtacattcggcctgagggccaggacagtgctttctcctggacggacctgctgctgaagaataattctgagctgcttaacaacctgggcaacttcatcaacagagctgggatgtttgtgtctaagttctttgggggctatgtgcctgagatggtgctcacccctgatgatcagcgcctgctggcccatgtcaccctggagctccagcactatcaccagctacttgagaaggttcggatccgggatgccttgcgcagtatcctcaccatatctcgacatggcaaccaatatattcaggtgaatgagccctggaagcggattaaaggcagtgaggctgacaggcaacgggcaggaacagtgactggcttggcagtgaatatagctgccttgctctctgtcatgcttcagccttacatgcccacggttagtgccacaatccaggcccagctgcagctcccacctccagcctgcagtatcctgctgacaaacttcctgtgtaccttaccagcaggacaccagattggcacagtcagtcccttgttccaaaaattggaaaatgaccagattgaaagtttaaggcagcgctttggagggggccaggcaaaaacgtccccgaagccagcagttgtagagactgttacaacagccaagccacagcagatacaagcgctgatggatgaagtgacaaaacaaggaaacattgtccgagaactgaaagcacaaaaggcagacaagaacgaggttgctgcggaggtggcgaaactcttggatctaaagaaacagttggctgtagctgaggggaaaccccctgaagcccctaaaggaggtgaaacataggtacccccattttcatctgaagacaggacctcttgcaggtcctcataccaggcttccagctcccagctggacagtgtcccgaaggagaaaggcaatgactcagctgccatctctgcagttggatcagtctggaaaagcacatctgcaggataatggggagtggctggaacaagctccatgtagcaaacagtctatgccacaagttggcaagctggtctgatgcctgtttttgtaggtaaagttgtactggaatacagccacatctgtttattt

SEQ ID NO: 17899 - DNA, 3027 bp, Homo sapiens
  source 1..3027: mol_type = unassigned DNA
gctgtcagaacgccgcctcctccgcttgcggccggtctgcaccatgctgcgaacgtccgtcctccgcctgctaggacgcacgggggctagtaggctgtctctcctggaggacttcggcccacgctactacagttcgggctccctcagtgccggcgatgatgcttgtgatgtgcgcgcctacttcactacacccattttctacgtgaacgcggcgccgcacatcgggcacctgtactcggcactactggcggacgccctatgccgccaccgtcgcctccgaggtcccagcacggccgccacgcgattctccactggtaccgacgagcacgggctgaagattcagcaggcagcagctaccgcgggcctggccccgaccgagctgtgcgaccgagtctctgagcagttccagcagcttttccaggaggccggtatctcctgcacagatttcatccgcaccacggaggcccggcaccgggtggctgtgcagcacttctggggggtgcttaagtcccgcggtctgctctacaagggcgtctatgaaggttggtattgcgcttccgacgagtgcttcctgcctgaggccaaggtcacccagcagccgggcccatcgggggattcgtttcctgtatctctcgagagcgggcatccagtctcctggaccaaggaagaaaactacattttcaggctttcccagttccggaagccactccagcggtggctgcggggcaaccctcaggcgatcacccccgaaccatttcatcacgtagttcttcagtggctggacgaggagctgcccgacctgtccgtgtctcgcagaagtagccacttgcactggggcattccggtgcccggggatgattcgcagaccatctatgtatggctggatgccctggtcaactacctcactgtaattggctacccaaatgctgagttcaaatcttggtggccggccacctctcatatcataggtaaggacattctcaaattccatgccatctattggcctgccttcctgttaggggccggcatgagcccgccacagcgcatctgtgtccattcccactggacagtctgtggccaaaagatgtccaagagcttgggcaacgtggtggatcctaggacttgccttaaccgctataccgtggatggcttccgctactttctccttcggcagggcgtccccaactgggactgtgactactatgatgaaaaggtggttaagttgctgaactccgagctggcagatgccttgggaggtctcttgaaccgatgcactgccaaaagaataaatccttctgagacctacccagccttctgcactacctgcttccctagtgagccagggttggtggggccgtcagttcgtgctcaggcagaggattatgctctggtgagcgcagtggccactttgccaaagcaggtagcagaccactatgataactttcggatatataaggctctggaggccgtgtccagctgtgtccggcaaactaatggttttgtccaaaggcatgcaccatggaagctgaactgggagagcccagtggatgctccctggctgggtactgtgcttcatgtggccttggaatgtttgcgagtctttgggactttgctgcagcctgtcaccccaagcctagctgacaagctgctgtctaggctgggggtctctgcctcagagaggagtcttggagagctctatttcttgcctcgattctatggacatccatgcccttttgaagggaggaggctgggacctgaaactgggcttttgtttccaagactagaccagtccaggacttggctggtgaaagcccaccggacctagaaactcagttcttaccggcttgtggtaaaaaagcaaatgtgttatctttttattttttattttcaggaaagttatactagtattttcttaagtgtggaatcaaatgagcacataagctgtgtccctgtgaaaagaggtttgtagcctttcaggtgcctgctcctattcatttctctgtgaccattgatcactgtcctttgtgcattgtgtgtctaagatgtcttcaggggaaagatgggtaagagacagtgttgctaatgctgttccttctttgtgcctccttccaaaccacagttatttgcccaaactacctctcgtggctggtttttcattggcctggcctctgcttctcaggctaattagtgactcctttctttgagggtcagggttggaggccccttactggtggttttacagggggatcctactttgttacacatgttgggtttcctgataaaaagagagtattttattaaacccttgaaccagtgtcctagaccagatgatttttgcccatgtgtatccccatttaaattcctacaactaagtctccctgctttgttaatagtccaacagttgggttgtgtaacatcacacttcaaccggtagatggctctaatctcacacatttacttactaaagattgaggattcggaatatttagaataaattagttttctgctttctaattttgcagatctttacatttttattgcttttcttaaaataagggatagctttgcaaccactattgttttaatggaaagcaaaaaacccccccaaacttatcagaatcctcgttctttttcagactactgaaaaatgacatttactctgttaaatgtttaataagtgaataagtaaatgtatcaagttgtttatataataaattataaaactcttgaggcacttggtatgttaaaaattttaaactttagtaacattaggttacaggtatgatttaaaaatttgtaaatagttcaaaagggcaatgttttctttatatttcttatagtcttaattttgttatccatgtgcataatttacctcatgatttcttttggtcaatcaggatctttaatacaatatagaaattgtgtaatagttattataaatgttaatacacaactttcaggtaattttaactgattatttcttttgctcttttaacttaagttattaaagtttaaaagttcgtaagt

SEQ ID NO: 17900 - DNA, 1915 bp, Homo sapiens
  source 1..1915: mol_type = unassigned DNA
gaacgccgcctcctccgcttgcggccggtctgcaccatgctgcgaacgtccgtcctccgcctgctaggacgcacgggggctagtaggctgtctctcctggaggacttcggcccacgctactacagttcgggctccctcagtgccggcgatgatgcttgtgatgtgcgcgcctacttcactacacccattttctacgtgaacgcggcgccgcacatcgggcacctgtactcggcactactggcggacgccctatgccgccaccgtcgcctccgaggtcccagcacggccgccacgcgattctccactggtaccgacgagcacgggctgaagattcagcaggcagcagctaccgcgggcctggccccgaccgagctgtgcgaccgagtctctgagcagttccagcagcttttccaggaggccggtatctcctggaccaaggaagaaaactacattttcaggctttcccagttccggaagccactccagcggtggctgcggggcaaccctcaggcgatcacccccgaaccatttcatcacgtagttcttcagtggctggacgaggagctgcccgacctgtccgtgtctcgcagaagtagccacttgcactggggcattccggtgcccggggatgattcgcagaccatctatgtatggctggatgccctggtcaactacctcactgtaattggctacccaaatgctgagttcaaatcttggtggccggccacctctcatatcataggtaaggacattctcaaattccatgccatctattggcctgccttcctgttaggggccggcatgagcccgccacagcgcatctgtgtccattcccactggacagtctgtggccaaaagatgtccaagagcttgggcaacgtggtggatcctaggacttgccttaaccgctataccgtggatggcttccgctactttctccttcggcagggcgtccccaactgggactgtgactactatgatgaaaaggtggttaagttgctgaactccgagctggcagatgccttgggaggtctcttgaaccgatgcactgccaaaagaataaatccttctgagacctacccagccttctgcactacctgcttccctagtgagccagggttggtggggccgtcagttcgtgctcaggcagaggattatgctctggtgagcgcagtggccactttgccaaagcaggtagcagaccactatgataactttcggatatataaggctctggaggccgtgtccagctgtgtccggcaaactaatggttttgtccaaaggcatgcaccatggaagctgaactgggagagcccagtggatgctccctggctgggtactgtgcttcatgtggccttggaatgtttgcgagtctttgggactttgctgcagcctgtcaccccaagcctagctgacaagctgctgtctaggctgggggtctctgcctcagagaggagtcttggagagctctatttcttgcctcgattctatggacatccatgcccttttgaagggaggaggctgggacctgaaactgggcttttgtttccaagactagaccagtccaggacttggctggtgaaagcccaccggacctagaaactcagttcttaccggcttgtggtaaaaaagcaaatgtgttatctttttattttttattttcaggaaagttatactagtattttcttaagtgtggaatcaaatgagcacataagctgtgtccctgtgaaaagaggtttgtagcctttcaggtgcctgctcctattcatttctctgtgaccattgatcactgtcctttgtgcattgtgtgtctaagatgtcttcaggggaaagatgggtaagagacagtgttgctaatgctgttccttctttgtgcctccttccaaaccacagttatttgcccaaactacctctc

SEQ ID NO: 17901 - DNA, 10505 bp, Homo sapiens
  source 1..10505: mol_type = unassigned DNA
gcgcgacgtcggccgtgcggggtcccggcgtcggcggcgcgcgcgctccctcctctcggagagagggctgtggtaaaagccgtccggaaaatggccgccgccgccgccgccgcgccgagcggaggaggaggaggaggcgaggaggagagactgctccataaaaatacagactcaccagttcctgctttgatgtgacatgtgactccccagaatacaccttgcttctgtagaccagctccaacaggattccatggtagctgggatgttagggctcagggaagaaaagtcagaagaccaggacctccagggcctcaaggacaaacccctcaagtttaaaaaggtgaagaaagataagaaagaagagaaagagggcaagcatgagcccgtgcagccatcagcccaccactctgctgagcccgcagaggcaggcaaagcagagacatcagaagggtcaggctccgccccggctgtgccggaagcttctgcctcccccaaacagcggcgctccatcatccgtgaccggggacccatgtatgatgaccccaccctgcctgaaggctggacacggaagcttaagcaaaggaaatctggccgctctgctgggaagtatgatgtgtatttgatcaatccccagggaaaagcctttcgctctaaagtggagttgattgcgtacttcgaaaaggtaggcgacacatccctggaccctaatgattttgacttcacggtaactgggagagggagcccctcccggcgagagcagaaaccacctaagaagcccaaatctcccaaagctccaggaactggcagaggccggggacgccccaaagggagcggcaccacgagacccaaggcggccacgtcagagggtgtgcaggtgaaaagggtcctggagaaaagtcctgggaagctccttgtcaagatgccttttcaaacttcgccagggggcaaggctgaggggggtggggccaccacatccacccaggtcatggtgatcaaacgccccggcaggaagcgaaaagctgaggccgaccctcaggccattcccaagaaacggggccgaaagccggggagtgtggtggcagccgctgccgccgaggccaaaaagaaagccgtgaaggagtcttctatccgatctgtgcaggagaccgtactccccatcaagaagcgcaagacccgggagacggtcagcatcgaggtcaaggaagtggtgaagcccctgctggtgtccaccctcggtgagaagagcgggaaaggactgaagacctgtaagagccctgggcggaaaagcaaggagagcagccccaaggggcgcagcagcagcgcctcctcaccccccaagaaggagcaccaccaccatcaccaccactcagagtccccaaaggcccccgtgccactgctcccacccctgcccccacctccacctgagcccgagagctccgaggaccccaccagcccccctgagccccaggacttgagcagcagcgtctgcaaagaggagaagatgcccagaggaggctcactggagagcgacggctgccccaaggagccagctaagactcagcccgcggttgccaccgccgccacggccgcagaaaagtacaaacaccgaggggagggagagcgcaaagacattgtttcatcctccatgccaaggccaaacagagaggagcctgtggacagccggacgcccgtgaccgagagagttagctgactttacacggagcggattgcaaagcaaaccaacaagaataaaggcagctgttgtctcttctccttatgggtagggctctgacaaagcttcccgattaactgaaataaaaaatatttttttttctttcagtaaacttagagtttcgtggcttcagggtgggagtagttggagcattggggatgtttttcttaccgacaagcacagtcaggttgaagacctaaccagggccagaagtagctttgcacttttctaaactaggctccttcaacaaggcttgctgcagatactactgaccagacaagctgttgaccaggcacctcccctcccgcccaaacctttcccccatgtggtcgttagagacagagcgacagagcagttgagaggacactcccgttttcggtgccatcagtgccccgtctacagctcccccagctccccccacctcccccactcccaaccacgttgggacagggaggtgtgaggcaggagagacagttggattctttagagaagatggatatgaccagtggctatggcctgtgcgatcccacccgtggtggctcaagtctggccccacaccagccccaatccaaaactggcaaggacgcttcacaggacaggaaagtggcacctgtctgctccagctctggcatggctaggaggggggagtcccttgaactactgggtgtagactggcctgaaccacaggagaggatggcccagggtgaggtggcatggtccattctcaagggacgtcctccaacgggtggcgctagaggccatggaggcagtaggacaaggtgcaggcaggctggcctggggtcaggccgggcagagcacagcggggtgagagggattcctaatcactcagagcagtctgtgacttagtggacaggggagggggcaaagggggaggagaagaaaatgttcttccagttactttccaattctcctttagggacagcttagaattatttgcactattgagtcttcatgttcccacttcaaaacaaacagatgctctgagagcaaactggcttgaattggtgacatttagtccctcaagccaccagatgtgacagtgttgagaactacctggatttgtatatatacctgcgcttgttttaaagtgggctcagcacatagggttcccacgaagctccgaaactctaagtgtttgctgcaattttataaggacttcctgattggtttctcttctccccttccatttctgccttttgttcatttcatcctttcacttctttcccttcctccatcctcctccttcctagttcatcccttctcttccaggcagccgcggtgcccaaccacacttgtcggctccagtccccagaactctgcctgccctttgtcctcctgctgccagtaccagccccaccctgttttgagccctgaggaggccttgggctctgctgagtccgacctggcctgtctgtgaagagcaagagagcagcaaggtcttgctctcctaggtagccccctcttccctggtaagaaaaagcaaaaggcatttcccaccctgaacaacgagccttttcacccttctactctagagaagtggactggaggagctgggcccgatttggtagttgaggaaagcacagaggcctcctgtggcctgccagtcatcgagtggcccaacaggggctccatgccagccgaccttgacctcactcagaagtccagagtctagcgtagtgcagcagggcagtagcggtaccaatgcagaactcccaagacccgagctgggaccagtacctgggtccccagcccttcctctgctcccccttttccctcggagttcttcttgaatggcaatgttttgcttttgctcgatgcagacagggggccagaacaccacacatttcactgtctgtctggtccatagctgtggtgtaggggcttagaggcatgggcttgctgtgggtttttaattgatcagttttcatgtgggatcccatctttttaacctctgttcaggaagtccttatctagctgcatatcttcatcatattggtatatccttttctgtgtttacagagatgtctcttatatctaaatctgtccaactgagaagtaccttatcaaagtagcaaatgagacagcagtcttatgcttccagaaacacccacaggcatgtcccatgtgagctgctgccatgaactgtcaagtgtgtgttgtcttgtgtatttcagttattgtccctggcttccttactatggtgtaatcatgaaggagtgaaacatcatagaaactgtctagcacttccttgccagtctttagtgatcaggaaccatagttgacagttccaatcagtagcttaagaaaaaaccgtgtttgtctcttctggaatggttagaagtgagggagtttgccccgttctgtttgtagagtctcatagttggactttctagcatatatgtgtccatttccttatgctgtaaaagcaagtcctgcaaccaaactcccatcagcccaatccctgatccctgatcccttccacctgctctgctgatgacccccccagcttcacttctgactcttccccaggaagggaaggggggtcagaagagagggtgagtcctccagaactcttcctccaaggacagaaggctcctgcccccatagtggcctcgaactcctggcactaccaaaggacacttatccacgagagcgcagcatccgaccaggttgtcactgagaagatgtttattttggtcagttgggtttttatgtattatacttagtcaaatgtaatgtggcttctggaatcattgtccagagctgcttccccgtcacctgggcgtcatctggtcctggtaagaggagtgcgtggcccaccaggcccccctgtcacccatgacagttcattcagggccgatggggcagtcgtggttgggaacacagcatttcaagcgtcactttatttcattcgggccccacctgcagctccctcaaagaggcagttgcccagcctctttcccttccagtttattccagagctgccagtggggcctgaggctccttagggttttctctctatttccccctttcttcctcattccctcgtctttcccaaaggcatcacgagtcagtcgcctttcagcaggcagccttggcggtttatcgccctggcaggcaggggccctgcagctctcatgctgcccctgccttggggtcaggttgacaggaggttggagggaaagccttaagctgcaggattctcaccagctgtgtccggcccagttttggggtgtgacctcaatttcaattttgtctgtacttgaacattatgaagatgggggcctctttcagtgaatttgtgaacagcagaattgaccgacagctttccagtacccatggggctaggtcattaaggccacatccacagtctcccccacccttgttccagttgttagttactacctcctctcctgacaatactgtatgtcgtcgagctccccccaggtctacccctcccggccctgcctgctggtgggcttgtcatagccagtgggattgccggtcttgacagctcagtgagctggagatacttggtcacagccaggcgctagcacagctcccttctgttgatgctgtattcccatatcaaaagacacaggggacacccagaaacgccacatcccccaatccatcagtgccaaactagccaacggccccagcttctcagctcgctggatggcggaagctgctactcgtgagcgccagtgcgggtgcagacaatcttctgttgggtggcatcattccaggcccgaagcatgaacagtgcacctgggacagggagcagccccaaattgtcacctgcttctctgcccagcttttcattgctgtgacagtgatggcgaaagagggtaataaccagacacaaactgccaagttgggtggagaaaggagtttctttagctgacagaatctctgaattttaaatcacttagtaagcggctcaagcccaggagggagcagagggatacgagcggagtcccctgcgcgggaccatctggaattggtttagcccaagtggagcctgacagccagaactctgtgtcccccgtctaaccacagctccttttccagagcattccagtcaggctctctgggctgactgggccaggggaggttacaggtaccagttctttaagaagatctttgggcatatacatttttagcctgtgtcattgccccaaatggattcctgtttcaagttcacacctgcagattctaggacctgtgtcctagacttcagggagtcagctgtttctagagttcctaccatggagtgggtctggaggacctgcccggtgggggggcagagccctgctccctccgggtcttcctactcttctctctgctctgacgggatttgttgattctctccattttggtgtctttctcttttagatattgtatcaatctttagaaaaggcatagtctacttgttataaatcgttaggatactgcctcccccagggtctaaaattacatattagaggggaaaagctgaacactgaagtcagttctcaacaatttagaaggaaaacctagaaaacatttggcagaaaattacatttcgatgtttttgaatgaatacgagcaagcttttacaacagtgctgatctaaaaatacttagcacttggcctgagatgcctggtgagcattacaggcaaggggaatctggaggtagccgacctgaggacatggcttctgaacctgtcttttgggagtggtatggaaggtggagcgttcaccagtgacctggaaggcccagcaccaccctccttcccactcttctcatcttgacagagcctgccccagcgctgacgtgtcaggaaaacacccagggaactaggaaggcacttctgcctgaggggcagcctgccttgcccactcctgctctgctcgcctcggatcagctgagccttctgagctggcctctcactgcctccccaaggccccctgcctgccctgtcaggaggcagaaggaagcaggtgtgagggcagtgcaaggagggagcacaacccccagctcccgctccgggctccgacttgtgcacaggcagagcccagaccctggaggaaatcctacctttgaattcaagaacatttggggaatttggaaatctctttgcccccaaacccccattctgtcctacctttaatcaggtcctgctcagcagtgagagcagatgaggtgaaaaggccaagaggtttggctcctgcccactgatagcccctctccccgcagtgtttgtgtgtcaagtggcaaagctgttcttcctggtgaccctgattatatccagtaacacatagactgtgcgcataggcctgctttgtctcctctatcctgggcttttgttttgctttttagttttgcttttagtttttctgtcccttttatttaacgcaccgactagacacacaaagcagttgaatttttatatatatatctgtatattgcacaattataaactcattttgcttgtggctccacacacacaaaaaaagacctgttaaaattatacctgttgcttaattacaatatttctgataaccatagcataggacaagggaaaataaaaaaagaaaaaaaagaaaaaaaaacgacaaatctgtctgctggtcacttcttctgtccaagcagattcgtggtcttttcctcgcttctttcaagggctttcctgtgccaggtgaaggaggctccaggcagcacccaggttttgcactcttgtttctcccgtgcttgtgaaagaggtcccaaggttctgggtgcaggagcgctcccttgacctgctgaagtccggaacgtagtcggcacagcctggtcgccttccacctctgggagctggagtccactggggtggcctgactcccccagtccccttcccgtgacctggtcagggtgagcccatgtggagtcagcctcgcaggcctccctgccagtagggtccgagtgtgtttcatccttcccactctgtcgagcctgggggctggagcggagacgggaggcctggcctgtctcggaacctgtgagctgcaccaggtagaacgccagggaccccagaatcatgtgcgtcagtccaaggggtcccctccaggagtagtgaagactccagaaatgtccctttcttctcccccatcctacgagtaattgcatttgcttttgtaattcttaatgagcaatatctgctagagagtttagctgtaacagttctttttgatcatctttttttaataattagaaacaccaaaaaaatccagaaacttgttcttccaaagcagagagcattataatcaccagggccaaaagcttccctccctgctgtcattgcttcttctgaggcctgaatccaaaagaaaaacagccataggccctttcagtggccgggctacccgtgagcccttcggaggaccagggctggggcagcctctgggcccacatccggggccagctccggcgtgtgttcagtgttagcagtgggtcatgatgctctttcccacccagcctgggataggggcagaggaggcgaggaggccgttgccgctgatgtttggccgtgaacaggtgggtgtctgcgtgcgtccacgtgcgtgttttctgactgacatgaaatcgacgcccgagttagcctcacccggtgacctctagccctgcccggatggagcggggcccacccggttcagtgtttctggggagctggacagtggagtgcaaaaggcttgcagaacttgaagcctgctccttcccttgctaccacggcctcctttccgtttgatttgtcactgcttcaatcaataacagccgctccagagtcagtagtcaatgaatatatgaccaaatatcaccaggactgttactcaatgtgtgccgagcccttgcccatgctgggctcccgtgtatctggacactgtaacgtgtgctgtgtttgctccccttccccttccttctttgccctttacttgtctttctggggtttttctgtttgggtttggtttggtttttatttctccttttgtgttccaaacatgaggttctctctactggtcctcttaactgtggtgttgaggcttatatttgtgtaatttttggtgggtgaaaggaattttgctaagtaaatctcttctgtgtttgaactgaagtctgtattgtaactatgtttaaagtaattgttccagagacaaatatttctagacactttttctttacaaacaaaagcattcggagggagggggatggtgactgagatgagaggggagagctgaacagatgacccctgcccagatcagccagaagccacccaaagcagtggagcccaggagtcccactccaagccagcaagccgaatagctgatgtgttgccactttccaagtcactgcaaaaccaggttttgttccgcccagtggattcttgttttgcttcccctccccccgagattattaccaccatcccgtgcttttaaggaaaggcaagattgatgtttccttgaggggagccaggaggggatgtgtgtgtgcagagctgaagagctggggagaatggggctgggcccacccaagcaggaggctgggacgctctgctgtgggcacaggtcaggctaatgttggcagatgcagctcttcctggacaggccaggtggtgggcattctctctccaaggtgtgccccgtgggcattactgtttaagacacttccgtcacatcccaccccatcctccagggctcaacactgtgacatctctattccccaccctccccttcccagggcaataaaatgaccatggagggggcttgcactctcttggctgtcacccgatcgccagcaaaacttagatgtgagaaaaccccttcccattccatggcgaaaacatctccttagaaaagccattaccctcattaggcatggttttgggctcccaaaacacctgacagcccctccctcctctgagaggcggagagtgctgactgtagtgaccattgcatgccgggtgcagcatctggaagagctaggcagggtgtctgccccctcctgagttgaagtcatgctcccctgtgccagcccagaggccgagagctatggacagcattgccagtaacacaggccaccctgtgcagaagggagctggctccagcctggaaacctgtctgaggttgggagaggtgcacttggggcacagggagaggccgggacacacttagctggagatgtctctaaaagccctgtatcgtattcaccttcagtttttgtgttttgggacaattactttagaaaataagtaggtcgttttaaaaacaaaaattattgattgcttttttgtagtgttcagaaaaaaggttctttgtgtatagccaaatgactgaaagcactgatatatttaaaaacaaaaggcaatttattaaggaaatttgtaccatttcagtaaacctgtctgaatgtacctgtatacgtttcaaaaacaccccccccccactgaatccctgtaacctatttattatataaagagtttgccttataaatttacataaaaatgtccgtttgtgtcttttgttgtaaaaatcaagtgattttttcataaggttcttttactattggaaaagatgggcagcacgcagttttattttatttttgtaagttttttaatacatgtgaaagcaaagaatactcagcatgcctttctaagtgacgcgtttgcaccttttgttgggaagtactgtatcctgtgctgttagcattctcgataaatctctctgtgaaagtga

SEQ ID NO: 17902 - DNA, 1052 bp, Homo sapiens
  source 1..1052: mol_type = unassigned DNA
atggtagctgggatgttagggctcagggaagaaaagtcagaagaccaggacctccagggcctcaaggacaaacccctcaagtttaaaaaggtgaagaaagataagaaagaagagaaagagggcaagcatgagcccgtgcagccatcagcccaccactctgctgagcccgcagaggcaggcaaagcagagacatcagaagggtcaggctccgccccggctgtgccggaagcttctgcctcccccaaacagcggcgctccatcatccgtgaccggggacccatgtatgatgaccccaccctgcctgaaggctggacacggaagcttaagcaaaggaaatctggccgctctgctgggaagtatgatgtgtatttgatcaatccccagggaaaagcctttcgctctaaagtggagttgattgcgtacttcgaaaaggtaggcgacacatccctggaccctaatgattttgacttcacggtaactgggagagggagcccctcccggcgagagcagaaaccacctaagaagcccaaatctcccaaagctccaggaactggcagaggccggggacgccccaaagggagcggcaccacgagacccaaggcggccacgtcagagggtgtgcaggtgaaaagggtcctggagaaaagtcctgggaagctccttgtcaagatgccttttcaaacttcgccagggggcaaggctgaggggggtggggccaccacatccacccaggtcatggtgatcaaacgccccggcaggaagcgaagcccgagagctccgaggaccccaccagcccccctgagccccaggacttgagcagcagcgtctgcaaagaggagaagatgcccagaggaggctcactggagagcgacggctgccccaaggagccagctaagactcagcccgcggttgccaccgccgccacggccgcagaaaagtacaaacaccgaggggagggagagcgcaaagacattgtttcatcctccatgccaaggccaaacagagaggagcctgtggacagccggacgcccgtgaccgagagagttagctga

SEQ ID NO: 17903 - DNA, 414 bp, Homo sapiens
  source 1..414: mol_type = unassigned DNA
gcaggaacaagtaggtggggattattatccacaaaagggactagacattgtgttctgggtcccacaactcatcataaagaggtggttatagttcccatcaggagccgtgggtaggggactgtgcgtccagcagcacccgaggctcttcggcgccagaggctctaaggctccataaaaatacagactcaccagttcctgctttgatgtgacatgtgactccccagaatacaccttgcttctgtagaccagctccaacaggattccatggtagctgggatgttagggctcagggaagaaaagtcagaagaccaggacctccagggcctcaaggacaaacccctcaagtttaaaaaggtgaagaaagataagaaagaagagaaagagggcaagcatgagcccgtgcagccatcagcc

SEQ ID NO: 17904 - DNA, 1685 bp, Homo sapiens
  source 1..1685: mol_type = unassigned DNA
ggcgcgcgcgctccctcctctcggagagagggctgtggtaaaagccgtccggaaaatggccgccgccgccgccgccgcgccgagcggaggaggaggaggaggcgaggaggagagactggaagaaaagtcagaagaccaggacctccagggcctcaaggacaaacccctcaagtttaaaaaggtgaagaaagataagaaagaagagaaagagggcaagcatgagcccgtgcagccatcagcccaccactctgctgagcccgcagaggcaggcaaagcagagacatcagaagggtcaggctccgccccggctgtgccggaagcttctgcctcccccaaacagcggcgctccatcatccgtgaccggggacccatgtatgatgaccccaccctgcctgaaggctggacacggaagcttaagcaaaggaaatctggccgctctgctgggaagtatgatgtgtatttgatcaatccccagggaaaagcctttcgctctaaagtggagttgattgcgtacttcgaaaaggtaggcgacacatccctggaccctaatgattttgacttcacggtaactgggagagggagcccctcccggcgagagcagaaaccacctaagaagcccaaatctcccaaagctccaggaactggcagaggccggggacgccccaaagggagcggcaccacgagacccaaggcggccacgtcagagggtgtgcaggtgaaaagggtcctggagaaaagtcctgggaagctccttgtcaagatgccttttcaaacttcgccagggggcaaggctgaggggggtggggccaccacatccacccaggtcatggtgatcaaacgccccggcaggaagcgaaaagctgaggccgaccctcaggccattcccaagaaacggggccgaaagccggggagtgtggtggcagccgctgccgccgaggccaaaaagaaagccgtgaaggagtcttctatccgatctgtgcaggagaccgtactccccatcaagaagcgcaagacccgggagacggtcagcatcgaggtcaaggaagtggtgaagcccctgctggtgtccaccctcggtgagaagagcgggaaaggactgaagacctgtaagagccctgggcggaaaagcaaggagagcagccccaaggggcgcagcagcagcgcctcctcaccccccaagaaggagcaccaccaccatcaccaccactcagagtccccaaaggcccccgtgccactgctcccacccctgcccccacctccacctgagcccgagagctccgaggaccccaccagcccccctgagccccaggacttgagcagcagcgtctgcaaagaggagaagatgcccagaggaggctcactggagagcgacggctgccccaaggagccagctaagactcagcccgcggttgccaccgccgccacggccgcagaaaagtacaaacaccgaggggagggagagcgcaaagacattgtttcatcctccatgccaaggccaaacagagaggagcctgtggacagccggacgcccgtgaccgagagagttagctgactttacacggagcggattgcaaagcaaaccaacaagaataaaggcagctgttgtctcttctccttatgggtagggctctgacaaagcttcccgattaactgaaataaaaaatatttttttttctttcagtaaa

SEQ ID NO: 17905 - DNA, 9892 bp, Homo sapiens
  source 1..9892: mol_type = unassigned DNA
ccggcgtcggcggcgcgcgcgctccctcctctcggagagagggctgtggtaaaagccgtccggaaaatggccgccgccgccgccgccgcgccgagcggaggaggaggaggaggcgaggaggagagactgctccataaaaatacagactcaccagttcctgctttgatgtgacatgtgactccccagaatacaccttgcttctgtagaccagctccaacaggattccatggtagctgggatgttagggctcagggaagaaaagtcagaagaccaggacctccagggcctcaaggacaaacccctcaagtttaaaaaggtgaagaaagataagaaagaagagaaagagggcaagcatgagcccgtgcagccatcagcccaccactctgctgagcccgcagaggcaggcaaagcagagacatcagaagggtcaggctccgccccggctgtgccggaagcttctgcctcccccaaacagcggcgctccatcatccgtgaccggggacccatgtatgatgaccccaccctgcctgaaggctggacacggaagcttaagcaaaggaaatctggccgctctgctgggaagtatgatgtgtatttgatcaatccccagggaaaagcctttcgctctaaagtggagttgattgcgtacttcgaaaaggtaggcgacacatccctggaccctaatgattttgacttcacggtaactgggagagggagcccctcccggcgagagcagaaaccacctaagaagcccaaatctcccaaagctccaggaactggcagaggccggggacgccccaaagggagcggcaccacgagacccaaggcggccacgtcagagggtgtgcaggtgaaaagggtcctggagaaaagtcctgggaagctccttgtcaagatgccttttcaaacttcgccagggggcaaggctgaggggggtggggccaccacatccacccaggtcatggtgatcaaacgccccggcaggaagcgaaaagctgaggccgaccctcaggccattcccaagaaacggggccgaaagccggggagtgtggtggcagccgctgccgccgaggccaaaaagaaagccgtgaaggagtcttctatccgatctgtgcaggagaccgtactccccatcaagaagcgcaagacccgggagacggtcagcatcgaggtcaaggaagtggtgaagcccctgctggtgtccaccctcggtgagaagagcgggaaaggactgaagacctgtaagagccctgggcggaaaagcaaggagagcagccccaaggggcgcagcagcagcgcctcctcaccccccaagaaggagcaccaccaccatcaccaccactcagagtccccaaaggcccccgtaccaacaagaataaaggcagctgttgtctcttctccttatgggtagggctctgacaaagcttcccgattaactgaaataaaaaatatttttttttctttcagtaaacttagagtttcgtggcttcagggtgggagtagttggagcattggggatgtttttcttaccgacaagcacagtcaggttgaagacctaaccagggccagaagtagctttgcacttttctaaactaggctccttcaacaaggcttgctgcagatactactgaccagacaagctgttgaccaggcacctcccctcccgcccaaacctttcccccatgtggtcgttagagacagagcgacagagcagttgagaggacactcccgttttcggtgccatcagtgccccgtctacagctcccccagctccccccacctcccccactcccaaccacgttgggacagggaggtgtgaggcaggagagacagttggattctttagagaagatggatatgaccagtggctatggcctgtgcgatcccacccgtggtggctcaagtctggccccacaccagccccaatccaaaactggcaaggacgcttcacaggacaggaaagtggcacctgtctgctccagctctggcatggctaggaggggggagtcccttgaactactgggtgtagactggcctgaaccacaggagaggatggcccagggtgaggtggcatggtccattctcaagggacgtcctccaacgggtggcgctagaggccatggaggcagtaggacaaggtgcaggcaggctggcctggggtcaggccgggcagagcacagcggggtgagagggattcctaatcactcagagcagtctgtgacttagtggacaggggagggggcaaagggggaggagaagaaaatgttcttccagttactttccaattctcctttagggacagcttagaattatttgcactattgagtcttcatgttcccacttcaaaacaaacagatgctctgagagcaaactggcttgaattggtgacatttagtccctcaagccaccagatgtgacagtgttgagaactacctggatttgtatatatacctgcgcttgttttaaagtgggctcagcacatagggttcccacgaagctccgaaactctaagtgtttgctgcaattttataaggacttcctgattggtttctcttctccccttccatttctgccttttgttcatttcatcctttcacttctttcccttcctccatcctcctccttcctagttcatcccttctcttccaggcagccgcggtgcccaaccacacttgtcggctccagtccccagaactctgcctgccctttgtcctcctgctgccagtaccagccccaccctgttttgagccctgaggaggccttgggctctgctgagtccgacctggcctgtctgtgaagagcaagagagcagcaaggtcttgctctcctaggtagccccctcttccctggtaagaaaaagcaaaaggcatttcccaccctgaacaacgagccttttcacccttctactctagagaagtggactggaggagctgggcccgatttggtagttgaggaaagcacagaggcctcctgtggcctgccagtcatcgagtggcccaacaggggctccatgccagccgaccttgacctcactcagaagtccagagtctagcgtagtgcagcagggcagtagcggtaccaatgcagaactcccaagacccgagctgggaccagtacctgggtccccagcccttcctctgctcccccttttccctcggagttcttcttgaatggcaatgttttgcttttgctcgatgcagacagggggccagaacaccacacatttcactgtctgtctggtccatagctgtggtgtaggggcttagaggcatgggcttgctgtgggtttttaattgatcagttttcatgtgggatcccatctttttaacctctgttcaggaagtccttatctagctgcatatcttcatcatattggtatatccttttctgtgtttacagagatgtctcttatatctaaatctgtccaactgagaagtaccttatcaaagtagcaaatgagacagcagtcttatgcttccagaaacacccacaggcatgtcccatgtgagctgctgccatgaactgtcaagtgtgtgttgtcttgtgtatttcagttattgtccctggcttccttactatggtgtaatcatgaaggagtgaaacatcatagaaactgtctagcacttccttgccagtctttagtgatcaggaaccatagttgacagttccaatcagtagcttaagaaaaaaccgtgtttgtctcttctggaatggttagaagtgagggagtttgccccgttctgtttgtagagtctcatagttggactttctagcatatatgtgtccatttccttatgctgtaaaagcaagtcctgcaaccaaactcccatcagcccaatccctgatccctgatcccttccacctgctctgctgatgacccccccagcttcacttctgactcttccccaggaagggaaggggggtcagaagagagggtgagtcctccagaactcttcctccaaggacagaaggctcctgcccccatagtggcctcgaactcctggcactaccaaaggacacttatccacgagagcgcagcatccgaccaggttgtcactgagaagatgtttattttggtcagttgggtttttatgtattatacttagtcaaatgtaatgtggcttctggaatcattgtccagagctgcttccccgtcacctgggcgtcatctggtcctggtaagaggagtgcgtggcccaccaggcccccctgtcacccatgacagttcattcagggccgatggggcagtcgtggttgggaacacagcatttcaagcgtcactttatttcattcgggccccacctgcagctccctcaaagaggcagttgcccagcctctttcccttccagtttattccagagctgccagtggggcctgaggctccttagggttttctctctatttccccctttcttcctcattccctcgtctttcccaaaggcatcacgagtcagtcgcctttcagcaggcagccttggcggtttatcgccctggcaggcaggggccctgcagctctcatgctgcccctgccttggggtcaggttgacaggaggttggagggaaagccttaagctgcaggattctcaccagctgtgtccggcccagttttggggtgtgacctcaatttcaattttgtctgtacttgaacattatgaagatgggggcctctttcagtgaatttgtgaacagcagaattgaccgacagctttccagtacccatggggctaggtcattaaggccacatccacagtctcccccacccttgttccagttgttagttactacctcctctcctgacaatactgtatgtcgtcgagctccccccaggtctacccctcccggccctgcctgctggtgggcttgtcatagccagtgggattgccggtcttgacagctcagtgagctggagatacttggtcacagccaggcgctagcacagctcccttctgttgatgctgtattcccatatcaaaagacacaggggacacccagaaacgccacatcccccaatccatcagtgccaaactagccaacggccccagcttctcagctcgctggatggcggaagctgctactcgtgagcgccagtgcgggtgcagacaatcttctgttgggtggcatcattccaggcccgaagcatgaacagtgcacctgggacagggagcagccccaaattgtcacctgcttctctgcccagcttttcattgctgtgacagtgatggcgaaagagggtaataaccagacacaaactgccaagttgggtggagaaaggagtttctttagctgacagaatctctgaattttaaatcacttagtaagcggctcaagcccaggagggagcagagggatacgagcggagtcccctgcgcgggaccatctggaattggtttagcccaagtggagcctgacagccagaactctgtgtcccccgtctaaccacagctccttttccagagcattccagtcaggctctctgggctgactgggccaggggaggttacaggtaccagttctttaagaagatctttgggcatatacatttttagcctgtgtcattgccccaaatggattcctgtttcaagttcacacctgcagattctaggacctgtgtcctagacttcagggagtcagctgtttctagagttcctaccatggagtgggtctggaggacctgcccggtgggggggcagagccctgctccctccgggtcttcctactcttctctctgctctgacgggatttgttgattctctccattttggtgtctttctcttttagatattgtatcaatctttagaaaaggcatagtctacttgttataaatcgttaggatactgcctcccccagggtctaaaattacatattagaggggaaaagctgaacactgaagtcagttctcaacaatttagaaggaaaacctagaaaacatttggcagaaaattacatttcgatgtttttgaatgaatacgagcaagcttttacaacagtgctgatctaaaaatacttagcacttggcctgagatgcctggtgagcattacaggcaaggggaatctggaggtagccgacctgaggacatggcttctgaacctgtcttttgggagtggtatggaaggtggagcgttcaccagtgacctggaaggcccagcaccaccctccttcccactcttctcatcttgacagagcctgccccagcgctgacgtgtcaggaaaacacccagggaactaggaaggcacttctgcctgaggggcagcctgccttgcccactcctgctctgctcgcctcggatcagctgagccttctgagctggcctctcactgcctccccaaggccccctgcctgccctgtcaggaggcagaaggaagcaggtgtgagggcagtgcaaggagggagcacaacccccagctcccgctccgggctccgacttgtgcacaggcagagcccagaccctggaggaaatcctacctttgaattcaagaacatttggggaatttggaaatctctttgcccccaaacccccattctgtcctacctttaatcaggtcctgctcagcagtgagagcagatgaggtgaaaaggccaagaggtttggctcctgcccactgatagcccctctccccgcagtgtttgtgtgtcaagtggcaaagctgttcttcctggtgaccctgattatatccagtaacacatagactgtgcgcataggcctgctttgtctcctctatcctgggcttttgttttgctttttagttttgcttttagtttttctgtcccttttatttaacgcaccgactagacacacaaagcagttgaatttttatatatatatctgtatattgcacaattataaactcattttgcttgtggctccacacacacaaaaaaagacctgttaaaattatacctgttgcttaattacaatatttctgataaccatagcataggacaagggaaaataaaaaaagaaaaaaaagaaaaaaaaacgacaaatctgtctgctggtcacttcttctgtccaagcagattcgtggtcttttcctcgcttctttcaagggctttcctgtgccaggtgaaggaggctccaggcagcacccaggttttgcactcttgtttctcccgtgcttgtgaaagaggtcccaaggttctgggtgcaggagcgctcccttgacctgctgaagtccggaacgtagtcggcacagcctggtcgccttccacctctgggagctggagtccactggggtggcctgactcccccagtccccttcccgtgacctggtcagggtgagcccatgtggagtcagcctcgcaggcctccctgccagtagggtccgagtgtgtttcatccttcccactctgtcgagcctgggggctggagcggagacgggaggcctggcctgtctcggaacctgtgagctgcaccaggtagaacgccagggaccccagaatcatgtgcgtcagtccaaggggtcccctccaggagtagtgaagactccagaaatgtccctttcttctcccccatcctacgagtaattgcatttgcttttgtaattcttaatgagcaatatctgctagagagtttagctgtaacagttctttttgatcatctttttttaataattagaaacaccaaaaaaatccagaaacttgttcttccaaagcagagagcattataatcaccagggccaaaagcttccctccctgctgtcattgcttcttctgaggcctgaatccaaaagaaaaacagccataggccctttcagtggccgggctacccgtgagcccttcggaggaccagggctggggcagcctctgggcccacatccggggccagctccggcgtgtgttcagtgttagcagtgggtcatgatgctctttcccacccagcctgggataggggcagaggaggcgaggaggccgttgccgctgatgtttggccgtgaacaggtgggtgtctgcgtgcgtccacgtgcgtgttttctgactgacatgaaatcgacgcccgagttagcctcacccggtgacctctagccctgcccggatggagcggggcccacccggttcagtgtttctggggagctggacagtggagtgcaaaaggcttgcagaacttgaagcctgctccttcccttgctaccacggcctcctttccgtttgatttgtcactgcttcaatcaataacagccgctccagagtcagtagtcaatgaatatatgaccaaatatcaccaggactgttactcaatgtgtgccgagcccttgcccatgctgggctcccgtgtatctggacactgtaacgtgtgctgtgtttgctccccttccccttccttctttgccctttacttgtctttctggggtttttctgtttgggtttggtttggtttttatttctccttttgtgttccaaacatgaggttctctctactggtcctcttaactgtggtgttgaggcttatatttgtgtaatttttggtgggtgaaaggaattttgctaagtaaatctcttctgtgtttgaactgaagtctgtattgtaactatgtttaaagtaattgttccagagacaaatatttctagacactttttctttacaaacaaaagcattcggagggagggggatggtgactgagatgagaggggagagctgaacagatgacccctgcccagatcagccagaagccacccaaagcagtggagcccaggagtcccactccaagccagcaagccgaatagctgatgtgttgccactttccaagtcactgcaaaaccaggttttgttccgcccagtggattcttgttttgcttcccctccccccgagattattaccaccatcccgtgcttttaaggaaaggcaagattgatgtttccttgaggggagccaggaggggatgtgtgtgtgcagagctgaagagctggggagaatggggctgggcccacccaagcaggaggctgggacgctctgctgtgggcacaggtcaggctaatgttggcagatgcagctcttcctggacaggccaggtggtgggcattctctctccaaggtgtgccccgtgggcattactgtttaagacacttccgtcacatcccaccccatcctccagggctcaacactgtgacatctctattccccaccctccccttcccagggcaataaaatgaccatggagggggcttgcactctcttggctgtcacccgatcgccagcaaaacttagatgtgagaaaaccccttcccattccatggcgaaaacatctccttagaaaagccattaccctcattaggcatggttttgggctcccaaaacacctgacagcccctccctcctctgagaggcggagagtgctgactgtagtgaccattgcatgccgggtgcagcatctggaagagctaggcagggtgtctgccccctcctgagttgaagtcatgctcccctgtgccagcccagaggccgagagctatggacagcattgccagtaacacaggccaccctgtgcagaagggagctggctccagcctggaaacctgtctgaggttgggagaggtgcacttggggcacagggagaggccgggacacacttagctggagatgtctctaaaagccctgtatcgtattcaccttcagtttttgtgttttgggacaattactttagaaaataagtaggtcgttttaaaaacaaaaattattgattgcttttttgtagtgttcagaaaaaaggttctttgtgtatagccaaatgactgaaagcactgatatatttaaaaacaaaaggcaatttattaaggaaatttgtaccatttcagtaaacctgtctgaatgtacctgtatacgtttcaaaaacaccccccccccactgaatccctgtaacctatttattatataaagagtttgccttataaattt

SEQ ID NO: 17906 - DNA, 3259 bp, Homo sapiens
  source 1..3259: mol_type = unassigned DNA
aaagcgcatgcgccagctagatgggcagcgaggagagccgcaactgccagtccctcgaaggggttagctgtcgttgaacgtcagcacgcagatgcaactggctctcggcaggggggcgcgcgcaccgctgcggagcgccggcccgtaggcgcgggagcctccctattaagggcacgcgacatcgaggcaatagtgcgcaggtgcttagccagaggcggagcccgagaggcaggcagcggacttccggttccgggagcaacgaacagccgcggaggcgacagctaccgcttcagaggaggcggccgcggaggaggaggaaggggaggagggcgaggcgggaggtgcaggagggaccctcgccatgggtccacgggcctagagtggcggaagataccggcctggtgccaaactggctactgctgcttcctgtggcctccatggctgaggactggctggactgcccggccctgggccctggctggaagcgccgcgaagtctttcgcaagtcaggggccacctgtggacgctcagacacctattaccagagccccacaggagacaggatccgaagcaaagttgagctgactcgatacctgggccctgcgtgtgatctcaccctcttcgacttcaaacaaggcatcttgtgctatccagcccccaaggcccatcccgtggcggttgccagcaagaagcgaaagaagccttcaaggccagccaagactcggaaacgtcaggttggaccccagagtggtgaggtcaggaaggaggccccgagggatgagaccaaggctgacactgacacagccccagcttcattccctgctcctgggtgctgtgagaactgtggaatcagcttctcaggggatggcacccaaaggcagcggctcaaaacgttgtgcaaagactgtcgagcacagagaattgccttcaaccgggaacagagaatgtttaagcgtgtgggctgtggggagtgtgcagcctgccaggtaacagaagactgtggggcctgctccacctgcctcctgcagctgccccatgatgtggcatcggggctgttctgcaagtgtgaacggagacgctgcctccggattgtggaaaggagccgagggtgtggagtatgccggggctgtcagacccaagaggattgtggccattgccccatctgccttcgccctccccgccctggtctcaggcgccagtggaaatgtgtccagcgacgttgcctacggggtaaacatgcccgccgcaagggaggctgtgactccaagatggctgccaggcggcgccccggagcccagccactgcctccaccacccccatcacagtccccagagcccacagagccgcaccccagagccctggccccctcgccacctgccgagttcatctattactgtgtagacgaggacgagctacagccctacacgaaccgccggcagaaccgcaagtgcggggcctgtgcagcctgcctacggcggatggactgtggccgctgcgacttctgctgcgacaagcccaaattcgggggcagcaaccagaagcgccagaagtgtcgttggcgccaatgcctgcagtttgccatgaagcggctgctgcccagtgtctggtcagagtctgaggatggggcaggatcgcccccaccttaccgtcgtcgaaagaggcccagctctgcccgacggcaccatcttggccctaccttgaagcccaccttggctacacgcacagcccaaccagaccatacccaggctccaacgaagcaggaagcaggtggtggctttgtgctgcccccgcctggcactgaccttgtgtttttacgggaaggcgcaagcagtcctgtgcaggtgccgggccctgttgcagcttccacagaagccctgttgcaggaggcccagtgctctggcctgagttgggttgtggccttaccccaggtgaagcaagagaaggcggatacccaggacgagtggacaccaggcacagctgtcctgacttctcccgtattggtgcctggctgccctagcaaggcagtagacccaggcctgccttctgtgaagcaagagccacctgacccagaggaggacaaggaggagaacaaggatgattctgcctccaaattggccccagaggaagaggcaggaggggctggcacacccgtgatcacggagattttcagcctgggtggaacccgcttccgagatacagcagtctggttgccaaggtccaaagaccttaaaaaacctggagctagaaagcagtagactggaggcttctacagactgtaggattcaagtctgcagggcaggcactcgggaagggaagatggatgtaaagtgtgggagaccgaggacacagtggagcccacgagcacgagctggaacccacgaggatggcctggaacccatgtcagtctctcaccacctccagcttcgatgatgtgggtgtcctgcagaagaagctggtgcccttcctcacagagttaaatatgcatctggcccaggaattagagaagctgaaaggatgatcctggggaaggtggagcagctgcaggcctggctgcaggcctgactactgcccacaccaacgaggtgatctagcagatacatggcaacgtgtgaactgcaacaacgcctggtgccccagcaccaaccttccaagtgtaaaaacaatgtgctgctgcttcacttccgccctccggttatcaagcaaaatgtctcttgtggcccatcttactggaagagagttccgggaaacatagcctcaccaaggtgacacattacaaagccaccctaccatgaatccgctcccaagggtctcactgctcacctgaggataactcaatataactatgtggctgaaaatgcaaagctgaagaccatggatttcatggtgattccagcaagtacagagattctatgaagcccacccagaaaaaacttgctggtcctggctatttttgtgtcatttattcaagtattgagaacctggcctgtggtaggcactgtacttaatactaggatacagaaatgcaaaagatacggcccatgcaattttattaaatgcatcaatatgtattacaaatggtgaatggatttccaactttatcatggaatttaatgctgaatatatagaattcagaaaattgttgggaggacagcccttttgtgaaccttgtttggggcacagtaggaattggaaataatttagtttctatctctaagctgttctattttaaaattatttttaaatttttattgtcccactt

SEQ ID NO: 17907 - DNA, 2980 bp, Homo sapiens
  source 1..2980: mol_type = unassigned DNA
aaagcgcatgcgccagctagatgggcagcgaggagagccgcaactgccagtccctcgaaggggttagctgtcgttgaacgtcagcacgcagatgcaactggctctcggcaggggggcgcgcgcaccgctgcggagcgccggcccgtaggcgcgggagcctccctattaagggcacgcgacatcgaggcaatagtgcgcaggtgcttagccagaggcggagcccgagaggcaggcagcggacttccggttccgggagcaacgaacagccgcggaggcgacagctaccgcttcagaggaggcggccgcggaggaggaggaaggggaggagggcgaggcgggaggtgcaggagggaccctcgccatgggtccacgggcctagagtggcggaagataccggcctggtgccaaactggctactgctgcttcctgtggcctccatggctgaggactggctggactgcccggccctgggccctggctggaagcgccgcgaagtctttcgcaagtcaggggccacctgtggacgctcagacacctattaccagagccccacaggagacaggatccgaagcaaagttgagctgactcgatacctgggccctgcgtgtgatctcaccctcttcgacttcaaacaaggcatcttgtgctatccagcccccaaggcccatcccgtggcggttgccagcaagaagcgaaagaagccttcaaggccagccaagactcggaaacgtcaggttggaccccagagtggtgaggtcaggaaggaggccccgagggatgagaccaaggctgacactgacacagccccagcttcattccctgctcctgggtgctgtgagaactgtggaatcagcttctcaggggatggcacccaaaggcagcggctcaaaacgttgtgcaaagactgtcgagcacagagaattgccttcaaccgggaacagagaatgtttaagcgtgtgggctgtggggagtgtgcagcctgccaggtaacagaagactgtggggcctgctccacctgcctcctgcagctgccccatgatgtggcatcggggctgttctgcaagtgtgaacggagacgctgcctccggattgtggaaaggagccgagggtgtggagtatgccggggctgtcagacccaagaggattgtggccattgccccatctgccttcgccctccccgccctggtctcaggcgccagtggaaatgtgtccagcgacgttgcctacggggtaaacatgcccgccgcaagggaggctgtgactccaagatggctgccaggcggcgccccggagcccagccactgcctccaccacccccatcacagtccccagagcccacagagccgcagccctacacgaaccgccggcagaaccgcaagtgcggggcctgtgcagcctgcctacggcggatggactgtggccgctgcgacttctgctgcgacaagcccaaattcgggggcagcaaccagaagcgccagaagtgtcgttggcgccaatgcctgcagtttgccatgaagcggctgctgcccagtgtctggtcagagtctgaggatggggcaggatcgcccccaccttaccgtcgtcgaaagaggcccagctctgcccgacggcaccatcttggccctaccttgaagcccaccttggctacacgcacagcccaaccagaccatacccaggctccaacgaagcaggaagcaggtggtggctttgtgctgcccccgcctggcactgaccttgtgtttttacgggaaggcgcaagcagtcctgtgcaggtgccgggccctgttgcagcttccacagaagccctgttgcaggcagtagacccaggcctgccttctgtgaagcaagagccacctgacccagaggaggacaaggaggagaacaaggatgattctgcctccaaattggccccagaggaagaggcaggaggggctggcacacccgtgatcacggagattttcagcctgggtggaacccgcttccgagatacagcagtctggttgccaagtctgcagggcaggcactcgggaagggaagatggatgtaaagtgtgggagaccgaggacacagtggagcccacgagcacgagctggaacccacgaggatggcctggaacccatgtcagtctctcaccacctccagcttcgatgatgtgggtgtcctgcagaagaagctggtgcccttcctcacagagttaaatatgcatctggcccaggaattagagaagctgaaaggatgatcctggggaaggtggagcagctgcaggcctggctgcaggcctgactactgcccacaccaacgaggtgatctagcagatacatggcaacgtgtgaactgcaacaacgcctggtgccccagcaccaaccttccaagtgtaaaaacaatgtgctgctgcttcacttccgccctccggttatcaagcaaaatgtctcttgtggcccatcttactggaagagagttccgggaaacatagcctcaccaaggtgacacattacaaagccaccctaccatgaatccgctcccaagggtctcactgctcacctgaggataactcaatataactatgtggctgaaaatgcaaagctgaagaccatggatttcatggtgattccagcaagtacagagattctatgaagcccacccagaaaaaacttgctggtcctggctatttttgtgtcatttattcaagtattgagaacctggcctgtggtaggcactgtacttaatactaggatacagaaatgcaaaagatacggcccatgcaattttattaaatgcatcaatatgtattacaaatggtgaatggatttccaactttatcatggaatttaatgctgaatatatagaattcagaaaattgttgggaggacagcccttttgtgaaccttgtttggggcacagtaggaattggaaataatttagtttctatctctaagctgttctattttaaaattatttttaaatttttattgtcccactt

SEQ ID NO: 17908 - DNA, 2090 bp, Homo sapiens
  source 1..2090: mol_type = unassigned DNA
aaagcgcatgcgccagctagatgggcagcgaggagagccgcaactgccagtccctcgaaggggttagctgtcgttgaacgtcagcacgcagatgcaactggctctcggcaggggggcgcgcgcaccgctgcggagcgccggcccgtaggcgcgggagcctccctattaagggcacgcgacatcgaggcaatagtgcgcaggtgcttagccagaggcggagcccgagaggcaggcagcggacttccggttccgggagcaacgaacagccgcggaggcgacagctaccgcttcagaggaggcggccgcggaggaggaggaaggggaggagggcgaggcgggaggtgcaggagggaccctcgccatgggtccacgggcctagagtggcggaagataccggcctggtgccaaactggctactgctgcttcctgtggcctccatggctgaggactggctggactgcccggccctgggccctggctggaagcgccgcgaagtctttcgcaagtcaggggccacctgtggacgctcagacacctattaccagagccccacaggagacaggatccgaagcaaagttgagctgactcgatacctgggccctgcgtgtgatctcaccctcttcgacttcaaacaaggcatcttgtgctatccagcccccaaggcccatcccgtggcggttgccagcaagaagcgaaagaagccttcaaggccagccaagactcggaaacgtcaggttggaccccagagtggtgaggtcaggaaggaggccccgagggatgagaccaaggctgacactgacacagccccagcttcattccctgctcctgggtgctgtgagaactgtggaatcagcttctcaggggatggcacccaaaggcagcggctcaaaacgttgtgcaaagactgtcgagcacagagaattgccttcaaccgggaacagagaatgtttaagcgtgtgggctgtggggagtgtgcagcctgccaggtaacagaagactgtggggcctgctccacctgcctcctgcagctgccccatgatgtggcatcggggctgttctgcaagtgtgaacggagacgctgcctccggattgtggaaaggagccgagggtgtggagtatgccggggctgtcagacccaagaggattgtggccattgccccatctgccttcgccctccccgccctggtctcaggcgccagtggaaatgtgtccagcgacgttgcctacggggtaaacatgcccgccgcaagggaggctgtgactccaagatggctgccaggcggcgccccggagcccagccactgcctccaccacccccatcacagtccccagagcccacagagccgcaccccagagccctggccccctcgccacctgccgagttcatctattactgtgtagacgaggacgagctacagccctacacgaaccgccggcagaaccgcaagtgcggggcctgtgcagcctgcctacggcggatggactgtggccgctgcgacttctgctgcgacaagcccaaattcgggggcagcaaccagaagcgccagaagtgtcgttggcgccaatgcctgcagtttgccatgaagcggctgctgcccagtgtctggtcagagtctgaggatggggcaggatcgcccccaccttaccgtcgtcgaaagaggcccagctctgcccgacggcaccatcttggccctaccttgaagcccaccttggctacacgcacagcccaaccagaccatacccaggctccaacgaagcaggaagcaggtggtggctttgtgctgcccccgcctggcactgaccttgtgtttttacgggaaggcgcaagcagtcctgtgcaggtgccgggccctgttgcagcttccacagaagccctgttgcaggcagtagacccaggcctgccttctgtgaagcaagagccacctgacccagaggaggacaaggaggagaacaaggatgattctgcctccaaattggccccagaggaagaggcaggaggggctggcacacccgtggaaccaaccacccaaccccagtattctggtaattttgacaatgatctatatgaaatttatttgattgacatttag

SEQ ID NO: 17909 - DNA, 3091 bp, Homo sapiens
  source 1..3091: mol_type = unassigned DNA
aaagcgcatgcgccagctagatgggcagcgaggagagccgcaactgccagtccctcgaaggggttagctgtcgttgaacgtcagcacgcagatgcaactggctctcggcaggggggcgcgcgcaccgctgcggagcgccggcccgtaggcgcgggagcctccctattaagggcacgcgacatcgaggcaatagtgcgcaggtgcttagccagaggcggagcccgagaggcaggcagcggacttccggttccgggagcaacgaacagccgcggaggcgacagctaccgcttcagaggaggcggccgcggaggaggaggaaggggaggagggcgaggcgggaggtgcaggagggaccctcgccatgggtccacgggcctagagtggcggaagataccggcctggtgccaaactggctactgctgcttcctgtggcctccatggctgaggactggctggactgcccggccctgggccctggctggaagcgccgcgaagtctttcgcaagtcaggggccacctgtggacgctcagacacctattaccagagccccacaggagacaggatccgaagcaaagttgagctgactcgatacctgggccctgcgtgtgatctcaccctcttcgacttcaaacaaggcatcttgtgctatccagcccccaaggcccatcccgtggcggttgccagcaagaagcgaaagaagccttcaaggccagccaagactcggaaacgtcaggttggaccccagagtggtgaggtcaggaaggaggccccgagggatgagaccaaggctgacactgacacagccccagcttcattccctgctcctgggtgctgtgagaactgtggaatcagcttctcaggggatggcacccaaaggcagcggctcaaaacgttgtgcaaagactgtcgagcacagagaattgccttcaaccgggaacagagaatgtttaagcgtgtgggctgtggggagtgtgcagcctgccaggtaacagaagactgtggggcctgctccacctgcctcctgcagctgccccatgatgtggcatcggggctgttctgcaagtgtgaacggagacgctgcctccggattgtggaaaggagccgagggtgtggagtatgccggggctgtcagacccaagaggattgtggccattgccccatctgccttcgccctccccgccctggtctcaggcgccagtggaaatgtgtccagcgacgttgcctacggggtaaacatgcccgccgcaagggaggctgtgactccaagatggctgccaggcggcgccccggagcccagccactgcctccaccacccccatcacagtccccagagcccacagagccgcaccccagagccctggccccctcgccacctgccgagttcatctattactgtgtagacgaggacgagctaaagcggctgctgcccagtgtctggtcagagtctgaggatggggcaggatcgcccccaccttaccgtcgtcgaaagaggcccagctctgcccgacggcaccatcttggccctaccttgaagcccaccttggctacacgcacagcccaaccagaccatacccaggctccaacgaagcaggaagcaggtggtggctttgtgctgcccccgcctggcactgaccttgtgtttttacgggaaggcgcaagcagtcctgtgcaggtgccgggccctgttgcagcttccacagaagccctgttgcaggaggcccagtgctctggcctgagttgggttgtggccttaccccaggtgaagcaagagaaggcggatacccaggacgagtggacaccaggcacagctgtcctgacttctcccgtattggtgcctggctgccctagcaaggcagtagacccaggcctgccttctgtgaagcaagagccacctgacccagaggaggacaaggaggagaacaaggatgattctgcctccaaattggccccagaggaagaggcaggaggggctggcacacccgtgatcacggagattttcagcctgggtggaacccgcttccgagatacagcagtctggttgccaaggtccaaagaccttaaaaaacctggagctagaaagcagtagactggaggcttctacagactgtaggattcaagtctgcagggcaggcactcgggaagggaagatggatgtaaagtgtgggagaccgaggacacagtggagcccacgagcacgagctggaacccacgaggatggcctggaacccatgtcagtctctcaccacctccagcttcgatgatgtgggtgtcctgcagaagaagctggtgcccttcctcacagagttaaatatgcatctggcccaggaattagagaagctgaaaggatgatcctggggaaggtggagcagctgcaggcctggctgcaggcctgactactgcccacaccaacgaggtgatctagcagatacatggcaacgtgtgaactgcaacaacgcctggtgccccagcaccaaccttccaagtgtaaaaacaatgtgctgctgcttcacttccgccctccggttatcaagcaaaatgtctcttgtggcccatcttactggaagagagttccgggaaacatagcctcaccaaggtgacacattacaaagccaccctaccatgaatccgctcccaagggtctcactgctcacctgaggataactcaatataactatgtggctgaaaatgcaaagctgaagaccatggatttcatggtgattccagcaagtacagagattctatgaagcccacccagaaaaaacttgctggtcctggctatttttgtgtcatttattcaagtattgagaacctggcctgtggtaggcactgtacttaatactaggatacagaaatgcaaaagatacggcccatgcaattttattaaatgcatcaatatgtattacaaatggtgaatggatttccaactttatcatggaatttaatgctgaatatatagaattcagaaaattgttgggaggacagcccttttgtgaaccttgtttggggcacagtaggaattggaaataatttagtttctatctctaagctgttctattttaaaattatttttaaatttttattgtcccactt

SEQ ID NO: 17910 - DNA, 2953 bp, Homo sapiens
  source 1..2953: mol_type = unassigned DNA
aaagcgcatgcgccagctagatgggcagcgaggagagccgcaactgccagtccctcgaaggggttagctgtcgttgaacgtcagcacgcagatgcaactggctctcggcaggggggcgcgcgcaccgctgcggagcgccggcccgtaggcgcgggagcctccctattaagggcacgcgacatcgaggcaatagtgcgcaggtgcttagccagaggcggagcccgagaggcaggcagcggacttccggttccgggagcaacgaacagccgcggaggcgacagctaccgcttcagaggaggcggccgcggaggaggaggaaggggaggagggcgaggcgggaggtgcaggagggaccctcgccatgggtccacgggcctagagtggcggaagataccggcctggtgccaaactggctactgctgcttcctgtggcctccatggctgaggactggctggactgcccggccctgggccctggctggaagcgccgcgaagtctttcgcaagtcaggggccacctgtggacgctcagacacctattaccagagccccacaggagacaggatccgaagcaaagttgagctgactcgatacctgggccctgcgtgtgatctcaccctcttcgacttcaaacaaggcatcttgtgctatccagcccccaaggcccatcccgtggcggttgccagcaagaagcgaaagaagccttcaaggccagccaagactcggaaacgtcaggttggaccccagagtggtgaggtcaggaaggaggccccgagggatgagaccaaggctgacactgacacagccccagcttcattccctgctcctgggtgctgtgagaactgtggaatcagcttctcaggggatggcacccaaaggcagcggctcaaaacgttgtgcaaagactgtcgagcacagagaattgccttcaaccgggaacagagaatgtttaagcgtgtgggctgtggggagtgtgcagcctgccaggtaacagaagactgtggggcctgctccacctgcctcctgcagctgccccatgatgtggcatcggggctgttctgcaagtgtgaacggagacgctgcctccggattgtggaaaggagccgagggtgtggagtatgccggggctgtcagacccaagaggattgtggccattgccccatctgccttcgccctccccgccctggtctcaggcgccagtggaaatgtgtccagcgacgttgcctacggggtaaacatgcccgccgcaagggaggctgtgactccaagatggctgccaggcggcgccccggagcccagccactgcctccaccacccccatcacagtccccagagcccacagagccgcaccccagagccctggccccctcgccacctgccgagttcatctattactgtgtagacgaggacgagctaaagcggctgctgcccagtgtctggtcagagtctgaggatggggcaggatcgcccccaccttaccgtcgtcgaaagaggcccagctctgcccgacggcaccatcttggccctaccttgaagcccaccttggctacacgcacagcccaaccagaccatacccaggctccaacgaagcaggaagcaggtggtggctttgtgctgcccccgcctggcactgaccttgtgtttttacgggaaggcgcaagcagtcctgtgcaggtgccgggccctgttgcagcttccacagaagccctgttgcaggcagtagacccaggcctgccttctgtgaagcaagagccacctgacccagaggaggacaaggaggagaacaaggatgattctgcctccaaattggccccagaggaagaggcaggaggggctggcacacccgtgatcacggagattttcagcctgggtggaacccgcttccgagatacagcagtctggttgccaaggtccaaagaccttaaaaaacctggagctagaaagcagtagactggaggcttctacagactgtaggattcaagtctgcagggcaggcactcgggaagggaagatggatgtaaagtgtgggagaccgaggacacagtggagcccacgagcacgagctggaacccacgaggatggcctggaacccatgtcagtctctcaccacctccagcttcgatgatgtgggtgtcctgcagaagaagctggtgcccttcctcacagagttaaatatgcatctggcccaggaattagagaagctgaaaggatgatcctggggaaggtggagcagctgcaggcctggctgcaggcctgactactgcccacaccaacgaggtgatctagcagatacatggcaacgtgtgaactgcaacaacgcctggtgccccagcaccaaccttccaagtgtaaaaacaatgtgctgctgcttcacttccgccctccggttatcaagcaaaatgtctcttgtggcccatcttactggaagagagttccgggaaacatagcctcaccaaggtgacacattacaaagccaccctaccatgaatccgctcccaagggtctcactgctcacctgaggataactcaatataactatgtggctgaaaatgcaaagctgaagaccatggatttcatggtgattccagcaagtacagagattctatgaagcccacccagaaaaaacttgctggtcctggctatttttgtgtcatttattcaagtattgagaacctggcctgtggtaggcactgtacttaatactaggatacagaaatgcaaaagatacggcccatgcaattttattaaatgcatcaatatgtattacaaatggtgaatggatttccaactttatcatggaatttaatgctgaatatatagaattcagaaaattgttgggaggacagcccttttgtgaaccttgtttggggcacagtaggaattggaaataatttagtttctatctctaagctgttctattttaaaattatttttaaatttttattgtcccactt

SEQ ID NO: 17911 - DNA, 2820 bp, Homo sapiens
  source 1..2820: mol_type = unassigned DNA
gcggccgcggaggaggaggaaggggaggagggcgaggcgggaggtgcaggagggaccctcgccatgggtccacgggcctagagtggcggaagataccggcctggtgccaaactggctactgctgcttcctgtggcctccatggctgaggactggctggactgcccggccctgggccctggctggaagcgccgcgaagtctttcgcaagtcaggggccacctgtggacgctcagacacctattaccagagccccacaggagacaggatccgaagcaaagttgagctgactcgatacctgggccctgcgtgtgatctcaccctcttcgacttcaaacaaggcatcttgtgctatccagcccccaaggcccatcccgtggcggttgccagcaagaagcgaaagaagccttcaaggccagccaagactcggaaacgtcaggttggaccccagagtggtgaggtcaggaaggaggccccgagggatgagaccaaggctgacactgacacagccccagcttcattccctgctcctgggtgctgtgagaactgtggaatcagcttctcaggggatggcacccaaaggcagcggctcaaaacgttgtgcaaagactgtcgagcacagagaattgccttcaaccgggaacagagaatgtttaagagccgagggtgtggagtatgccggggctgtcagacccaagaggattgtggccattgccccatctgccttcgccctccccgccctggtctcaggcgccagtggaaatgtgtccagcgacgttgcctacggggtaaacatgcccgccgcaagggaggctgtgactccaagatggctgccaggcggcgccccggagcccagccactgcctccaccacccccatcacagtccccagagcccacagagccgcaccccagagccctggccccctcgccacctgccgagttcatctattactgtgtagacgaggacgagctacagccctacacgaaccgccggcagaaccgcaagtgcggggcctgtgcagcctgcctacggcggatggactgtggccgctgcgacttctgctgcgacaagcccaaattcgggggcagcaaccagaagcgccagaagtgtcgttggcgccaatgcctgcagtttgccatgaagcggctgctgcccagtgtctggtcagagtctgaggatggggcaggatcgcccccaccttaccgtcgtcgaaagaggcccagctctgcccgacggcaccatcttggccctaccttgaagcccaccttggctacacgcacagcccaaccagaccatacccaggctccaacgaagcaggaagcaggtggtggctttgtgctgcccccgcctggcactgaccttgtgtttttacgggaaggcgcaagcagtcctgtgcaggtgccgggccctgttgcagcttccacagaagccctgttgcaggaggcccagtgctctggcctgagttgggttgtggccttaccccaggtgaagcaagagaaggcggatacccaggacgagtggacaccaggcacagctgtcctgacttctcccgtattggtgcctggctgccctagcaaggcagtagacccaggcctgccttctgtgaagcaagagccacctgacccagaggaggacaaggaggagaacaaggatgattctgcctccaaattggccccagaggaagaggcaggaggggctggcacacccgtgatcacggagattttcagcctgggtggaacccgcttccgagatacagcagtctggttgccaaggtccaaagaccttaaaaaacctggagctagaaagcagtagactggaggcttctacagactgtaggattcaagtctgcagggcaggcactcgggaagggaagatggatgtaaagtgtgggagaccgaggacacagtggagcccacgagcacgagctggaacccacgaggatggcctggaacccatgtcagtctctcaccacctccagcttcgatgatgtgggtgtcctgcagaagaagctggtgcccttcctcacagagttaaatatgcatctggcccaggaattagagaagctgaaaggatgatcctggggaaggtggagcagctgcaggcctggctgcaggcctgactactgcccacaccaacgaggtgatctagcagatacatggcaacgtgtgaactgcaacaacgcctggtgccccagcaccaaccttccaagtgtaaaaacaatgtgctgctgcttcacttccgccctccggttatcaagcaaaatgtctcttgtggcccatcttactggaagagagttccgggaaacatagcctcaccaaggtgacacattacaaagccaccctaccatgaatccgctcccaagggtctcactgctcacctgaggataactcaatataactatgtggctgaaaatgcaaagctgaagaccatggatttcatggtgattccagcaagtacagagattctatgaagcccacccagaaaaaacttgctggtcctggctatttttgtgtcatttattcaagtattgagaacctggcctgtggtaggcactgtacttaatactaggatacagaaatgcaaaagatacggcccatgcaattttattaaatgcatcaatatgtattacaaatggtgaatggatttccaactttatcatggaatttaatgctgaatatatagaattcagaaaattgttgggaggacagcccttttgtgaaccttgtttggggcacagtaggaattggaaataatttagtttctatctctaagctgttctattttaaaattatttttaaatttttattgtcccacttacttac

SEQ ID NO: 17912 - DNA, 2434 bp, Homo sapiens
  source 1..2434: mol_type = unassigned DNA
aaagcgcatgcgccagctagatgggcagcgaggagagccgcaactgccagtccctcgaaggggttagctgtcgttgaacgtcagcacgcagatgcaactggctctcggcaggggggcgcgcgcaccgctgcggagcgccggcccgtaggcgcgggagcctccctattaagggcacgcgacatcgaggcaatagtgcgcaggtgcttagccagaggcggagcccgagaggcaggcagcggacttccggttccgggagcaacgaacagccgcggaggcgacagctaccgcttcagaggaggcggccgcggaggaggaggaaggggaggagggcgaggcgggaggtgcaggagggaccctcgccatgggtccacgggcctagagtggcggaagataccggcctggtgccaaactggctactgctgcttcctgtggcctccatggctgaggactggctggactgcccggccctgggccctggctggaagcgccgcgaagtctttcgcaagtcaggggccacctgtggacgctcagacacctattaccagagccccacaggagacaggatccgaagcaaagttgagctgactcgatacctgggccctgcgtgtgatctcaccctcttcgacttcaaacaaggcatcttgtgctatccagcccccaaggcccatcccgtggcggttgccagcaagaagcgaaagaagccttcaaggccagccaagactcggaaacgtcaggttggaccccagagtggtgaggtcaggaaggaggccccgagggatgagaccaaggctgacactgacacagccccagcttcattccctgctcctgggtgctgtgagaactgtggaatcagcttctcaggggatggcacccaaaggcagcggctcaaaacgttgtgcaaagactgtcgagcacagagaattgccttcaaccgggaacagagaatgtttaagcgtgtgggctgtggggagtgtgcagcctgccaggtaacagaagactgtggggcctgctccacctgcctcctgcagctgccccatgatgtggcatcggggctgttctgcaagtgtgaacggagacgctgcctccggattgtggaaaggagccgagggtgtggagtatgccggggctgtcagacccaagaggattgtggccattgccccatctgccttcgccctccccgccctggtctcaggcgccagtggaaatgtgtccagcgacgttgcctacggggtaaacatgcccgccgcaagggaggctgtgactccaagatggctgccaggcggcgccccggagcccagccactgcctccaccacccccatcacagtccccagagcccacagagccgcaccccagagccctggccccctcgccacctgccgagttcatctattactgtgtagacgaggacgagctacagccctacacgaaccgccggcagaaccgcaagtgcggggcctgtgcagcctgcctacggcggatggactgtggccgctgcgacttctgctgcgacaagcccaaattcgggggcagcaaccagaagcgccagaagtgtcgttggcgccaatgcctgcagtttgccatgaagcggctgctgcccagtgtctggtcagagtctgaggatggggcaggatcgcccccaccttaccgtcgtcgaaagaggcccagctctgcccgacggcaccatcttggccctaccttgaagcccaccttggctacacgcacagcccaaccagaccatacccaggctccaacgaagcaggaagcaggtggtggctttgtgctgcccccgcctggcactgaccttgtgtttttacgggaaggcgcaagcagtcctgtgcaggtgccgggccctgttgcagcttccacagaagccctgttgcaggaggcccagtgctctggcctgagttgggttgtggccttaccccaggtgaagcaagagaaggcggatacccaggacgagtggacaccaggcacagctgtcctgacttctcccgtattggtgcctggctgccctagcaaggcagtagacccaggcctgccttctgtgaagcaagagccacctgacccagaggaggacaaggaggagaacaaggatgattctgcctccaaattggccccagaggaagaggcaggaggggctggcacacccgtgatcacggagattttcagcctgggtggaacccgcttccgagatacagcagtctggttgccaaggtccaaagaccttaaaaaacctggagctagaaagcagtagactggaggcttctacagactgtaggattcaaggtattaccaccttgctcttgactggaaatgcaactgtggttaccacctgtgctgcaggtccgtcctggttccctgatttgtgtttcctgttctgcctggatcctgattctcagaaaccagttactggacttctgatccacatcctga

SEQ ID NO: 17913 - DNA, 1512 bp, Homo sapiens
  source 1..1512: mol_type = unassigned DNA
atggctgaggactggctggactgcccggccctgggccctggctggaagcgccgcgaagtctttcgcaagtcaggggccacctgtggacgctcagacacctattaccagagccccacaggagacaggatccgaagcaaagttgagctgactcgatacctgggccctgcgtgtgatctcaccctcttcgacttcaaacaaggcatcttgtgctatccagcccccaaggcccatcccgtggcggttgccagcaagaagcgaaagaagccttcaaggccagccaagactcggaaacgtcaggttggaccccagagtggtgaggtcaggaaggaggccccgagggatgagaccaaggctgacactgacacagccccagcttcattccctgctcctgggtgctgtgagaactgtggaatcagcttctcaggggatggcacccaaaggcagcggctcaaaacgttgtgcaaagactgtcgagcacagagaattgccttcaaccgggaacagagaatgtttaagcgtgtgggctgtggggagtgtgcagcctgccaggtaacagaagactgtggggcctgctccacctgcctcctgcagctgccccatgatgtggcatcggggctgttctgcaagtgtgaacggagacgctgcctccggattgtggaaaggagccgagggtgtggagtatgccggggctgtcagacccaagaggattgtggccattgccccatctgccttcgccctccccgccctggtctcaggcgccagtggaaatgtgtccagcgacgttgcctacggggtaaacatgcccgccgcaagggaggctgtgactccaagatggctgccaggcggcgccccggagcccagccactgcctccaccacccccatcacagtccccagagcccacagagccgcaccccagagccctggccccctcgccacctgccgagttcatctattactgtgtagacgaggacgagctaaagcggctgctgcccagtgtctggtcagagtctgaggatggggcaggatcgcccccaccttaccgtcgtcgaaagaggcccagctctgcccgacggcaccatcttggccctaccttgaagcccaccttggctacacgcacagcccaaccagaccatacccaggctccaacgaagcaggaagcaggtggtggctttgtgctgcccccgcctggcactgaccttgtgtttttacgggaaggcgcaagcagtcctgtgcaggtgccgggccctgttgcagcttccacagaagccctgttgcaggcagtagacccaggcctgccttctgtgaagcaagagccacctgacccagaggaggacaaggaggagaacaaggatgattctgcctccaaattggccccagaggaagaggcaggaggggctggcacacccgtgatcacggagattttcagcctgggtggaacccgcttccgagatacagcagtctggttgccaaggtccaaagaccttaaaaaacctggagctagaaagcagtag

SEQ ID NO: 17914 - DNA, 1845 bp, Homo sapiens
  source 1..1845: mol_type = unassigned DNA
gcgacagctaccgcttcagaggaggcggccgcggaggaggaggaaggggaggagggcgaggcgggaggtgcaggagggaccctcgccatgggtccacgggcctagagtggcggaagataccggcctggtgccaaactggctactgctgcttcctgtggcctccatggctgaggactggctggactgcccggccctgggccctggctggaagcgccgcgaagtctttcgcaagtcaggggccacctgtggacgctcagacacctattaccagagccccacaggagacaggatccgaagcaaagttgagctgactcgatacctgggccctgcgtgtgatctcaccctcttcgacttcaaacaaggcatcttgtgctatccagcccccaaggcccatcccgtggcggttgccagcaagaagcgaaagaagccttcaaggccagccaagactcggaaacgtcaggttggaccccagagtggtgaggtcaggaaggaggccccgagggatgagaccaaggctgacactgacacagccccagcttcattccctgctcctgggtgctgtgagaactgtggaatcagcttctcaggggatggcacccaaaggcagcggctcaaaacgttgtgcaaagactgtcgagcacagagaattgccttcaaccgggaacagagaatgtttaagcgtgtgggctgtggggagtgtgcagcctgccaggtaacagaagactgtggggcctgctccacctgcctcctgcagctgccccatgatgtggcatcggggctgttctgcaagtgtgaacggagacgctgcctccggattgtggaaaggagccgagggtgtggagtatgccggggctgtcagacccaagaggattgtggccattgccccatctgccttcgccctccccgccctggtctcaggcgccagtggaaatgtgtccagcgacgttgcctacggggtaaacatgcccgccgcaagggaggctgtgactccaagatggctgccaggcggcgccccggagcccagccactgcctccaccacccccatcacagtccccagagcccacagagccgcaccccagagccctggccccctcgccacctgccgagttcatctattactgtgtagacgaggacgagctaaagcggctgctgcccagtgtctggtcagagtctgaggatggggcaggatcgcccccaccttaccgtcgtcgaaagaggcccagctctgcccgacggcaccatcttggccctaccttgaagcccaccttggctacacgcacagcccaaccagaccatacccaggctccaacgaagcaggaagcaggtggtggctttgtgctgcccccgcctggcactgaccttgtgtttttacgggaaggcgcaagcagtcctgtgcaggtgccgggccctgttgcagcttccacagaagccctgttgcaggaggcccagtgctctggcctgagttgggttgtggccttaccccaggtgaagcaagagaaggcggatacccaggacgagtggacaccaggcacagctgtcctgacttctcccgtattggtgcctggctgccctagcaaggcagtagacccaggcctgccttctgtgaagcaagagccacctgacccagaggaggacaaggaggagaacaaggatgattctgcctccaaattggccccagaggaagaggcaggaggggctggcacacccgtgatcacggagattttcagcctgggtggaacccgcttccgagatacagcagtctggttgccaaggtccaaagaccttaaaaaacctggagctagaaagcagtagactggaggcttctacagactgtaggattcaag

SEQ ID NO: 17915 - DNA, 2801 bp, Homo sapiens
  source 1..2801: mol_type = unassigned DNA
agccagaggcggagcccgagaggcaggcagcggacttccggttccgggagcaacgaacagccgcggaggcgacagctaccgcttcagaggaggcggccgcggaggaggaggaaggggaggagggcgaggcgggaggtgcaggagggaccctcgccatgggtccacgggcctagagtggcggaagataccggcctggtgccaaactggctactgctgcttcctgtggcctccatggctgaggactggctggactgcccggccctgggccctggctggaagcgccgcgaagtctttcgcaagtcaggggccacctgtggacgctcagacacctattaccagagccccacaggagacaggatccgaagcaaagttgagctgactcgatacctgggccctgcgtgtgatctcaccctcttcgacttcaaacaaggcatcttgtgctatccagcccccaaggcccatcccgtggcggttgccagcaagaagcgaaagaagccttcaaggccagccaagactcggaaacgtcaggttggaccccagagtggtgaggtcaggaaggaggccccgagggatgagaccaaggctgacactgacacagccccagcttcattccctgctcctgggtgctgtgagaactgtggaatcagcttctcaggggatggcacccaaaggcagcggctcaaaacgttgtgcaaagactgtcgagcacagagaattgccttcaaccgggaacagagaatgtttaagcgtgtgggctgtggggagtgtgcagcctgccaggtaacagaagactgtggggcctgctccacctgcctcctgcagctgccccatgatgtggcatcggggctgttctgcaagtgtgaacggagacgctgcctccggattgtggaaaggagccgagggtgtggagtatgccggggctgtcagacccaagaggattgtggccattgccccatctgccttcgccctccccgccctggtctcaggcgccagtggaaatgtgtccagcgacgttgcctacggggtaaacatgcccgccgcaagggaggctgtgactccaagatggctgccaggcggcgccccggagcccagccactgcctccaccacccccatcacagtccccagagcccacagagccgcaccccagagccctggccccctcgccacctgccgagttcatctattactgtgtagacgaggacgagctacagccctacacgaaccgccggcagaaccgcaagtgcggggcctgtgcagcctgcctacggcggatggactgtggccgctgcgacttctgctgcgacaagcccaaattcgggggcagcaaccagaagcgccagaagtgtcgttggcgccaatgcctgcagtttgccatgaagcggctgctgcccagtgtctggtcagagtctgaggatggggcaggatcgcccccaccttaccgtcgtcgaaagaggcccagctctgcccgacggcaccatcttggccctaccttgaagcccaccttggctacacgcacagcccaaccagaccatacccaggctccaacgaagcaggaagcaggtggtggctttgtgctgcccccgcctggcactgaccttgtgtttttacgggaaggcgcaagcagtcctgtgcaggtgccgggccctgttgcagcttccacagaagccctgttgcaggaggcccagtgctctggcctgagttgggttgtggccttaccccaggtgaagcaagagaaggcggatacccaggacgagtggacaccaggcacagctgtcctgacttctcccgtattggtgcctggctgccctagcaaggcagtagacccaggcctgccttctgtgaagcaagagccacctgacccagaggaggacaaggaggagaacaaggatgattctgcctccaaattggccccagaggaagaggcaggaggggctggcacacccgtgatcacggagattttcagcctgggtggaacccgcttccgagatacagcagtctggttgccaaggtccaaagaccttaaaaaacctggagctagaaagcagtagactggaggcttctacagactgtaggattcaaggtgatatttgcagactggctttatgagagacaacactgatctactaggggctggaccctagattggttgccagggcttgtgtgtgaatcaaccctaggaggaaaaacctactaccaaaccagaagagcaggcctaagagtactttgagcttctagaagaagtaagcgggaaaggaagagaaagagtagaaagttggtgcatcttctcctccccaagagcctgagtataagaagttggattttaagggtgggggagctgggttggagaaaggtaatataattaaagccaccacaaaacaacctaaacaagccatgttcatgagtaattgtaagtggcttctggatgagacctggcagtgtctctacatacttcctcagggagatagcaattgaaaatgtaattgaataaataaggaaaggaactgctatttggtgtgttcctctgtggacccagtttatttaatccttaaaataatatttttgggaagacattgattttgtccatttatgtggatgggaaaactgagactcattaatttgtccaatgtcgaacagctggtgttagtagagcctagactcaaacccagcttttaaagcccttgttctttactccactaaactgtaacctgtaatcctgtatgcactaacaggagttttcggtgaccttgaaaacacagattactataattactataataaatcccttacattcctgtctcta

SEQ ID NO: 17916 - DNA, 2179 bp, Homo sapiens
  source 1..2179: mol_type = unassigned DNA
attgtggctcagaacgctgacggggaggaatgaagggccctcaggccgataagggggaggaatggcggcgtcggaatactgacgaggagaaatggggggatttaggctgaggacgggaaggaatgcagctctgaactctgacaggctactgctgcttcctgtggcctccatggctgaggactggctggactgcccggccctgggccctggctggaagcgccgcgaagtctttcgcaagtcaggggccacctgtggacgctcagacacctattaccagagccccacaggagacaggatccgaagcaaagttgagctgactcgatacctgggccctgcgtgtgatctcaccctcttcgacttcaaacaaggcatcttgtgctatccagcccccaaggcccatcccgtggcggttgccagcaagaagcgaaagaagccttcaaggccagccaagactcggaaacgtcaggttggaccccagagtggtgaggtcaggaaggaggccccgagggatgagaccaaggctgacactgacacagccccagcttcattccctgctcctgggtgctgtgagaactgtggaatcagcttctcaggggatggcacccaaaggcagcggctcaaaacgttgtgcaaagactgtcgagcacagagaattgccttcaaccgggaacagagaatgtttaagcgtgtgggctgtggggagtgtgcagcctgccaggtaacagaagactgtggggcctgctccacctgcctcctgcagctgccccatgatgtggcatcggggctgttctgcaagtgtgaacggagacgctgcctccggattgtggaaaggagccgagggtgtggagtatgccggggctgtcagacccaagaggattgtggccattgccccatctgccttcgccctccccgccctggtctcaggcgccagtggaaatgtgtccagcgacgttgcctacggcaccttgctcaccgcctgcgtcgccgtcatcagagatgtcagcgacgcactcccctggctgtggctcccccaactggtaaacatgcccgccgcaagggaggctgtgactccaagatggctgccaggcggcgccccggagcccagccactgcctccaccacccccatcacagtccccagagcccacagagccgcaccccagagccctggccccctcgccacctgccgagttcatctattactgtgtagacgaggacgagctacagccctacacgaaccgccggcagaaccgcaagtgcggggcctgtgcagcctgcctacggcggatggactgtggccgctgcgacttctgctgcgacaagcccaaattcgggggcagcaaccagaagcgccagaagtgtcgttggcgccaatgcctgcagtttgccatgaagcggctgctgcccagtgtctggtcagagtctgaggatggggcaggatcgcccccaccttaccgtcgtcgaaagaggcccagctctgcccgacggcaccatcttggccctaccttgaagcccaccttggctacacgcacagcccaaccagaccatacccaggctccaacgaagcaggaagcaggtggtggctttgtgctgcccccgcctggcactgaccttgtgtttttacgggaaggcgcaagcagtcctgtgcaggtgccgggccctgttgcagcttccacagaagccctgttgcaggaggcccagtgctctggcctgagttgggttgtggccttaccccaggtgaagcaagagaaggcggatacccaggacgagtggacaccaggcacagctgtcctgacttctcccgtattggtgcctggctgccctagcaaggcagtagacccaggcctgccttctgtgaagcaagagccacctgacccagaggaggacaaggaggagaacaaggatgattctgcctccaaattggccccagaggaagaggcaggaggggctggcacacccgtgatcacggagattttcagcctgggtggaacccgcttccgagatacagcagtctggttgccaaggtccaaagaccttaaaaaacctggagctagaaagcagtagactggaggcttctacagactgtaggattcaagtctgcagggcaggcactcgggaagggaagatggatgtaaagtgtgggagaccgaggacacagtggagcccacgagcacgagctgg

SEQ ID NO: 17917 - DNA, 3052 bp, Homo sapiens
  source 1..3052: mol_type = unassigned DNA
aaagcgcatgcgccagctagatgggcagcgaggagagccgcaactgccagtccctcgaaggggttagctgtcgttgaacgtcagcacgcagatgcaactggctctcggcaggggggcgcgcgcaccgctgcggagcgccggcccgtaggcgcgggagcctccctattaagggcacgcgacatcgaggcaatagtgcgcaggtgcttagccagaggcggagcccgagaggcaggcagcggacttccggttccgggagcaacgaacagccgcggaggcgacagctaccgcttcagaggaggcggccgcggaggaggaggaaggggaggagggcgaggcgggaggtgcaggagggaccctcgccatgggtccacgggcctagagtggcggaagataccggcctggtgccaaactggctactgctgcttcctgtggcctccatggctgaggactggctggactgcccggccctgggccctggctggaagcgccgcgaagtctttcgcaagtcaggggccacctgtggacgctcagacacctattaccagagccccacaggagacaggatccgaagcaaagttgagctgactcgatacctgggccctgcgtgtgatctcaccctcttcgacttcaaacaaggcatcttgtgctatccagcccccaaggcccatcccgtggcggttgccagcaagaagcgaaagaagccttcaaggccagccaagactcggaaacgtcaggttggaccccagagtggtgaggtcaggaaggaggccccgagggatgagaccaaggctgacactgacacagccccagcttcattccctgctcctgggtgctgtgagaactgtggaatcagcttctcaggggatggcacccaaaggcagcggctcaaaacgttgtgcaaagactgtcgagcacagagaattgccttcaaccgggaacagagaatgtttaagcgtgtgggctgtggggagtgtgcagcctgccaggtaacagaagactgtggggcctgctccacctgcctcctgcagctgccccatgatgtggcatcggggctgttctgcaagtgtgaacggagacgctgcctccggattgtggaaaggagccgagggtgtggagtatgccggggctgtcagacccaagaggattgtggccattgccccatctgccttcgccctccccgccctggtctcaggcgccagtggaaatgtgtccagcgacgttgcctacggggtaaacatgcccgccgcaagggaggctgtgactccaagatggctgccaggcggcgccccggagcccagccactgcctccaccacccccatcacagtccccagagcccacagagccgcagccctacacgaaccgccggcagaaccgcaagtgcggggcctgtgcagcctgcctacggcggatggactgtggccgctgcgacttctgctgcgacaagcccaaattcgggggcagcaaccagaagcgccagaagtgtcgttggcgccaatgcctgcagtttgccatgaagcggctgctgcccagtgtctggtcagagtctgaggatggggcaggatcgcccccaccttaccgtcgtcgaaagaggcccagctctgcccgacggcaccatcttggccctaccttgaagcccaccttggctacacgcacagcccaaccagaccatacccaggctccaacgaagcaggaagcaggtggtggctttgtgctgcccccgcctggcactgaccttgtgtttttacgggaaggcgcaagcagtcctgtgcaggtgccgggccctgttgcagcttccacagaagccctgttgcaggcagtagacccaggcctgccttctgtgaagcaagagccacctgacccagaggaggacaaggaggagaacaaggatgattctgcctccaaattggccccagaggaagaggcaggaggggctggcacacccgtgatcacggagattttcagcctgggtggaacccgcttccgagatacagcagtctggttgccaaggtccaaagaccttaaaaaacctggagctagaaagcagtagactggaggcttctacagactgtaggattcaagtctgcagggcaggcactcgggaagggaagatggatgtaaagtgtgggagaccgaggacacagtggagcccacgagcacgagctggaacccacgaggatggcctggaacccatgtcagtctctcaccacctccagcttcgatgatgtgggtgtcctgcagaagaagctggtgcccttcctcacagagttaaatatgcatctggcccaggaattagagaagctgaaaggatgatcctggggaaggtggagcagctgcaggcctggctgcaggcctgactactgcccacaccaacgaggtgatctagcagatacatggcaacgtgtgaactgcaacaacgcctggtgccccagcaccaaccttccaagtgtaaaaacaatgtgctgctgcttcacttccgccctccggttatcaagcaaaatgtctcttgtggcccatcttactggaagagagttccgggaaacatagcctcaccaaggtgacacattacaaagccaccctaccatgaatccgctcccaagggtctcactgctcacctgaggataactcaatataactatgtggctgaaaatgcaaagctgaagaccatggatttcatggtgattccagcaagtacagagattctatgaagcccacccagaaaaaacttgctggtcctggctatttttgtgtcatttattcaagtattgagaacctggcctgtggtaggcactgtacttaatactaggatacagaaatgcaaaagatacggcccatgcaattttattaaatgcatcaatatgtattacaaatggtgaatggatttccaactttatcatggaatttaatgctgaatatatagaattcagaaaattgttgggaggacagcccttttgtgaaccttgtttggggcacagtaggaattggaaataatttagtttctatctctaagctgttctattttaaaattatttttaaatttttattgtcccactt

SEQ ID NO: 17918 - DNA, 2473 bp, Homo sapiens
  source 1..2473: mol_type = unassigned DNA
aggaggaggaaggggaggagggcgaggcgggaggtgcaggagggaccctcgccatgggtccacgggcctagagtggcggaagataccggcctggtgccaaactggctactgctgcttcctgtggcctccatggctgaggactggctggactgcccggccctgggccctggctggaagcgccgcgaagtctttcgcaagtcaggggccacctgtggacgctcagacacctattaccagagccccacaggagacaggatccgaagcaaagttgagctgactcgatacctgggccctgcgtgtgatctcaccctcttcgacttcaaacaaggcatcttgtgctatccagcccccaaggcccatcccgtggcggttgccagcaagaagcgaaagaagccttcaaggccagccaagactcggaaacgtcaggttggaccccagagtggtgaggtcaggaaggaggccccgagggatgagaccaaggctgacactgacacagccccagcttcattccctgctcctgggtgctgtgagaactgtggaatcagcttctcaggggatggcacccaaaggcagcggctcaaaacgttgtgcaaagactgtcgagcacagagaattgccttcaaccgggaacagagaatgtttaagcgtgtgggctgtggggagtgtgcagcctgccaggtaacagaagactgtggggcctgctccacctgcctcctgcagctgccccatgatgtggcatcggggctgttctgcaagtgtgaacggagacgctgcctccggattgtggaaaggagccgagggtgtggagtatgccggggctgtcagacccaagaggattgtggccattgccccatctgccttcgccctccccgccctggtctcaggcgccagtggaaatgtgtccagcgacgttgcctacggcaccttgctcaccgcctgcgtcgccgtcatcagagatgtcagcgacgcactcccctggctgtggctcccccaactggtaaacatgcccgccgcaagggaggctgtgactccaagatggctgccaggcggcgccccggagcccagccactgcctccaccacccccatcacagtccccagagcccacagagccgcaccccagagccctggccccctcgccacctgccgagttcatctattactgtgtagacgaggacgagctacagccctacacgaaccgccggcagaaccgcaagtgcggggcctgtgcagcctgcctacggcggatggactgtggccgctgcgacttctgctgcgacaagcccaaattcgggggcagcaaccagaagcgccagaagtgtcgttggcgccaatgcctgcagtttgccatgaagcggctgctgcccagtgtctggtcagagtctgaggatggggcaggatcgcccccaccttaccgtcgtcgaaagaggcccagctctgcccgacggcaccatcttggccctaccttgaagcccaccttggctacacgcacagcccaaccagaccatacccaggctccaacgaagcaggaagcaggtggtggctttgtgctgcccccgcctggcactgaccttgtgtttttacgggaaggcgcaagcagtcctgtgcaggtgccgggccctgttgcagcttccacagaagccctgttgcaggaggcccagtgctctggcctgagttgggttgtggccttaccccaggtgaagcaagagaaggcggatacccaggacgagtggacaccaggcacagctgtcctgacttctcccgtattggtgcctggctgccctagcaaggcagtagacccaggcctgccttctgtgaagcaagagccacctgacccagaggaggacaaggaggagaacaaggatgattctgcctccaaattggccccagaggaagaggcaggaggggctggcacacccgtgatcacggagattttcagcctgggtggaacccgcttccgagatacagcagtctggttgccaaggtccaaagaccttaaaaaacctggagctagaaagcagtagactggaggcttctacagactgtaggattcaaggtgatatttgcagactggctttatgagagacaacactgatctactaggggctggaccctagattggttgccagggcttgtgtgtgaatcaaccctaggaggaaaaacctactaccaaaccagaagagcaggcctaagagtactttgagcttctagaagaagtaagcgggaaaggaagagaaagagtagaaagttggtgcatcttctcctccccaagagcctgagtataagaagttggattttaagggtgggggagctgggttggagaaaggtaatataattaaagccaccacaaaacaacctaaacaagccatgttcatgagtaattgtaagtggcttctggatgagacctggcagtgtctctacatacttcctcagggagatagcaattgaaaatgtaattgaataaataaggaaagg

SEQ ID NO: 17919 - DNA, 2532 bp, Homo sapiens
  source 1..2532: mol_type = unassigned DNA
ggaaggggaggagggcgaggcgggaggtgcaggagggaccctcgccatgggtccacgggcctagagtggcggaagataccggcctggtgccaaactggctactgctgcttcctgtggcctccatggctgaggactggctggactgcccggccctgggccctggctggaagcgccgcgaagtctttcgcaagtcaggggccacctgtggacgctcagacacctattaccagagccccacaggagacaggatccgaagcaaagttgagctgactcgatacctgggccctgcgtgtgatctcaccctcttcgacttcaaacaaggcatcttgtgctatccagcccccaaggcccatcccgtggcggttgccagcaagaagcgaaagaagccttcaaggccagccaagactcggaaacgtcaggttggaccccagagtggtgaggtcaggaaggaggccccgagggatgagaccaaggctgacactgacacagccccagcttcattccctgctcctgggtgctgtgagaactgtggaatcagcttctcaggggatggcacccaaaggcagcggctcaaaacgttgtgcaaagactgtcgagcacagagaattgccttcaaccgggaacagagaatgtttaagagccgagggtgtggagtatgccggggctgtcagacccaagaggattgtggccattgccccatctgccttcgccctccccgccctggtctcaggcgccagtggaaatgtgtccagcgacgttgcctacggggtaaacatgcccgccgcaagggaggctgtgactccaagatggctgccaggcggcgccccggagcccagccactgcctccaccacccccatcacagtccccagagcccacagagccgcaccccagagccctggccccctcgccacctgccgagttcatctattactgtgtagacgaggacgagctaccctacacgaaccgccggcagaaccgcaagtgcggggcctgtgcagcctgcctacggcggatggactgtggccgctgcgacttctgctgcgacaagcccaaattcgggggcagcaaccagaagcgccagaagtgtcgttggcgccaatgcctgcagtttgccatgaagcggctgctgcccagtgtctggtcagagtctgaggatggggcaggatcgcccccaccttaccgtcgtcgaaagaggcccagctctgcccgacggcaccatcttggccctaccttgaagcccaccttggctacacgcacagcccaaccagaccatacccaggctccaacgaagcaggaagcaggtggtggctttgtgctgcccccgcctggcactgaccttgtgtttttacgggaaggcgcaagcagtcctgtgcaggtgccgggccctgttgcagcttccacagaagccctgttgcaggaggcccagtgctctggcctgagttgggttgtggccttaccccaggtgaagcaagagaaggcggatacccaggacgagtggacaccaggcacagctgtcctgacttctcccgtattggtgcctggctgccctagcaaggcagtagacccaggcctgccttctgtgaagcaagagccacctgacccagaggaggacaaggaggagaacaaggatgattctgcctccaaattggccccagaggaagaggcaggaggggctggcacacccgtgatcacggagattttcagcctgggtggaacccgcttccgagatacagcagtctggttgccaaggtattaccaccttgctcttgactggaaatgcaactgtggttaccacctgtgctgcaggtccgtcctggttccctgatttgtgtttcctgttctgcctggatcctgattctcagaaaccagttactggacttctgatccacatcctgaccctggtccactgtgaccctcagactcttaattatgctccaccaggtcgtgccactgccccactagtccatttgatctgcccccatcctaggatatcctgagtctaagccctggtttctgccaatggcaaataggaagattttattaacaggttttaaaaaattattattattactggttatttggtttgacaaggcacttaggctccctgagctttgccttagctggaaaataaggatagtattacttgctattctatcaaccctgtaagatatttgcggccacgcgcggtagcgcaccctgtaattccaacactttgggaggccggcgggaggggcagtggggaggatcgcttgaacccaggagcaggagttccagcctgagcaacatagcgggaccccctgtctcttcaaaatttgtttttaaattagcagggcgtggtggcgcaggctttgtagtcccagatactctggaggctgaggcccaggaggacgaggctgcagggagccatgatcacgccactgcactccaccctgggcgacagagcgagaccttgtctcagaaaaaatctgtgaggttaaaaggctgtgtgtgtgaaaatatcttggaaattgtaaagaactacacaaatataa

SEQ ID NO: 17920 - DNA, 1945 bp, Homo sapiens
  source 1..1945: mol_type = unassigned DNA
atgcgccagctagatgggcagcgaggagagccgcaactgccagtccctcgaaggggttagctgtcgttgaacgtcagcacgcagatgcaactggctctcggcaggggggcgcgcgcaccgctgcggagcgccggcccgtaggcgcgggagcctccctattaagggcacgcgacatcgaggcaatagtgcgcaggctactgctgcttcctgtggcctccatggctgaggactggctggactgcccggccctgggccctggctggaagcgccgcgaagtctttcgcaagtcaggggccacctgtggacgctcagacacctattaccagagccccacaggagacaggatccgaagcaaagttgagctgactcgatacctgggccctgcgtgtgatctcaccctcttcgacttcaaacaaggcatcttgtgctatccagcccccaaggcccatcccgtggcggttgccagcaagaagcgaaagaagccttcaaggccagccaagactcggaaacgtcaggttggaccccagagtggtgaggtcaggaaggaggccccgagggatgagaccaaggctgacactgacacagccccagcttcattccctgctcctgggtgctgtgagaactgtggaatcagcttctcaggggatggcacccaaaggcagcggctcaaaacgttgtgcaaagactgtcgagcacagagaattgccttcaaccgggaacagagaatgtttaagcgtgtgggctgtggggagtgtgcagcctgccaggtaacagaagactgtggggcctgctccacctgcctcctgcagctgccccatgatgtggcatcggggctgttctgcaagtgtgaacggagacgctgcctccggattgtggaaaggagccgagggtgtggagtatgccggggctgtcagacccaagaggattgtggccattgccccatctgccttcgccctccccgccctggtctcaggcgccagtggaaatgtgtccagcgacgttgcctacggggtaaacatgcccgccgcaagggaggctgtgactccaagatggctgccaggcggcgccccggagcccagccactgcctccaccacccccatcacagtccccagagcccacagagccgcaccccagagccctggccccctcgccacctgccgagttcatctattactgtgtagacgaggacgagctaaagcggctgctgcccagtgtctggtcagagtctgaggatggggcaggatcgcccccaccttaccgtcgtcgaaagaggcccagctctgcccgacggcaccatcttggccctaccttgaagcccaccttggctacacgcacagcccaaccagaccatacccaggctccaacgaagcaggaagcaggtggtggctttgtgctgcccccgcctggcactgaccttgtgtttttacgggaaggcgcaagcagtcctgtgcaggtgccgggccctgttgcagcttccacagaagccctgttgcaggcagtagacccaggcctgccttctgtgaagcaagagccacctgacccagaggaggacaaggaggagaacaaggatgattctgcctccaaattggccccagaggaagaggcaggaggggctggcacacccgtgatcacggagattttcagcctgggtggaacccgcttccgagatacagcagtctggttgccaagggcaggcactcgggaagggaagatggatgtaaagtgtgggagaccgaggacacagtggagcccacgagcacgagctggaacccacgaggatggcctggaacccatgtcagtctctcaccacctccagcttcgatgatgtgggtgtcctgcagaagaagctggtgcccttcctcacagagttaaatatgcatctggcccaggaattagagaagctgaaaggatgatcctggggaaggtggagcagctgcaggcctg

SEQ ID NO: 17921 - DNA, 2913 bp, Homo sapiens
  source 1..2913: mol_type = unassigned DNA
gatgcaactggctctcggcaggggggcgcgcgcaccgctgcggagcgccggcccgtaggcgcgggagcctccctattaagggcacgcgacatcgaggcaatagtgcgcaggtgcttagccagaggcggagcccgagaggcaggcagcggacttccggttccgggagcaacgaacagccgcggaggcgacagctaccgcttcagaggaggcggccgcggaggaggaggaaggggaggagggcgaggcgggaggtgcaggagggaccctcgccatgggtccacgggcctagagtggcggaagataccggcctggtgccaaactggctactgctgcttcctgtggcctccatggctgaggactggctggactgcccggccctgggccctggctggaagcgccgcgaagtctttcgcaagtcaggggccacctgtggacgctcagacacctattaccagagccccacaggagacaggatccgaagcaaagttgagctgactcgatacctgggccctgcgtgtgatctcaccctcttcgacttcaaacaaggcatcttgtgctatccagcccccaaggcccatcccgtggcggttgccagcaagaagcgaaagaagccttcaaggccagccaagactcggaaacgtcaggttggaccccagagtggtgaggtcaggaaggaggccccgagggatgagaccaaggctgacactgacacagccccagcttcattccctgctcctgggtgctgtgagaactgtggaatcagcttctcaggggatggcacccaaaggcagcggctcaaaacgttgtgcaaagactgtcgagcacagagaattgccttcaaccgggaacagagaatgtttaagcgtgtgggctgtggggagtgtgcagcctgccaggtaacagaagactgtggggcctgctccacctgcctcctgcagctgccccatgatgtggcatcggggctgttctgcaagtgtgaacggagacgctgcctccggattgtggaaaggagccgagggtgtggagtatgccggggctgtcagacccaagaggattgtggccattgccccatctgccttcgccctccccgccctggtctcaggcgccagtggaaatgtgtccagcgacgttgcctacggggtaaacatgcccgccgcaagggaggctgtgactccaagatggctgccaggcggcgccccggagcccagccactgcctccaccacccccatcacagtccccagagcccacagagccgcaccccagagccctggccccctcgccacctgccgagttcatctattactgtgtagacgaggacgagctacagccctacacgaaccgccggcagaaccgcaagtgcggggcctgtgcagcctgcctacggcggatggactgtggccgctgcgacttctgctgcgacaagcccaaattcgggggcagcaaccagaagcgccagaagtgtcgttggcgccaatgcctgcagtttgccatgaagcggctgctgcccagtgtctggtcagagtctgaggatggggcaggatcgcccccaccttaccgtcgtcgaaagaggcccagctctgcccgacggcaccatcttggccctaccttgaagcccaccttggctacacgcacagcccaaccagaccatacccaggctccaacgaagcaggaagcaggtggtggctttgtgctgcccccgcctggcactgaccttgtgtttttacgggaaggcgcaagcagtcctgtgcaggtgccgggccctgttgcagcttccacagaagccctgttgcaggaggcccagtgctctggcctgagttgggttgtggccttaccccaggtgaagcaagagaaggcggatacccaggacgagtggacaccaggcacagctgtcctgacttctcccgtattggtgcctggctgccctagcaaggcagtagacccaggcctgccttctgtgaagcaagagccacctgacccagaggaggacaaggaggagaacaaggatgattctgcctccaaattggccccagaggaagaggcaggaggggctggcacacccgtgatcacggagattttcagcctgggtggaacccgcttccgagatacagcagtctggttgccaagtctgcagggcaggcactcgggaagggaagatggatgtaaagtgtgggagaccgaggacacagtggagcccacgagcacgagctggaacccacgaggatggcctggaacccatgtcagtctctcaccacctccagcttcgatgatgtgggtgtcctgcagaagaagctggtgcccttcctcacagagttaaatatgcatctggcccaggaattagagaagctgaaaggatgatcctggggaaggtggagcagctgcaggcctggctgcaggcctgactactgcccacaccaacgaggtgatctagcagatacatggcaacgtgtgaactgcaacaacgcctggtgccccagcaccaaccttccaagtgtaaaaacaatgtgctgctgcttcacttccgccctccggttatcaagcaaaatgtctcttgtggcccatcttactggaagagagttccgggaaacatagcctcaccaaggtgacacattacaaagccaccctaccatgaatccgctcccaagggtctcactgctcacctgaggataactcaatataactatgtggctgaaaatgcaaagctgaagaccatggatttcatggtgattccagcaagtacagagattctatgaagcccacccagaaaaaacttgctggtcctggctatttttgtgtcatttattcaagtattgagaacctggcctgtggtaggcactgtacttaatactaggatacagaaatgcaaaagatacggcccatgcaattttattaaatgcatcaatatgtattacaaa

SEQ ID NO: 17922 - DNA, 5188 bp, Homo sapiens
  source 1..5188: mol_type = unassigned DNA
gggggcgtggccccgagaaggcggagacaagatggccgcccatagcgcttggaggacctaagaggcggtggccggggccacgccccgggcaggagggccgctctgtgcgcgcccgctctatgatgcttgcgcgcgtcccccgcgcgccgcgctgcgggcggggcgggtctccgggattccaagggctcggttacggaagaagcgcagcgccggctggggagggggctggatgcgcgcgcacccggggggaggccgctgctgcccggagcaggaggagggggagagtgcggcgggcggcagcggcgctggcggcgactccgccatagagcaggggggccagggcagcgcgctcgccccgtccccggtgagcggcgtgcgcagggaaggcgctcggggcggcggccgtggccgggggcggtggaagcaggcgggccggggcggcggcgtctgtggccgtggccggggccggggccgtggccggggacggggacggggccggggccggggccgcggccgtcccccgagtggcggcagcggccttggcggcgacggcggcggctgcggcggcggcggcagcggtggcggcggcgccccccggcgggagccggtccctttcccgtcggggagcgcggggccggggcccaggggaccccgggccacggagagcgggaagaggatggattgcccggccctcccccccggatggaagaaggaggaagtgatccgaaaatctgggctaagtgctggcaagagcgatgtctactacttcagtccaagtggtaagaagttcagaagcaagcctcagttggcaaggtacctgggaaatactgttgatctcagcagttttgacttcagaactggaaagatgatgcctagtaaattacagaagaacaaacagagactgcgaaacgatcctctcaatcaaaataagggtaaaccagacttgaatacaacattgccaattagacaaacagcatcaattttcaaacaaccggtaaccaaagtcacaaatcatcctagtaataaagtgaaatcagacccacaacgaatgaatgaacagccacgtcagcttttctgggagaagaggctacaaggacttagtgcatcagatgtaacagaacaaattataaaaaccatggaactacccaaaggtcttcaaggagttggtccaggtagcaatgatgagacccttttatctgctgttgccagtgctttgcacacaagctctgcgccaatcacagggcaagtctccgctgctgtggaaaagaaccctgctgtttggcttaacacatctcaacccctctgcaaagcttttattgtcacagatgaagacatcaggaaacaggaagagcgagtacagcaagtacgcaagaaattggaagaagcactgatggcagacatcttgtcgcgagctgctgatacagaagagatggatattgaaatggacagtggagatgaagcctaagaatatgatcaggtaactttcgaccgactttccccaagagaaaattcctagaaattgaacaaaaatgtttccactggcttttgcctgtaagaaaaaaaatgtacccgagcacatagagctttttaatagcactaaccaatgcctttttagatgtatttttgatgtatatatctattattcaaaaaatcatgtttattttgagtcctaggacttaaaattagtcttttgtaatatcaagcaggaccctaagatgaagctgagcttttgatgccaggtgcaatctactggaaatgtagcacttacgtaaaacatttgtttcccccacagttttaataagaacagatcaggaattctaaataaatttcccagttaaagattattgtgacttcactgtatataaacatatttttatactttattgaaaggggacacctgtacattcttccatcatcactgtaaagacaaataaatgattatattcacagactgattggaattctttctgttgaaaagcacacacaataaagaacccctcgttagccttcctctgatttacattcaactctgatccctgggccttaggtttgacatggaggtggaggaagatagcgcatatatttgcagtatgaactattgcctctggacgttgtgagaattgtgctttcaccagaatttctaagaatttctgctaaatatcacctagcatgtgtaattttttttccttgcctgtgacttggacttttgatagttctataagaataaggctttttcttcccttgggcatgagtcagatacacaaggacccttcaggtgttactagaaggcgtccatgtttattgttttttaaagaatgtttggcactctctaacgtccactagcttactgagttatcaggtgcaggtcagactcttggctacagtgagaggcagcttctagacagagttgcttaatgaaagggtttgtaatactttacaaaccattacctgtacctggcctggcctccaaaatattaacattctttttctgttgaaactcgcgagtgtaactttcataccacttgaatttattgatatttaattatgaaaactagcattacattattaaacgatttctaaaatcaaaacatacttaatctgataccaaggaagggagggagtggttataagcaaatgaaaacaaattttgagagacagagcaaaagtaaaatcattctatagaaaaggtgtgtttatttcttaactcttgagttcttttaaaattagaacctaaatgatgcagtcaggggtatgaccaattccacatgagtgtcacctgtacattttattaccactacctccagtttccaaggcagggaagaagaggggaatagtcaaagcaatatgactagctaggtttgggctgctgtttgggctgctgtttttcctggacttttatgccaaactacataaatacttcttggaattcctgatttacgctcaactttgatccctggaccctagggccattagtttccttgaagcagtcctgctggtggatgagcagggaaacttgtagaccctgggaagccaattggtagagggtgcctgcccgccccatcagactgtcccaactggggtgggggtgaggatcatagtgatttctttttaaaagctagtatgactagtgagaatggatgtccaagggcttttctcttcctcccccgagtccacgattcttcatttgtgatcagggttggggtaacttcaccttggtgatcatatattctttttacaaaccaatccagccaagatatatgtgcttttctaaacagcttgtaaaagcaaaaacacaatgtatacacatataaaactgatttttttttttttgcttatatactttgctcaggtggagaacaaggtatgaaagccattatatggtgtcccttggggaccatcccataagtccagggtgttcccaatatacccacaagacaacatgttcaaaacttcatcacctggtccccacaaacctaccaccctcttccattccctcactctggtaaaagcaagccatcttctccagttacgcaaggcagaagcccaggagtgagcacaatgctgccctttcccttgcttctgacttctcatcaatcctattagaactactgactgcaccccacctctcctccatccccacgatcactgccttcatatgaactgcctttcctgtcctctggactttcagtggcttccttttttgctcacctgtccactttcttccccttccctctctccatccctccacatagtcatcagaaagatcatcaaaacaggcaaatgtgactgtattatttccctcacttatctttgtatgcagtttagagtgatttttaagagcacacactttgaaattaggagaacctgtgtctgaatcctgatttttgccatttgtgtgacttgtcaggttatttaatctctttgagcctgtccctcctcagtgaaataggaataataatacctacctcatagagttgttgtgaggattcagtgagatagactgtttctaaagtgtgtagcacagtgcctggcacatagtgggtgctcacattggagcacactattgtcgctatccctgcaggtgtgagttttacatcctttccaagaggcatttgctaataaccctaactaccgcctatccctgtgacactattttctgcctcagcaccctatttcttttgtagacattttctaagtctgtattttatttatttgttggctttttgtctatttctctactagaatgtaagctccatgagagcaaggatgtgtttgtctgatttcccgttacagccccagcacttagctgagtgactggcacctagtaagcactcagtaactgtttgctgaataaatggaagaatggtcaaaaggctcttcttgatctgatccctgcttgtctgtctggcctcatgctgccactattcctcactgcaccttcagctcaagaaaaacctctttacttgcttctttgaagtgccccttgggcctctgtgtctttgtacctgttgttccctttgcctgaaacaccctttgcctgcccgtctacatggtgaattcctaatcattgatgaagtctcagctcaatggctacctcctctgtgaagctgtccctgatttcttcaggcagatgttctttcccgccttccctgttcccaccgcactttgtaaatacctccatggaagcactttattgtattgtattgtaatttttttttgcatgtctgtttctactattagactgtaagcaccgtaaaagcagagattgtgctttttcatcctcatgttccccgagcctagcccagtgcctggcacgtaatagcttgtcattaaatatttgttgaatgaatctgtgaatgaacaagagtcatgcagttggaaaagtgttagaagctgtatgtattataaaggaaagaaatgcccttggtggcttccagggtgtttttttttttttttttggtctaaagaggagatctagagagtgttatacaatctctttgaatataagattactcgtttggatttttaaaataatatagatcttcataaataattgcaaagatataaacaagctttgtgatttctcaaatgctatgaagtccaaaataaatatttgcactattagtatttccatagtaaatgctatgagaaaatgtacagcaataaattttgaagctttaaaactgtt

SEQ ID NO: 17923 - DNA, 1357 bp, Homo sapiens
  source 1..1357: mol_type = unassigned DNA
gggggcgtggccccgagaaggcggagacaagatggccgcccatagcgcttggaggacctaagaggcggtggccggggccacgccccgggcaggagggccgctctgtgcgcgcccgctctatgatgcttgcgcgcgtcccccgcgcgccgcgctgcgggcggggcgggtctccgggattccaagggctcggttacggaagaagcgcagcgccggctggggagggggctggatgcgcgcgcacccggggggaggccgctgctgcccggagcaggaggagggggagagtgcggcgggcggcagcggcgctggcggcgactccgccatagagcaggggggccagggcagcgcgctcgccccgtccccggtgagcggcgtgcgcagggaaggcgctcggggcggcggccgtggccgggggcggtggaagcaggcgggccggggcggcggcgtctgtggccgtggccggggccggggccgtggccggggacggggacggggccggggccggggccgcggccgtcccccgagtggcggcagcggccttggcggcgacggcggcggctgcggcggcggcggcagcggtggcggcggcgccccccggcgggagccggtccctttcccgtcggggagcgcggggccggggcccaggggaccccgggccacggagagcgggaagaggatggattgcccggccctcccccccggatggaagaaggaggaagtgatccgaaaatctgggctaagtgctggcaagagcgatgtctactacttcagtccaagtggtaagaagttcagaagcaagcctcagttggcaaggtacctgggaaatactgttgatctcagcagttttgacttcagaactggaaagatgatgcctagtaaattacagaagaacaaacagagactgcgaaacgatcctctcaatcaaaataagctgcgctggaacactcatcgtcctgcaccatggcatgcgctttcaagactctgcttgctcatacgctgtttgctctgcttggaatgtgcttacccccttccccttcatctggtgaactcctactcatccaagacccagcttcattgtctccatctctgggaagcctgccctgcatactccaggcagaaccaatcctttcctccataatgcttccctggtgctttgccattgtatttgtgacttgtttgtctgcttcagctagactgtgagctccatgagggcagggaccatgtctttttttgcttttgcacacggtaggtacttaatattgctttatgtttatttgatttaccatccacctcattctagaagtgtatagtggtaataaatgtttattaaataaataaattataccgtacattattt

SEQ ID NO: 17924 - DNA, 1182 bp, Homo sapiens
  source 1..1182: mol_type = unassigned DNA
cgggattccaagggctcggttacggaagaagcgcagcgccggctggggagggggctggatgcgcgcgcacccggggggaggccgctgctgcccggagcaggaggagggggagagtgcggcgggcggcagcggcgctggcggcgactccgccatagagcaggggggccagggcagcgcgctcgccccgtccccggtgagcggcgtgcgcagggaaggcgctcggggcggcggccgtggccgggggcggtggaagcaggcgggccggggcggcggcgtctgtggccgtggccggggccggggccgtggccggggacggggacggggccggggccggggccgcggccgtcccccgagtggcggcagcggccttggcggcgacggcggcggctgcggcggcggcggcagcggtggcggcggcgccccccggcgggagccggtccctttcccgtcggggagcgcggggccggggcccaggggaccccgggccacggagagcgggaagaggatggattgcccggccctcccccccggatggaagaaggaggaagtgatccgaaaatctgggctaagtgctggcaagagcgatgtctactacttcagtccaagtggtaagaagttcagaagcaagcctcagttggcaaggtacctgggaaatactgttgatctcagcagttttgacttcagaactggaaagatgatgcctagtaaattacagaagaacaaacagagactgcgaaacgatcctctcaatcaaaataagctgcgctggaacactcatcgtcctgcaccatggcatgcgctttcaagactctgcttgctcatacgctgtttgctctgcttggaatgtgcttacccccttccccttcatctggtgaactcctactcatccaagacccagcttcattgtctccatctctgggaagcctgccctgcatactccaggcagaaccaatcctttcctccataatgcttccctggtgctttgccattgtatttgtgacttgtttgtctgcttcagctagactgtgagctccatgagggcagggaccatgtctttttttgcttttgcacacggtaggtacttaatattgctttatgtttatttgatttaccatccacctcattctagaagtgtatagtggtaataaatgtttattaaataaataaattataccgtacatt

SEQ ID NO: 17925 - DNA, 2559 bp, Homo sapiens
  source 1..2559: mol_type = unassigned DNA
gcgggccgaggagccgggcgcaatggagcggaagaggtgggagtgcccggcgctcccgcagggctgggagagggaagaagtgcccagaaggtcggggctgtcggccggccacagggatgtcttttactatagcccgagcgggaagaagttccgcagcaagccgcagctggcgcgctacctgggcggctccatggacctgagcaccttcgacttccgcacgggcaagatgctgatgagcaagatgaacaagagccgccagcgcgtgcgctacgactcctccaaccaggtcaagggcaagcccgacctgaacacggcgctgcccgtgcgccagacggcgtccatcttcaagcagccggtgaccaagattaccaaccaccccagcaacaaggtcaagagcgacccgcagaaggcggtggaccagccgcgccagctcttctgggagaagaagctgagcggcctgaacgccttcgacattgctgaggagctggtcaagaccatggacctccccaagggcctgcagggggtgggacctggctgcacggatgagacgctgctgtcggccatcgccagcgccctgcacactagcaccatgcccatcacgggacagctctcggccgccgtggagaagaaccccggcgtatggctcaacaccacgcagcccctgtgcaaagccttcatggtgaccgacgaggacatcaggaagcaggaagagctggtgcagcaggtgcggaagcggctggaggaggcgctgatggccgacatgctggcgcacgtggaggagctggcccgtgacggggaggcgccgctggacaaggcctgcgctgaggacgacgacgaggaagacgaggaggaggaggaggaggagcccgacccggacccggagatggagcacgtctagggcaggtgctgcggggccacgggggctccctggagtcgggtcctggcagtggggactgcctggtgaacacagatgtgcttgggatgacgggtgcctcccaagagcttcccatctccctagaagagcccaagcgtccccgtcccgtggagtcgctaaagccagccctccctgtcctttccagaggccctgccgagagcccgtgctgcctgctggagccgcctgcagacgcggtcctcggccccacgtgaaccaggctcggcggcgaagcccagccttggagacacccaggaggaaggccgtgctcctggctccctcctcggcccgtccccacttcccggggcctcggggcacacagctggggctgcccccacccgaaagaccctccacgctcgtcctctacagagtccggcttcgggaagtgccgggtgctcctgggccctgcctggctccctacgacctttgggctcgaggccagctcctccccatgcccgctgtcccagctccttgagactggagagcagccagcaggtgcccggcagctcggcgccacggcttgctgacagctgggagggtttctcggtctggaggcgtagttttgaaactcacatcacccactgtgcagcgtgaggacgggactctggtctgctgtggggggcatgcaggacggcgccactctctgccctgccatgcggctggtggtgccacagagcctcaccgtgcctgagtggcatgcccaggaggccgctctccttcagtaaatgtaacacagtcgaggcacgtcatcgggcagccttccctgtgtgccaacgccagccttcgcttctgaaaaccaaactccagccgctgccagtcgggacttggtcgcccggcgctgccagaatgctccactgccagccggcccccctgcctcggtttcccttctgtttagtggcgacacaggcacccagctttggggtggtgctgacgctcccaggggtgccaggagccactgggacagggtgaggctcccagacgctcctcgaggtgcccagctctccagggagcttctggcccaaggccgtctgagggatctgctccttaaccccccagtgccttggcgagggcaggttccaagccacagacgcctgccccgagtggactctgcggccagtccctggtgccctcctggccctgctgcccagtgagggctcctacgggtgggttcattggcctgggcccagcgagcccccacctgcattgaccttaggcccatagagagggcctgtcccggtgctgccccagccaggatctggtcgctgccccagggggactgatgggcagagtcgcccctgtggctggactgtgaccatccctgatggggcctgaccgcgggagctgaggaagcgccgctccaccgtctgccctccaaggacccgcatggaggcagtgggctggcagcttcctgctgctccctgtcagagtcaaagcacaaatcctcaggacgggctcaagggccagggcagccgagggaagctccaggtggggaccacgtcttcctgaggttggtgcccactggctgggaccctttgcagtggggtggcctcccctctgtctgcctggtggagggagccgtgggcgtggggacgtgactgaataaagccaccatgggtggatgtgcttgg

SEQ ID NO: 17926 - DNA, 2345 bp, Homo sapiens
  source 1..2345: mol_type = unassigned DNA
gaggcagctgaggcggcggcggcgagtgggggtccgggcggcggcggcgggcccggcggcgggccgaggagccgggcgcaatggagcggaagagcccgagcgggaagaagttccgcagcaagccgcagctggcgcgctacctgggcggctccatggacctgagcaccttcgacttccgcacgggcaagatgctgatgagcaagatgaacaagagccgccagcgcgtgcgctacgactcctccaaccaggtcaagggcaagcccgacctgaacacggcgctgcccgtgcgccagacggcgtccatcttcaagcagccggtgaccaagattaccaaccaccccagcaacaaggtcaagagcgacccgcagaaggcggtggaccagccgcgccagctcttctgggagaagaagctgagcggcctgaacgccttcgacattgctgaggagctggtcaagaccatggacctccccaagggcctgcagggggtgggacctggctgcacggatgagacgctgctgtcggccatcgccagcgccctgcacactagcaccatgcccatcacgggacagctctcggccgccgtggagaagaaccccggcgtatggctcaacaccacgcagcccctgtgcaaagccttcatggtgaccgacgaggacatcaggaagcaggaagagctggtgcagcaggtgcggaagcggctggaggaggcgctgatggccgacatgctggcgcacgtggaggagctggcccgtgacggggaggcgccgctggacaaggcctgcgctgaggacgacgacgaggaagacgaggaggaggaggaggaggagcccgacccggacccggagatggagcacgtctagggcagaggccctgccgagagcccgtgctgcctgctggagccgcctgcagacgcggtcctcggccccacgtgaaccaggctcggcggcgaagcccagccttggagacacccaggaggaaggccgtgctcctggctccctcctcggcccgtccccacttcccggggcctcggggcacacagctggggctgcccccacccgaaagaccctccacgctcgtcctctacagagtccggcttcgggaagtgccgggtgctcctgggccctgcctggctccctacgacctttgggctcgaggccagctcctccccatgcccgctgtcccagctccttgagactggagagcagccagcaggtgcccggcagctcggcgccacggcttgctgacagctgggagggtttctcggtctggaggcgtagttttgaaactcacatcacccactgtgcagcgtgaggacgggactctggtctgctgtggggggcatgcaggacggcgccactctctgccctgccatgcggctggtggtgccacagagcctcaccgtgcctgagtggcatgcccaggaggccgctctccttcagtaaatgtaacacagtcgaggcacgtcatcgggcagccttccctgtgtgccaacgccagccttcgcttctgaaaaccaaactccagccgctgccagtcgggacttggtcgcccggcgctgccagaatgctccactgccagccggcccccctgcctcggtttcccttctgtttagtggcgacacaggcacccagctttggggtggtgctgacgctcccaggggtgccaggagccactgggacagggtgaggctcccagacgctcctcgaggtgcccagctctccagggagcttctggcccaaggccgtctgagggatctgctccttaaccccccagtgccttggcgagggcaggttccaagccacagacgcctgccccgagtggactctgcggccagtccctggtgccctcctggccctgctgcccagtgagggctcctacgggtgggttcattggcctgggcccagcgagcccccacctgcattgaccttaggcccatagagagggcctgtcccggtgctgccccagccaggatctggtcgctgccccagggggactgatgggcagagtcgcccctgtggctggactgtgaccatccctgatggggcctgaccgcgggagctgaggaagcgccgctccaccgtctgccctccaaggacccgcatggaggcagtgggctggcagcttcctgctgctccctgtcagagtcaaagcacaaatcctcaggacgggctcaagggccagggcagccgagggaagctccaggtggggaccacgtcttcctgaggttggtgcccactggctgggaccctttgcagtggggtggcctcccctctgtctgcctggtggagggagccgtgggcgtggggacgtgactgaataaagccaccatgggtggatgtgcttgg

SEQ ID NO: 17927 - DNA, 5992 bp, Homo sapiens
  source 1..5992: mol_type = unassigned DNA
aaccaaccagccacccgtcagagagggacatgcgcactccagggaaggcactcaaaagtggggggcaggaaagatgtacattgaagatgtcagtttctacatgtgggaagtagacattgaaggctttatggtttacagacaagatctttagaagataagcactaaaggaccaaggaaataaataccagaaatcaagaagagcacacactattttccttcatcaatccatagaaccctaatgcttctttagttccatcaaacacagaggaatgaccaccatggcagatggcaacagaggatgtcaacaattttttggagagagaagaggtactcccttatagggactcgtaaagacatagagcatctggaaattaactgcctccattacactgctgagtcacacacaacgcttgttatgttttcatcacttctctccagaaggctacattattggaattttgaagtcatgaaaacatcagatgaaccaacctgcaacaccttggattcagattggaagataaagagaaagtttaaagaatgtggcctataaaggcgggtacctggaaatattaaccgactcacactgtaaaaatgagaccagtttctaaacaatagagattgtcttagtacaacatcaaggttcaagacaaatgttgaactaaaaactttacactccccacccccacttcagacaggtaccagcattggtgaattatgattttccttagtcagaagcactcatttttacccatgtagaccatccttaggaattaaatattggttatttaatgtagattataatgggaagctgatttttttcacaatggcatatttcaaggacttggttccaaactgagctgaagcttcccaatgcgttttgtacagtctgggaaaaactgtgctgcactggcccacttttgaaggccatcatgctctgtaatataaggatatcatcttattgctgatatctttggagagtccctagcagacacagaaaatgaatggaggcaaagagtgtgacggaggggacaaggaaggaggtcttccagctatacaagttcctgtgggttggcagcgtcgtgtggatcaaaatggagtgctttatgtcagtcccagtgggtctttgttatcttgcttggagcaggttaaaacatacctgcttactgatggaacatgcaagtgtggcttggaatgtcctcttattcttcccaaggtatttaattttgatcctggagctgctgtgaaacagagaaccgcagaagatgttaaggcagatgaagatgtcacaaagctatgcatacataaaagaaaaattattgcagtggccacacttcataaaagcatggaagccccacatccttctctggtgctcaccagtcccggaggaggaacaaatgcaactccagtagtaccttctcgggcagcaactccaagatcagtaagaaataagtctcatgaaggaattacaaattctgtaatgcctgaatgtaagaatcctttcaagttaatgattggatcatcaaatgccatgggaaggctatatgtacaagaactgcctggaagccaacaacaagaactccaccctgtctacccccgacagagattgggcagcagtgaacatggacagaaatctccattccgtggcagccatggaggcctgcccagcccagcgtcatcaggttcccagatatatggagatggttcaatctctccaaggactgacccacttggaagtcctgatgttttcacaagaagtaatcctggttttcatggagctcccaattctagtcctattcacctgaataggactcctctttctccaccttcagtaatgctacatggttctcctgtacagtcatcctgtgcaatggctggaaggactaatatacctctttccccaaccttgactacaaagagtccagtaatgaaaaaaccaatgtgtaatttttcaactaatatggaaataccacgagcaatgttccaccacaaaccaccccaaggcccacctccccctcctccaccttcttgtgctcttcagaaaaagccattaacatctgagaaagatccacttggcattcttgaccctattcctagtaaaccagtgaatcagaaccctgttatcattaatccaaccagtttccattcaaatgtccactctcaggtacctatgatgaatgtaagcatgcctcctgctgttgttcctttgccaagtaatctcccattgccaactgtaaaacctggtcacatgaatcatgggagtcatgtacaaagagttcagcattcagcttcaacctccctgtccccttctccagtgacatcccccgtgcacatgatggggactggaattggaaggattgaggcatcgccccaaagatcacgctcatcttccacatcatcagatcatggaaatttcatgatgccacctgtaggaccccaggccacttctagtggtattaaggttccacccaggtcaccaaggtcaacaatagggtccccaaggccatcaatgccatcaagcccttctaccaagtccgatggacatcatcagtacaaggatatccctaacccattaattgctggaataagtaatgtactaaataccccaagcagtgcagcttttcctactgcatctgccggaagtagttctgtaaagagtcagcctggtttgctgggaatgcctttaaatcagatcttgaaccagcacaatgctgcctcctttccagcaagtagtttactctcagcagcagccaaagcacagctagcaaatcaaaacaaacttgctggtaacaacagtagcagcagtagcaattctggagctgttgccggcagtggcaacactgaaggacatagcactttaaacaccatgttccctcctactgccaacatgcttctcccaacaggtgaagggcaaagtggtcgagcagcactaagagataagctgatgtctcagcaaaaagacgcattgcggaaaagaaaacaaccacctacgacagtgttgagtttgctcagacagtctcaaatggatagttctgcagttcctaaacctggacctgacttgctaaggaagcagggtcagggttcatttcccatcagttcaatgtctcagttactacagtctatgagttgtcaaagctctcacttgagtagcaatagtaccccgggttgtggggcctcaaatactgctttgccttgctctgctaaccagctgcattttacagatcccagtatgaactctagtgttcttcagaacatacctttaagaggggaagccgtgcactgccacaatgcaaacactaactttgttcacagtaacagtccagtccccaaccaccatcttgcaggtttaataaatcagattcaggctagcgggaactgtgggatgctcagtcagtcgggcatggctttaggaaattccttacatcccaatccacctcagtcaagaatttcaacgtcctccactccagtgataccaaacagcattgttagcagctataatcaaacaagttctgaagcaggcggttcaggaccatcatcctccatagccatagcgggcaccaaccaccctgccatcacaaagacaacatctgttcttcaagatggcgtcatagtcaccactgcagctggaaacccactgcagagtcagctacccattgggagtgattttccttttgttggccaggagcacgcacttcattttccatccaacagcacttcaaacaaccatcttccacaccccttgaaccccagcctcctcagttctctacctatctctttgccagtgaatcaacagcatctcctaaaccagaatctattaaatatcctccagccttcagcaggagaaggtgatatgtcatcaataaacaatactttgagtaaccatcaactgactcatctacagtcgctgttaaacaacaatcagatgtttcctccaaatcagcaacagcagcaacttctccaggggtaccagaatctccaggcgttccaaggacagtccacaattccttgcccagctaacaataaccccatggcttgtctgtttcagaactttcaggtgagaatgcaggaagatgcagctctcctaaacaaaagaataagcactcagcctgggctcacagcacttcctgagaatccaaacactacacttccaccttttcaagatacaccttgtgagttgcaaccgaggattgacccatctcttggtcaacaggtgaaggatggcctcgttgtgggtggcccaggtgatgcttccgtagatgccatttacaaagcagttgtcgatgcagccagcaaaggaatgcaggttgtcatcaccactgcagtcaacagtacaactcagatcagccccattccagctctgagtgccatgagtgccttcactgcctcaattggtgacccattaaatctctccagtgctgtcagtgcggtcattcatggacggaacatgggaggtgttgatcatgatggtaggctgaggaattcaagaggggctcggctgcccaagaatctagaccatgggaaaaatgtgaacgaaggagatgggtttgaatatttcaagtcagcaagttgccacacatccaaaaaacagtgggacggggagcaaagccccagaggggagcgaaacaggtggaagtacgaggaatttttagatcatccaggccatatccacagtagtccttgtcatgaaaggcccaacaatgtctctacactgccatttctgcctggggaacagcacccaatactgttaccaccaagaaactgtccaggggataaaattctagaggaaaatttcaggtataataactacaaaagaactatgatgagttttaaggagagactagagaacactgtggaaagatgtgcacacataaatgggaatagacctcgacagagtcggggatttggagagctgctaagcactgcaaagcaagacctggtcctagaggagcagtctccaagttcctcaaatagtttggaaaattctctggtcaaagactacatccattacaatggagactttaatgccaaaagcgttaatgggtgtgtgcctagcccttcagatgctaaaagcattagtagtgaagatgacctaaggaacccagactccccctcttcaaatgaattgatacattatagaccaaggacgttcaatgttggcgacttggtctggggccaaatcaaaggactgacttcctggcctggaaaattagtaagagaagacgacgttcacaattcatgtcaacaaagccccgaggaagggaaggtggagcccgagaagttgaagacactaacagaaggtttggaagcctacagccgtgtccggaaaaggaacagaaaaagtggaaagctaaataaccatttagaagctgctattcatgaggccatgagtgaactggacaaaatgtctgggactgtacaccaaatcccacagggtgacagacaaatgagaccccccaaacccaagaggaggaagatctccagataacagagactactccactaatgcgcagtgtttattaaaggaacatgcacagatgtatctgtatataggtattgatatagccacagttatatcaatatttagactatggcagatagctaccaccaccacagggtgctaaaagaaacagtgatacaaaatttttttgatcaggaaggataatgaatgctggaaaagccaatcaaagtctctgtgtgatgagagtgatcaatggtcaagagattactgagaaactctttttctataatactaaattgtgattataagaaatagtccaaatgtttctgaagaattttcaatgttgtatatagaaaatacagaatttcatggtgatatcagaaatgtaaatattgtacagtattgtcatgtacaagcgtacctaatgcacactttatcttttattgtacaaagaaatagtgtacaaaattctttggtttctatggagtacacctaccagagactaccagtgtaaagtgataaataaaaatacaacct

SEQ ID NO: 17928 - DNA, 2545 bp, Homo sapiens
  source 1..2545: mol_type = unassigned DNA
acattcttggatcagcccaaaggtaggctcaggctccgacggtggccggcgggggtcacgaggcttcgtagtggaggaacgggtttggcgtgtgggacgcagctgcctctgtactggggagtcacggagtggccgggctccagggacatggcggcggcctctgcggtgtcggtgctgctggtggcggcggagaggaaccggtggcatcgtctcccgagcctgctcctgccgccgaggacatgggtgtggaggcaaagaaccatgaagtacacaacagccacaggaagaaacattaccaaggtcctcattgcaaacagaggagaaattgcctgcagggtgatgcgcacagccaaaaaactgggtgtacagactgtggcggtttatagtgaggctgacagaaattccatgcatgtagatatggcagatgaagcatattccatcggccccgctccctcccagcagagctacctatctatggagaaaatcattcaagtggccaagacctctgctgcacaggctatccatccaggatgcggttttctctcagaaaacatggaatttgctgaactttgtaagcaagaaggaattatttttataggccctcctccatctgcaattagagacatgggtataaagagcacatccaaatccataatggctgctgctggagtacctgttgtggagggttatcatggtgaggaccaatcagaccagtgcctgaaggaacacgccaggagaattggctatcctgtcatgattaaagccgtccggggtggaggaggaaaaggaatgaggattgttagatcagaacaagaatttcaagaacagttagagtcagcacggagagaagctaagaagtctttcaatgatgatgctatgctgatcgagaagtttgtagacacaccgaggcatgtagaagtccaggtgtttggtgatcaccatggcaatgctgtgtacttgtttgaaagagactgtagtgtgcagaggcgacatcagaagatcattgaggaggccccagcgcctggtattaaatctgaagtaagaaaaaagctgggagaagctgcagtcagagctgctaaagctgtaaattatgttggagcagggactgtggagtttattatggactcaaaacataatttctgtttcatggagatgaatacaaggctgcaagtggaacatcctgttactgagatgatcacaggaactgacttggtggagtggcagcttagaattgcagcaggagagaagattcctttgagccaggaagaaataactctgcagggccatgccttcgaagctagaatatatgcagaagatcctagcaataacttcatgcctgtggcaggcccattagtgcacctctctactcctcgagcagacccttccaccaggattgaaactggagtacggcaaggagacgaagtttccgtgcattatgaccccatgattgcgaagctggtcgtgtgggcagcagatcgccaggcggcattgacaaaactgaggtacagccttcgtcagtacaatattgttggactgcacaccaacattgacttcttactcaacctgtctggccacccagagtttgaagctgggaacgtgcacactgatttcatccctcaacaccacaaacagttgttgctcagtcggaaggctgcagccaaagagtctttatgccaggcagccctgggtctcatcctcaaggagaaagccatgaccgacactttcactcttcaggcacatgatcaattctctccattttcgtctagcagtggaagaagactgaatatctcgtataccagaaacatgactcttaaagatggtaaaaacaatgtagccatagctgtaacgtataaccatgatgggtcttatagcatgcagattgaagataaaactttccaagtccttggtaatctttacagcgagggagactgcacttacctgaaatgttctgttaatggagttgctagtaaagcgaagctgattatcctggaaaacactatttacctattttccaaggaaggaagtattgagattgacattccagtccccaaatacttatcttctgtgagctcacaagaaactcagggcggccccttagctcctatgactggaaccattgaaaaggtgtttgtcaaagctggagacaaagtgaaagcgggagattccctcatggttatgatcgccatgaagatggagcataccataaagtctccaaaggatggcacagtaaagaaagtgttctacagagaaggtgctcaggccaacagacacactcctttagtcgagtttgaggaggaagaatcagacaaaagggaatcggaataaactccagcaaggaaatggccagttaagtagtgtcttctctctccaccaaaaagaggaagtgcctccagcttttctgggggtctcataaagagcagttttactaaatgattgtatgcttatgctgaacacctttcatattggagaatcatgcatttgggtcactaattatctcaaaatatttcatactaataaagttgaattattttttattggaagccaa

SEQ ID NO: 17929 - DNA, 2156 bp, Homo sapiens
  source 1..2156: mol_type = unassigned DNA
agtggccgggctccagggacatggcggcggcctctgcggtgtcggtgctgctggtggcggcggagaggaaccggtggcatcgtctcccgagcctgctcctgccgccgaggacatgggtgtggaggcaaagaaccatgaagtacacaacagccacaggcagatgaagcatattccatcggccccgctccctcccagcagagctacctatctatggagaaaatcattcaagtggccaagacctctgctgcacagcacatccaatccataatggctgctgctggagtacctgttgtggagggttatcatggtgaggaccaatcagaccagtgcctgaaggaacacgccaggagaattggctatcctgtcatgattaaagccgtccggggtggaggaggaaaaggaatgaggattgttagatcagaacaagaatttcaagaacagttagagtcagcacggagagaagctaagaagtctttcaatgatgatgctatgctgatcgagaagtttgtagacacaccgaggcatgtagaagtccaggtgtttggtgatcaccatggcaatgctgtgtacttgtttgaaagagactgtagtgtgcagaggcgacatcagaagatcattgaggaggccccagcgcctggtattaaatctgaagtaagaaaaaagctgggagaagctgcagtcagagctgctaaagctgtaaattatgttggagcagggactgtggagtttattatggactcaaaacataatttctgtttcatggagatgaatacaaggctgcaagtggaacatcctgttactgagatgatcacaggaactgacttggtggagtggcagcttagaattgcagcaggagagaagattcctttgagccaggaagaaataactctgcagggccatgccttcgaagctagaatatatgcagaagatcctagcaataacttcatgcctgtggcaggcccattagtgcacctctctactcctcgagcagacccttccaccaggattgaaactggagtacggcaaggagacgaagtttccgtgcattatgaccccatgattgcgaagctggtcgtgtgggcagcagatcgccaggcggcattgacaaaactgaggtacagccttcgtcagtacaatattgttggactgcacaccaacattgacttcttactcaacctgtctggccacccagagtttgaagctgggaacgtgcacactgatttcatccctcaacaccacaaacagttgttgctcagtcggaaggctgcagccaaagagtctttatgccaggcagccctgggtctcatcctcaaggagaaagccatgaccgacactttcactcttcaggcacatgatcaattctctccattttcgtctagcagtggaagaagactgaatatctcgtataccagaaacatgactcttaaagatggtaaaaacaatgtagccatagctgtaacgtataaccatgatgggtcttatagcatgcagattgaagataaaactttccaagtccttggtaatctttacagcgagggagactgcacttacctgaaatgttctgttaatggagttgctagtaaagcgaagctgattatcctggaaaacactatttacctattttccaaggaaggaagtattgagattgacattccagtccccaaatacttatcttctgtgagctcacaagaaactcagggcggccccttagctcctatgactggaaccattgaaaaggtgtttgtcaaagctggagacaaagtgaaagcgggagattccctcatggttatgatcgccatgaagatggagcataccataaagtctccaaaggatggcacagtaaagaaagtgttctacagagaaggtgctcaggccaacagacacactcctttagtcgagtttgaggaggaagaatcagacaaaagggaatcggaataaactccagcaaggaaatggccagttaagtagtgtcttctctctccaccaaaaagaggaagtgcctccagcttttctgggggtctcataaagagcagttttactaaatgattgtatgcttatgctgaacacctttcatattggagaatcatgcatttgggtcactaattatctcaaaatatttcatactaataaagttgaattattttttattggaagcc

SEQ ID NO: 17930 - DNA, 1905 bp, Homo sapiens
  source 1..1905: mol_type = unassigned DNA
gacggtggccggcgggggtcacgaggcttcgtagtggaggaacgggtttggcgtgtgggacgcagctgcctctgtactggggagtcacggagtggccgggctccagggacatggcggcggcctctgcggtgtcggtgctgctggtggcggcggagaggaaccggtggcatcgtctcccgagcctgctcctgccgccgaggacatgggtgtggaggcaaagaaccatgaagtacacaacagccacagatgaagcatattccatcggccccgctccctcccagcagagctacctatctatggagaaaatcattcaagtggccaagacctctgctgcacaggctatccatccaggatgcggttttctctcagaaaacatggaatttgctgaactttgtaagcaagaaggaattatttttataggccctcctccatctgcaattagagacatgggtataaagagcacatccaaatccataatggctgctgctggagtacctgttgtggagggttatcatggtgaggaccaatcagaccagtgcctgaaggaacacgccaggagaattggctatcctgtcatgattaaagccgtccggggtggaggaggaaaaggaatgaggattgttagatcagaacaagaatttcaagaacagttagagtcagcacggagagaagctaagaagtctttcaatgatgatgctatgctgatcgagaagtttgtagacacaccgaggcatgtagaagtccaggtgtttggtgatcaccatggcaatgctgtgtacttgtttgaaagagactgtagtgtgcagaggcgacatcagaagatcattgaggaggccccagcgcctggtattaaatctgaagtaagaaaaaagctgggagaagctgcagtcagagctgctaaagctgtaaattatgttggagcagggactgtggagtttattatggactcaaaacataatttctgtttcatggagatgaatacaaggctgcaagtggaacatcctgttactgagatgatcacaggaactgacttggtggagtggcagcttagaattgcagcaggagagaagattcctttgagccaggaagaaataactctgcagggccatgccttcgaagctagaatatatgcagaagatcctagcaataacttcatgcctgtggcaggcccattagtgcacctctctactcctcgagcagacccttccaccaggattgaaactggagtacggcaaggagacgaagtttccgtgcattatgaccccatgattgcgaagctggtcgtgtgggcagcagatcgccaggcggcattgacaaaactgaggtacagccttcgtcagtacaatattgttggactgcacaccaacttgacttcttactcaacctgtctggccacccagagtttgaagctgggaacgtgcacactgatttcatccctcaacaccacaaacagttgttgctcagtcggaaggctgcagccaaagagtctttatgccaggcagccctgggtctcatcctcaaggagaaagccatgaccgacactttcactcttcaggcacatgatcaattctctccattttcgtctagcagtggaagaagactgaatatctcgtataccagaaacatgactcttaaagatggtaaaaacaatgtagccatagctgtaacgtataaccatgatgggtcttatagcatgcagattgaagataaaactttccaagtccttggtaatctttacagcgagggagactgcacttacctgaaatgttctgttaatggagttgctagtaaagcgaagctgattatcctggaaaacactatttacctattttccaaggaaggaagtattgagattgacattccagtccccaaatacttatcttctgtgagctcacaagaaactca

SEQ ID NO: 17931 - DNA, 1860 bp, Homo sapiens
  source 1..1860: mol_type = unassigned DNA
agtggaggaacgggtttggcgtgtgggacgcagctgcctctgtactggggagtcacggagtggccgggctccagggacatggcggcggcctctgcggtgtcggtgctgctggtggcggcggagaggaaccggtggcatcgtctcccgagcctgctcctgccgccgaggacatgggtgtggaggcaaagaaccatgaagtacacaacagccacaggctatccatccaggatgcggttttctctcagaaaacatggaatttgctgaactttgtaagcaagaaggaattatttttataggccctcctccatctgcaattagagacatgggtataaagagcacatccaaatccataatggctgctgctggagtacctgttgtggagggttatcatggtgaggaccaatcagaccagtgcctgaaggaacacgccaggagaattggctatcctgtcatgattaaagccgtccggggtggaggaggaaaaggaatgaggattgttagatcagaacaagaatttcaagaacagttagagtcagcacggagagaagctaagaagtctttcaatgatgatgctatgctgatcgagaagtttgtagacacaccgaggcatgtagaagtccaggtgtttggtgatcaccatggcaatgctgtgtacttgtttgaaagagactgtagtgtgcagaggcgacatcagaagatcattgaggaggccccagcgcctggtattaaatctgaagtaagaaaaaagctgggagaagctgcagtcagagctgctaaagctgtaaattatgttggagcagggactgtggagtttattatggactcaaaacataatttctgtttcatggagatgaatacaaggctgcaagtggaacatcctgttactgagatgatcacaggaactgacttggtggagtggcagcttagaattgcagcaggagagaagattcctttgagccaggaagaaataactctgcagggccatgccttcgaagctagaatatatgcagaagatcctagcaataacttcatgcctgtggcaggcccattagtgcacctctctactcctcgagcagacccttccaccaggattgaaactggagtacggcaaggagacgaagtttccgtgcattatgaccccatgattgcgaagctggtcgtgtgggcagcagatcgccaggcggcattgacaaaactgaggtacagccttcgtcagtacaatattgttggactgcacaccaacattgacttcttactcaacctgtctggccacccagagtttgaagctgggaacgtgcacactgatttcatccctcaacaccacaaacagttgttgctcagtcggaaggctgcagccaaagagtctttatgccaggcagccctgggtctcatcctcaaggagaaagccatgaccgacactttcactcttcaggcacatgatcaattctctccattttcgtctagcagtggaagaagactgaatatctcgtataccagaaacatgactcttaaagatggtaaaaacaattgaagataaaactttccaagtccttggtaatctttacagcgagggagactgcacttacctgaaatgttctgttaatggagttgctagtaaagcgaagctgattatcctggaaaacactatttacctattttccaaggaaggaagtattgagattgacattccagtccccaaatacttatcttctgtgagctcacaagaaactcagggcggccccttagctcctatgactggaaccattgaaaaggtgtttgtcaaagctggagacaaagtgaaagcgggagattccctcatggttatgatcgccatgaagatggagcataccataaagtctc

SEQ ID NO: 17932 - DNA, 1067 bp, Homo sapiens
  source 1..1067: mol_type = unassigned DNA
atcagcccaaaggtaggctcaggctccgacggtggccggcgggggtcacgaggcttcgtagtggaggaacgggtttggcgtgtgggacgcagctgcctctgtactggggagtcacggagtggccgggctccagggacatggcggcggcctctgcggtgtcggtgctgctggtggcggcggagaggaaccggtggcatcgtctcccgagcctgctcctgccgccgaggacatgggtgtggaggcaaagaaccatgaagtacacaacagccacaggaagaaacattaccaaggtcctcattgcaaacagaggagaaattgcctgcagggtgatgcgcacagccaaaaaactgggtgtacagactgtggcggtttatagtgaggctgacagaaattccatgcatgtagatatggcagatgaagcatattccatcggccccgctccctcccagcagagctacctatctatggagaaaatcattcaagtggccaagacctctgctgcacaggctatccatccaggatgcggttttctctcagaaaacatggaatttgctgaactttgtaagcaagaaggaattatttttataggccctcctccatctgcaattagagacatgggtataaagagcacatccaaatccataatggctgctgctggagtacctgttgtggagggttatcatggtgaggaccaatcagaccagtgcctgaaggaacacgccaggagaattggctatcctgtcatgattaaagccgtccggggtggaggaggaaaaggaatgaggattgttagatcagaacaagaatttcaagaacagttagagtcagcacggagagaagctaagaagtctttcaatgatgatgctatgctgatcgagaagtttgtagacacaccgaggcatgtagaagtccaggtgtttggtgatcaccatggcaatgctgtgtacttgtttgaaagagactgtagtgtgcagaggcgacatcagaagatcattgaggaggccccagcgcctggtattaaatctgaagtaagaaaaaaggggagaagctgcagtcagagctgctaa

SEQ ID NO: 17933 - DNA, 1988 bp, Homo sapiens
  source 1..1988: mol_type = unassigned DNA
ggggaaagcaccggctccaggccagcgtgggccgctctctcgctcggtgcccgccgccatgtgggccgtcctgaggttagccctgcggccgtgtgcccgcgcctctcccgccgggccgcgcgcctatcacggggactcggtggcctcgctgggcacccagccggacttgggctctgccctctaccaggagaactacaagcagatgaaagcactagtaaatcagctccatgaacgagtggagcatataaaactaggaggtggtgagaaagcccgagcacttcacatatcaagaggaaaactattgcccagagaaagaattgacaatctcatagacccagggtctccatttctggaattatcccagtttgcaggttaccagttatatgacaatgaggaggtgccaggaggtggcattattacaggcattggaagagtatcaggagtagaatgcatgattattgccaatgatgccaccgtcaaaggaggtgcctactacccagtgactgtgaaaaaacaattacgggcccaagaaattgccatgcaaaacaggctcccctgcatctacttagttgattcgggaggagcatacttacctcgacaagcagatgtgtttccagatcgagaccactttggccgtacattctataatcaggcaattatgtcttctaaaaatattgcacaggttaaagcggcaactggggaagaagtatctgctgaggatcttggaggtgctgatcttcattgcagaaagtctggagtaagtgaccactgggctttggatgatcatcatgcccttcacttaactaggaaggttgtgaggaatctaaattatcagaagaaattggatgtcaccattgaaccttctgaagagcctttatttcctgctgatgaattgtatggaatagttggtgctaaccttaagaggagctttgatgtccgagaggtcattgctagaatcgtggatggaagcagattcactgagttcaaagccttttatggagacacattagttacaggatttgctcgaatatttgggtacccagtaggtatcgttggaaacaacggagttctcttttctgaatctgcaaaaaagggtactcactttgtccagttatgctgccaaagaaatattcctctgctgttccttcaaaacattactggatttatggttggtagagagtatgaagctgaaggaattgccaaggatggtgccaagatggtggccgctgtggcctgtgcccaagtgcctaagataaccctcatcattgggggctcctatggagccggaaactatgggatgtgtggcagagcatatagcccaagatttctctacatttggccaaatgctcgtatctcagtgatgggaggagagcaggcagccaatgtgttggccacgataacaaaggaccaaagagcccgggaaggaaagcagttctccagtgctgatgaagcggctttaaaagagcccatcattaagaagtttgaagaggaaggaaacccttactattccagcgcaagggtatgggatgatgggatcattgatccagcagacaccagactggtcttgggtctcagttttagtgcagccctcaacgcaccaatagagaagactgacttcggtatcttcaggatgtaactggaataaaggatgttttctgttggacatgtactgaaaattaacacatgtagtagccttaaaattttagacttctcgaacatgaggctgttacagtaatttttttaacactgtgcattgtacttttctaccttaaaaaaatcagtgaggatatttatttaatgaacatcaattccttttaaattttcttagagaaatttctctgtggctcagttttaccacccataaagcggagacagtaatttacggttatcctttctgacccacaaagtatgaaaagttctgtaatctgtaaactcagttctgtaatctgtattattgagatgattaatataaagttgtattttcactg

SEQ ID NO: 17934 - DNA, 3665 bp, Homo sapiens
  source 1..3665: mol_type = unassigned DNA
agaatcagagaaaccttctctggggctgcaaggacctgagctcagcttccgccccagccagggaagcggcaggggaaagcaccggctccaggccagcgtgggccgctctctcgctcggtgcccgccgccatgtgggccgtcctgaggttagccctgcggccgtgtgcccgcgcctctcccgccgggccgcgcgcctatcacggggactcggtggcctcgctgggcacccagccggacttgggctctgccctctaccaggagaactacaagcagatgaaagcactagtaaatcagctccatgaacgagtggagcatataaaactaggaggtggtgagaaagcccgagcacttcacatatcaagaggaaaactattgcccagagaaagaattgacaatctcatagacccagggtctccatttctggaattatcccagtttgcaggttaccagttatatgacaatgaggaggtgccaggaggtggcattattacaggcattggaagagtatcaggagtagaatgcatgattattgccaatgatgccaccgtcaaaggaggtgcctactacccagtgactgtgaaaaaacaattacgggcccaagaaattgccatgcaaaacaggctcccctgcatctacttagttgattcgggaggagcatacttacctcgacaagcagatgtgtttccagatcgagaccactttggccgtacattctataatcaggcaattatgtcttctaaaaatattgcacagatcgcagtggtcatgggctcctgcaccgcaggaggagcctatgtgcctgccatggctgatgaaaacatcattgtacgcaagcagggtaccattttcttggcaggaccccccttggttaaagcggcaactggggaagaagtatctgctgaggatcttggaggtgctgatcttcattgcagaaagtctggagtaagtgaccactgggctttggatgatcatcatgcccttcacttaactaggaaggttgtgaggaatctaaattatcagaagaaattggatgtcaccattgaaccttctgaagagcctttatttcctgctgatgaattgtatggaatagttggtgctaaccttaagaggagctttgatgtccgagaggtcattgctagaatcgtggatggaagcagattcactgagttcaaagccttttatggagacacattagttacaggatttgctcgaatatttgggtacccagtaggtatcgttggaaacaacggagttctcttttctgaatctgcaaaaaagggtactcactttgtccagttatgctgccaaagaaatattcctctgctgttccttcaaaacattactggatttatggttggtagagagtatgaagctgaaggaattgccaaggatggtgccaagatggtggccgctgtggcctgtgcccaagtgcctaagataaccctcatcattgggggctcctatggagccggaaactatgggatgtgtggcagagcatatagcccaagatttctctacatttggccaaatgctcgtatctcagtgatgggaggagagcaggcagccaatgtgttggccacgataacaaaggaccaaagagcccgggaaggaaagcagttctccagtgctgatgaagcggctttaaaagagcccatcattaagaagtttgaagaggaaggaaacccttactattccagcgcaagggtatgggatgatgggatcattgatccagcagacaccagactggtcttgggtctcagttttagtgcagccctcaacgcaccaatagagaagactgacttcggtatcttcaggatgtaactggaataaaggatgttttctgttggacatgtactgaaaattaacacatgtagtagccttaaaattttagacttctcgaacatgaggctgttacagtaatttttttaacactgtgcattgtacttttctaccttaaaaaaatcagtgaggatatttatttaatgaacatcaattccttttaaattttcttagagaaatttctctgtggctcagttttaccacccataaagcggagacagtaatttacggttatcctttctgacccacaaagtatgaaaagttctgtaatctgtaaactcagttctgtaatctgtattattgagatgattaatataaagttgtattttcactgaaatgattgttttgctggttatgcttggtgatattttagcgggcttatttttgaaaggcatctgttacttcagtggcataaagtgccctcacactgctgtgcagccatcaccaccattcatctccagaatttgttctcagtcccaaactgaaactataccattcaaacaacagcgctccccatttccccctcccccgagcccatgacatctccttattattattttttttttgagacagggtgtttctctgttgcccaggctggagtgcggtggtgtgatctcggctcactgcagcttccacctcccgggttcaagcgattcttgtgcctcagcctcccaagcagctgggactataggcacgcaccaccacacccagctaagttctgtatttttagcagagacgggatttcactaggttgcccaggctggtctcaaactactgacctcaagtgatccacccgcctcggcctcccaaagtgctgggattacaggtgtgagccaccgcgcctgaccacatctccttattcttaaatgtatgtgtttctcatggtttgatttattcttgctgggccatttcagcccctgtcatggcttcactcgccatctaaatgcagatgattactgccttgacggttcttaacccagctctcccctgagctgcaggcctgcatatccagtaggtctactggacatctgtactggttgttgtggaggaacctctggcttgctcattaagtcctactgattttcactatcccctgaatttccccacttatttttgtctttcactatcgcaggccttagaagaggtctacctgcctccagtcttacctagtccagtctaccccctggagttagaatggccatcctgaagtgaaaagtaatgtcagattactcccttcagtgatttcttgtagaagtgccaatccctgaatgccaccaagatcttaatcttcacatctttaatcttatctctttgactcctctttacaccggagaacggctccagctgttctagctctctttcagttctttgaaccttcccaccttagggtctataaggttccctctgcccaaattgttctactctcccttcttcttcaacacatccttcagtttaagcacttgcttctctcagtttaaactccacttccttagggatgtctctgtgacctccctgtgctggattagcttccctactctatgctcttgtaaaacactatctacttcctttgtcataaactcatcattttcctataaacattaatattgtcctcctgctagaatgtaagctccgtgagagcaaggatcctcctgtttaccctgtacctccaatgtctggcacttgtaggtgctcaaatattcgttgaatgaatgaaaaatccatattgtaattgatgtcctctggccacatagttttaaaattaggtgattgattatatgaccgaatagaactatcaaatgttttcctaataaagtcaatatttcaaa

SEQ ID NO: 17935 - DNA, 2300 bp, Homo sapiens
  source 1..2300: mol_type = unassigned DNA
gcggccgccttggccgagcgccggcgttgggcagaagcacagcaccctccgtaagggcaccgggagagcccgggagtgcgttccggggctttcggagcagcggtgtgagacatgaagccattattatatcaggaaccgaaatggccaagcatatccagaaagaaatacagcgaggtgtggaatcatgggtttcccttggaaacagaagacctcacctcagtataattttagtgggagataacccagcaagccatacatatgtcaggaataagataagagctgcctctgctgtaggtatttgtagtgagctcattctaaaacctaaggatgtttctcaggaagaacttttggacgtaactgatcaattgaatatggacccaagagtcagcggtatattagttcagttaccactaccagaccacgttgatgagcgaacaatatgcaatggaattgccccagaaaaagatgtagatggatttcatattatcaatattggaagattgtgccttgatcagcattctctcatacctgccactgccagtgctgtttgggaaataataaaaagaacaggaattcaaacatttggaaaaaatgtggttgtggctggaagatccaagaacgtagggatgcctattgccatgcttttacacactgatggagagcatgaacggccaggaggtgatgcaactgtgacaatagctcacagatacacccccaaagagcaactgaagattcatacgcagctggcagatattatcatagttgctgcaggtattccaaagttgattacgtctgatatggttaaagaaggtgctgctgtaattgatgtgggtatcaactatgtccacgatccagtgacaggaaagacaaaattagttggagatgtggacttcgaagctgttaaaaagaaagctggctttatcactccagttccaggaggtgtgggacccatgacagtggcaatgcttctgaagaacacccttctggcagctaaaaaaatcatttactagatcacatgaaaggataaagcaaactgaagtcatgctatttgtttatttgacaaagggtaaaacctttatattttactacaaagctatttatttctacatggtatttattttttcatgggtgaaatcattgtgaatcaattgattcacatagttttatgcatttcctgctaatttattttgagttttaagaaaacaaccaaaacaattccaatgaaaattttagtaacaattgtttattttgagggtatttgttcataacattaaaacaataaagggctcataataaataaatatatttttgacacaattaaatattacatagagtatgtttacaacaaatatcctgtcagccaaatggttacccatataaaatgtaatttaggttttgctacttgcatgctaacatttttaatgtattttatgatctatgtcatatattaaaaaagagcttgcttactacaagaaaaatattgaaatattgaaaatattgaaaatattattattgaaaataaaatcttgatctcaactatcccccaaatgcatcctataagtccatcctaatgagaaatgatgttctatttaaggaaaggaaaatattccgggaaggcaaaaaatgcagtgctgtttggaagtgtaatgattttatcacatggtgaatgactactaagagtaatgattatatcacattgtgaatgactacttgccacagtaaaaatacatgaagaatgtgttaggtttaaacgtcgtttctttcttctaaaaaatatttggttagtaccttcactgagcaatagtggaaaaataaaaaaataagtaaacagaaaaaactaaagttgtattttcccacaaatatagtatgaatgaggtcatattaaagaacagcaactgttaatgtttgttcacaaattcagaaatctaataggaaaacatgatactttcaatgtgccaaaactaaaccttagtatacaactaaaaatctcctgccttcttgcctacctgtcttccctcttctgttacagaatttgttcctcaaagtagatgcaatgtttctaacacaatttaaattaggaaatatatatgaatgtcgttgaagtctattttgagactgctaaagctattaattgatactgtgtttttatgcccaaatcccagtatgtttatgtaccaataatgactcttacccagcgcatgtctttatcagtgtgtactcgtgacgatttgtgtgaaaatagacttgatgtttataattaataccattacaactgtataataaaagcaatttgaagaaaa

SEQ ID NO: 17936 - DNA, 873 bp, Homo sapiens
  source 1..873: mol_type = unassigned DNA
cagtccggaagccggggatccgcggccatgacggtgccggtccgcggcttctcgctgctccgcggccgccttggccgagcgccggcgttgggcagaagcacagcaccctccgtaagggcaccgggagagcccgggagtgcgttccggggctttcggagcagcggtgtgagacatgaagccattattatatcaggaaccgaaatggccaagcatatccagaaagaaatacagcgaggtgtggaatcatgggtttcccttggaaacagaagacctcacctcagtataattttagtgggagataacccagcaagccatacatatgtcaggaataagataagagctgcctctgctgtaggtatttgtagtgagctcattctaaaacctaaggatgtttctcaggaagaacttttggacgtaactgatcaattgaatatggacccaagagtcagcggtatattagttcagttaccactaccagaccacgttgatgagcgaacaatatgcaatggaattgccccagaaaaagatgtagatggatttcatattatcaatattggaagattgtgccttgatcagcattctctcatacctgccactgccagtgctgtttgggaaataataaaaagaacaggaattcaaacatttggaaaaaatgtggttgtggctggaagatccaagaacgtagggatgcctattgccatgcttttacacactgatggagagcatgaacggccaggaggtgatgcaactgtgacaatagctcacagatacacccccaaagagcaactgaagattcatacgcagctggcagatattatcatagttgctgcagagagatttcaccattttgcccaggacctctccaactcctga

SEQ ID NO: 17937 - DNA, 955 bp, Homo sapiens
  source 1..955: mol_type = unassigned DNA
ggtccgcggcttctcgctgctccgcggccgccttggccgagcgccggcgttgggcagaagcacagcaccctccgtaagggcaccgggagagcccgggagtgcgttccggggctttcggagcagcggtgtgaggaccagcagagagaagagattccatcttccagagacatgaagccattattatatcaggaaccgaaatggccaagcatatccagaaagaaatacagcgaggtgtggaatcatgggtttcccttggaaacagaagacctcacctcagtataattttagtgggagataacccagcaagccatacatatgtcaggaataagataagagctgcctctgctgtaggtatttgtagtgagctcattctaaaacctaaggatgtttctcaggaagaacttttggacgtaactgatcaattgaatatggacccaagagtcagcggtatattagttcagttaccactaccagaccacgttgatgagcgaacaatatgcaatggaattgccccagaaaaagatgtagatggatttcatattatcaatattggaagattgtgccttgatcagcattctctcatacctgccactgccagtgctgtttgggaaataataaaaagaacaggaattcaaacatttggaaaaaatgtggttgtggctggaagatccaagaacgtagggatgcctattgccatgcttttacacactgatggagagcatgaacggccaggaggtgatgcaactgtgacaatagctcacagatacacccccaaagagcaactgaagattcatacgcagctggcagatattatcatagttgctgcaggtattccaaagttgattacgtctgatatggttaaagaaggtgctgctgtaattgatgtgggtatcaactatgtccacgatccagtgacaggaaagacaaaattagttggagatgtggacttcgaagc

SEQ ID NO: 17938 - DNA, 2354 bp, Homo sapiens
  source 1..2354: mol_type = unassigned DNA
cagtccggaagccggggatccgcggccatgacggtgccggtccgcggcttctcgctgctccgcggccgccttggccgagcgccggcgttgggcagaagcacagcaccctccgtaagggcaccgggagagcccgggagtgcgttccggggctttcggagcagcggtgtgagacatgaagccattattatatcaggaaccgaaatggccaagcatatccagaaagaaatacagcgaggtgtggaatcatgggtttcccttggaaacagaagacctcacctcagtataattttagtgggagataacccagcaagccatacatatgtcaggaataagataagagctgcctctgctgtaggtatttgtagtgagctcattctaaaacctaaggatgtttctcaggaagaacttttggacgtaactgatcaattgaatatggacccaagagtcagcggtatattagttcagttaccactaccagaccacgttgatgagcgaacaatatgcaatggaattgccccagaaaaagatgtagatggatttcatattatcaatattggaagattgtgccttgatcagcattctctcatacctgccactgccagtgctgtttgggaaataataaaaagaacaggaattcaaacatttggaaaaaatgtggttgtggctggaagatccaagaacgtagggatgcctattgccatgcttttacacactgatggagagcatgaacggccaggaggtgatgcaactgtgacaatagctcacagatacacccccaaagagcaactgaagattcatacgcagctggcagatattatcatagttgctgcaggtattccaaagttgattacgtctgatatggttaaagaaggtgctgctgtaattgatgtgggtatcaactatgtccacgatccagtgacaggaaagacaaaattagttggagatgtggacttcgaagctgttaaaaagaaagctggctttatcactccagttccaggaggtgtgggacccatgacagtggcaatgcttctgaagaacacccttctggcagctaaaaaaatcatttactagatcacatgaaaggataaagcaaactgaagtcatgctatttgtttatttgacaaagggtaaaacctttatattttactacaaagctatttatttctacatggtatttattttttcatgggtgaaatcattgtgaatcaattgattcacatagttttatgcatttcctgctaatttattttgagttttaagaaaacaaccaaaacaattccaatgaaaattttagtaacaattgtttattttgagggtatttgttcataacattaaaacaataaagggctcataataaataaatatatttttgacacaattaaatattacatagagtatgtttacaacaaatatcctgtcagccaaatggttacccatataaaatgtaatttaggttttgctacttgcatgctaacatttttaatgtattttatgatctatgtcatatattaaaaaagagcttgcttactacaagaaaaatattgaaatattgaaaatattgaaaatattattattgaaaataaaatcttgatctcaactatcccccaaatgcatcctataagtccatcctaatgagaaatgatgttctatttaaggaaaggaaaatattccgggaaggcaaaaaatgcagtgctgtttggaagtgtaatgattttatcacatggtgaatgactactaagagtaatgattatatcacattgtgaatgactacttgccacagtaaaaatacatgaagaatgtgttaggtttaaacgtcgtttctttcttctaaaaaatatttggttagtaccttcactgagcaatagtggaaaaataaaaaaataagtaaacagaaaaaactaaagttgtattttcccacaaatatagtatgaatgaggtcatattaaagaacagcaactgttaatgtttgttcacaaattcagaaatctaataggaaaacatgatactttcaatgtgccaaaactaaaccttagtatacaactaaaaatctcctgccttcttgcctacctgtcttccctcttctgttacagaatttgttcctcaaagtagatgcaatgtttctaacacaatttaaattaggaaatatatatgaatgtcgttgaagtctattttgagactgctaaagctattaattgatactgtgtttttatgcccaaatcccagtatgtttatgtaccaataatgactcttacccagcgcatgtctttatcagtgtgtactcgtgacgatttgtgtgaaaatagacttgatgtttataattaataccattacaactgtataataaaagcaatttg

SEQ ID NO: 17939 - DNA, 1407 bp, Homo sapiens
  source 1..1407: mol_type = unassigned DNA
agtgtgaagcttattcatgaagagacctctgcctgaacatacagcaaatttaagaaggttgtgcagatagtctgaaggaggaccagcagagagaagagattccatcttccagagacatgaagccattattatatcaggaaccgaaatggccaagcatatccagaaagaaatacagcgaggtgtggaatcatgggtttcccttggaaacagaagacctcacctcagtataattttagtgggagataacccagcaagccatacatatgtcaggaataagataagagctgcctctgctgtaggtatttgtagtgagctcattctaaaacctaaggatgtttctcaggaagaacttttggacgtaactgatcaattgaatatggacccaagagtcagcggtatattagttcagttaccactaccagaccacgttgatgagcgaacaatatgcaatggaattgccccagaaaaagatgtagatggatttcatattatcaatattggaagattgtgccttgatcagcattctctcatacctgccactgccagtgctgtttgggaaataataaaaagaacaggaattcaaacatttggaaaaaatgtggttgtggctggaagatccaagaacgtagggatgcctattgccatgcttttacacactgatggagagcatgaacggccaggaggtgatgcaactgtgacaatagctcacagatacacccccaaagagcaactgaagattcatacgcagctggcagatattatcatagttgctgcagagagatttcaccattttgcccaggacctctccaactcctgaactcaagcgatccacctgcctcagcttcccaaagtgctgagattacaggcatgagccaccacacccggcactatataagtattttagaccttagaaaaacctatctagttttaaatttgtcttattaattttcttgacattgctaaaaaaagaagcatgtatatccattcatgcaatattcctcagcagtgaaaaggaatgaactattgatacagcaacctgaatgaatttccagcaaattatgaagtaaaaaaggcaatctcacatgttctttgttcaatcatagaatatatgattccatttatatagcattcttgaaagtgacaaaattagcggtttccgggagtcaaggacaggttgatgtgggagggaactgggtgtggctgtaataaggcaacatgagggacccttttgatgatggaaatgttctatatcttaactgtatcaatgtcaatatcctgggtataatattgtcctgtagtttggcaagatattatcattgtatagtatcttgtattatttcttacaatggatgtgaatctataattatcaaaaaatgacaatttaattaaagcatatagtaaataagt

SEQ ID NO: 17940 - DNA, 7068 bp, Homo sapiens
  source 1..7068: mol_type = unassigned DNA
accagtaattcattttttattattctgtattcagtaagaatcaacctgtatcaaatagctgaaaaggcctgaagcctcccaaatgcatatcattacacaaattctgtgtgaggactgacatcttggtttcatatactaattatactgcatgggccccatttataaccatatctactcgtcatttgatcctggctactgccgatggatgctatcttcatcacattatagcaaacatttgggtgattaagtttttctcaaaaattctagattagcatacaacggctttactacttatatgtcatctaagacgttttttaagaattagttactactacgcccaacgcagtgaggtagcaaatattatgcctgtttattttcatctccatttcaggcttgcgcgcctttcccccctcgggacttcccgaggacacccctgcagcagtgagcccgagtcctggctttggctgcatgttaagaaatattaatcaaaatgaatgcgtgccctttaagagaaaaaaactgtgggtccttcagcctttaaaaaccatgccgtggtttaaaaacttaaaactatatttcggcagaacgctgagcatttcttcaaatcactctgagaagcttgagtgtctttaatttcaccggtctgtcaaacgtaacgcgtctctccctcaccccacattttaagtttccaaggagcggaagaagggcctccgggggtcccggccgccgcaggctgctgggggtgaggacacgactcggcctccgtccgactcgagggtgtcgcgaaggccaggagggaacgaaagttaccctcgaacttcggaggcgaaagatttcatgtggatcttaaaaagggcaaaacctaccccaaaggccgtaaaccgccctcccctcccccgccagagaacttcccggcgcagagcttccgcagcctgctgcaggccgggagaccttcacgctcactcgctctccgccacacgccggaactgcgcggccacgtccacggggaccctggccatgccccgcaccgccacccagccccaggcgatccccgggccccacgcgcctgcagtcggcgctgcgcctgcgtgggaggatccggcggaaggggcggggtcaggtggcacttccgtggcttcgggcggggaggtcacaatcacattgagccaaaacgcatccagtgttttctccagttacaaataaaacgaatatgcccatgctgctaccacatcctcaccagcatttcctaaaaggccttttaagagcacctttccgatgttaccacttcatctttcactcaagtactcatctcggatcaggaatcccatgtgctcagccgtttaattctcttggactccattgtacaaagtggatgctgctgtcagatggcttaaagagaaaattatgtgtacaaacaaccttaaaggaccacacagaaggactttctgataaagagcaaagatttgtggataaactttatactggtttaatccaagggcaaagggcctgtttagcagaggccataactcttgtagaatcaactcacagcaggaaaaaggagttagcccaggtgcttcttcagaaagtattactttaccacagagaacaagaacaatcaaataaaggaaaaccactagcatttcgagtaggattgtctgggccccctggtgctggaaaatcaacatttatagaatattttggaaaaatgcttactgagagagggcacaaattatctgtgctagctgtggacccttcttcttgtactagtggtggatcactcttaggtgataaaacccgaatgactgagttatcaagagatatgaatgcatacatcaggccatctcctactagaggaactttaggaggcgtgacaaggaccacaaatgaagctattctgttgtgtgaaggagcgggatatgacataattcttattgaaaccgttggtgtgggtcagtcggagtttgctgttgctgacatggttgacatgtttgttttactactgccaccagcaggaggagatgagctgcagggtatcaaaaggggtataatcgagatggcagatctggtagctgtaactaaatctgatggagacttgattgtgccagctcgaaggatacaagcggaatatgtgagtgcactgaaattactccgcaaacgttcacaagtctggaaaccaaaggtaattcgtatttctgcccgaagtggagaggggatctctgaaatgtgggataaaatgaaagatttccaggacctaatgcttgccagtggggagctgactgccaaacgacggaagcaacagaaagtttggatgtggaatctcattcaggaaagtgtgttagagcatttcaggacccaccccacagtccgggaacagattccacttctggaacaaaaggttctcattggggccctgtccccaggactagcagcagacttcttgttaaaagcttttaaaagcagagactaataaaattcatcctgtataataattttacatatcatttcataaagtattttaatagaaaaatcacttgtatgcttatattttcagtaattattgtatggtgctcttgtcttctttgtttgtgacccatgcttgaaaacttgaaggaagttagatatgaatggcaaaagttaggcagtatttataaggtacctgttttatgttactgatatctgtttccttctcttcttataccctggcatggtggcctgtagggtagtttcttcttaatagtcaagaacagagaaagctgaggagagcagaaaatatcttgcactttaaaatgcttattttgattccatattatctgaatttccagagaggatgtaaacaagagtgaccatatttttggagtccttcttgaagccagaacaacacacagtgggttgctaagagccgacaatcataattgacatttagtgtaccagattattctaagaatttctgaaattaccatgtacatgagtaatgaaacaactggaataatgtgatgatgtgaacacaattttaaagtctgcttgtctggatttgcaggtacccttccgccaccccccaacatgataggtaagagagcaaaagggaactgggaaaaatcagctacaaataaaatgggtgactaatccccagttcttggacccattatatttgtagccaattggagtaaacccctaaaagacaaagtgaggtcagaatgattcaaggattattcagtttgaagactaccaaaggcttttgcttctcttcttccttggccatttcacttcattttagtattttaaaaatcttttttcttgatggtgaacaagttttgtcctatgctatggaggaggcatagcacagtgattaagagcttgggctctgtagttggactatgtgggtttaaactttaaacccagatcaattgtatattagctacatgagctaatctctttaagcttccatttcctccctggtaaaatgaaattggcaaataactttctaaggttagtgaagataggaaatactcgaaggctgcttactatccttattacattaaagttatgggtatcttgaaactacaaacctgatgtataatttcagttttctctcatggtcttgttactaccatcatactcttgatattttaggatactttaggattacctttgaagaaccctttctagttaattctttgaatatgttttatacttatttgatggtagttgtaactgtgtacatttgaataaaatttctaaccataaaatttcgccattgcacaaaaagcctttatagaagtttctaacatattctattctgaaccctgtagaatattttatgtagtatagcagcttgcattgttacttactgtactggaatcaaacctcttgagcattattttaacaaacatccctttacattttttggaaagatttttagtactccattggcatagctatttcatacaaggattaggagaaactttgaaaggttatccacttgacttttctgattttagaaaggactaccattaaaccaccctatcagacaaaaaaaactggtttttagaaacctgagagaaggaattttataatttccctgagtaagctgttacagggaataacaaatctcctgccacatgtggcacagtgtaagtaatgctggagcacacatactgcattgtaaagaaggtaggaaaggtggggggacttttgttagctttaattttaaggctaaaagcatttcttctcagtttgaactacttttaaatgttataaatgtcatcataaaaatcattagaaaactcatttctccttatgttgtcgttgtaccattgggtattgtatagagaccaatttctaagagattttttcacctctgtttctgttatttgctatactggaggtaatataataataatgaaatatagctttttttttcaactcagaaatcctattccctctccccatctgtgattatattgtactggacttctgacttggtcaaaagcataggttttgacttagatacatgtgggggcagatctcagctctatcactaactagctatatgatatttggcaagttttttctctatgtgcagtagtttctttatctgtaaaattaagataatagctactttacagggttggaagaattaatttagaaattgtacagtgcttagcctcaataattggtaggtggtggtgtaaatattttacatagatacttgtgacagttctttgttctacaaaacagactaatattaatttcagattggccaagctacttaatttctctgtgcctcagtttcctcactattaaatggggatgacaatagtgtccacctagagcaggactattttagtattacatataatccttggatataaatgctgatgaagtttggatatttgtccccacccaagtctcatgttgaaatgtaatccccaatcttggaggtggagcctggtgggaggtgtatggattagatcagatctctcatgaatgacttgggccatcctttgggtggtaagtgagctcttgctccgagttcacacgaggtctagatctggtcatttaaaagtgtgtggcatctccccatccctcactctatcacttgctcctactttcgtcatatgacatgcctgctcccctttcaccttctgccatgattgtaagcttcctgaggcctccctagaagctgagcagatgccagcaccatgcttcctgtagtctgtagaaccataagccaaataaacatcttttctttataaatttataaattacccagtcgcagatatttatagaaagaacagcctaatacaggtgctaaatacatatctgacaataaatggtagttatctcttagaactgttatgaggattaaacgagttacagtgtccatcttaaaaagataattctgaaaaaaatctcataggttcactttgccttgtcaagaatatgattaccattaacttctgtagataggaaaaaaatgtgctgagctccaaaactgacagacattttgctaaaacaatatcaaatctcattaaaatgatgacagttatttcaatagttgacagtagctatcccaatacaacctaacaaggcattttctcttcagaatcactcgatcatatggccatttccctaagcttttatagctattgcccagtgtacactgaagacaacagctaacgaacaacatacgtgtgataatttatgtagttgaacctctaaggcaaaaaaaaaaaaaaaaaggaaaaattagtgaaaatcattcaaacattatgctcaccaggtagactgccatcatagaagtcctaatgctactgctaaaaactagtaaactaccagtaaactgtgaagacagaagtaactcctgtgatctatatgtttgtgcagatggtggagcttttctgctcctaaagcctgagaaatgcaaatgtggcttcgttaatgcaaatgcttcctacgccagactttatgaaactcctcctaaagttgaattcttatccaagtggacatatgttagggtgccattgtaattcaggtagagtgtcagagtggtggctggcaccaacggtagatgttctcaacattagcgttattcaggtaagactacaacaatgatgaacatgtcaaaactttcctttaaaaggaacaatcagaaaaactctttaacaaatgtttttctttccgtagtattttaattaaaatttttaaaattttaaaatttactaaatttatgaacgtttttatcccacttgagatgaatacttatttatagtccctgtcccatgaagcttctgtggatttgctttgtttgtcatttgtggtatgtttgataacaaaaatattagtggcacaaaagcagttatattgaatgcttttgttttagagaaaatttcactctgtactagaaaatgtagatgatgtgagtcaaagttcattaatatttacctgaaaatttgtgtataaaggtaaccttggggcagtttattttgcttagacccctcagcttcttgatagagtgaggtgagggcatatgtaagtcagtaaactattctgttagtaaagtcaaaggcgtaatctaaattaattatgcttttaactaacacagaagaaatcatgtgacctcattctcaaagctcgtaacatccacctggccaatcttaagatgtggatagagttcttttttttcttttttcaatttttacaataatttttgacacattgaagctgtgcatgtttatgggggcacaatttgatgtttcaatacatgtatatgttgtgtaatgatcaaatcggagtacttagcatatctatcatctcgtgcatttatcatttctttgtggcgagaacatttaaaaatcctattttctagctattttgtaatatacactaccttactgttgcgaaccatagtcaccctactgtgcaatagaacacctgaacttattcctcctatctagttgtaactttgtacccattgaccccccttcccttccttccactctcccctccccagtctctggtaaccactgttctgttccctatgagataaaactttttttgtcttccata

SEQ ID NO: 17941 - DNA, 1437 bp, Homo sapiens
  source 1..1437: mol_type = unassigned DNA
gagccaaaacgcatccagtgttttctccagttacaaataaaacgaatatgcccatgctgctaccacatcctcaccagcatttcctaaaaggccttttaagagcacctttccgatgttaccacttcatctttcactcaagtactcatctcggatcaggaatcccatgtgctcagccgtttaattctcttggactccattgtacaaagtggatgctgctgtcagatggcttaaagagaaaattatgtgtacaaacaaccttaaaggaccacacagaaggactttctgataaagagcaaagatttgtggataaactttatactggtttaatccaagggcaaagggcctgtttagcagaggccataactcttgtagaatcaactcacagcaggaaaaaggagttagcccaggtgcttcttcagaaagtattactttaccacagagaacaagaacaatcaaataaaggaaaaccactagcatttcgagtaggattgtctgggccccctggtgctggaaaatcaacatttatagaatattttggaaaaatgcttactgagagagggcacaaattatctgtgctagctgtggacccttcttcttgtactagtggtggatcactcttaggtgataaaacccgaatgactgagttatcaagagatatgaatgcatacatcaggccatctcctactagaggaactttaggaggcgtgacaaggaccacaaatgaagctattctgttgtgtgaaggagcgggatatgacataattcttattgaaaccgttggtgtgggtcagtcggagtttgctgttgctgacatggttgacatgtttgttttactactgccaccagcaggaggagatgagctgcagggtatcaaaaggggtataatcgagatggcagatctggtagctgtaactaaatctgatggagacttgattgtgccagctcgaaggatacaagcggaatatgtgagtgcactgaaattactccgcaaacgttcacaagtctggaaaccaaaggtaattcgtatttctgcccgaagtggagaggggatctctgaaatgtgggataaaatgaaagatttccaggacctaatgcttgccagtggggagctgactgccaaacgacggaagcaacagaaagtttggatgtggaatctcattcaggaaagtgtgttagagcatttcaggacccaccccacagtccgggaacagattccacttctggaacaaaaggttctcattggggccctgtccccaggactagcagcagacttcttgttaaaagctttaaaagcagagactaataaaattcatcctgtataataattttacatatcatttcataaagtattttaatagaaaaatcacttgtatgcttatattttcagtaattattgtatggtgctcttgtcttctttgtttgtgacccatgcttgaa

SEQ ID NO: 17942 - DNA, 1352 bp, Homo sapiens
  source 1..1352: mol_type = unassigned DNA
gagccaaaacgcatccagtgttttctccagttacaaataaaacgaatatgcccatgctgctaccacatcctcaccagcatttcctaaaaggccttttaagagcacctttccgatgttaccacttcatctttcactcaagtactcatctcggatcaggaatcccatgtgctcagccgtttaattctcttggactccattgtacaaagtggatgctgctgtcagatggcttaaagagaaaattatgtgtacaaacaaccttaaaggaccacacagaaggactttctgataaagagcaaagatttgtggataaactttatactggtttaatccaagggcaaagggcctgtttagcagaggccataactcttgtagaatcaactcacagcaggaaaaaggagttagcccaggtgcttcttcagaaagtattactttaccacagagaacaagaacaatcaaataaaggaaaaccactagcatttcgagtaggattgtctgggccccctggtgctggaaaatcaacatttatagaatattttggaaaaatgcttactgagagagggcacaaattatctgtgctagctgtggacccttcttcttgtactagtggtggatcactcttaggtgataaaacccgaatgactgagttatcaagagatatgaatgcatacatcaggccatctcctactagaggaactttaggaggcgtgacaaggaccacaaatgaagctattctgttgtgtgaaggagcgggatatgacataattcttattgaaaccgttgggtatcaaaaggggtataatcgagatggcagatctggtagctgtaactaaatctgatggagacttgattgtgccagctcgaaggatacaagcggaatatgtgagtgcactgaaattactccgcaaacgttcacaagtctggaaaccaaaggtaattcgtatttctgcccgaagtggagaggggatctctgaaatgtgggataaaatgaaagatttccaggacctaatgcttgccagtggggagctgactgccaaacgacggaagcaacagaaagtttggatgtggaatctcattcaggaaagtgtgttagagcatttcaggacccaccccacagtccgggaacagattccacttctggaacaaaaggttctcattggggccctgtccccaggactagcagcagacttcttgttaaaagcttttaaaagcagagactaataaaattcatcctgtataataattttacatatcatttcataaagtattttaatagaaaaatcacttgtatgcttatattttcagtaattattgtatggtgctcttgtcttctttgtttgtgacccatgcttgaa

SEQ ID NO: 17943 - DNA, 1174 bp, Homo sapiens
  source 1..1174: mol_type = unassigned DNA
aggtcccgtcaagcagcctggctcatggctgtgtgcggcctggggagccgtcttggcctggggagccgtcttggcctgcgcgggtgcttcggcgccgccaggctcctgtatccccgtttccagagccgcggccctcagggcgtggaagacggggacaggccacagccttcctcgaagacacccaggatccccaagatttacaccaaaacgggagacaaagggttttctagtaccttcacaggagaaaggagacccaaagatgaccaagtgtttgaagccgtgggaactacagatgaattaagttcagctattggacggagtttcgcgcttgttgcccagactggagtgcaatggtgtgatctcggctcactgcaacctctgcctcccgggttcaagcgagtctcctcattattactattcttaacacttacctgttcctggctaccatttctccatggcgggcctgactaggtttgctctggaattagtcacagaaaagggccatacatttgccgaagagcttcagaaaatccagtgcacattgcaggacgtcggctcggccctggcgacaccatgctcctcggcccgggaggctcacttaaagtataccacgttcaaggcggggcccatcctggagctggagcagtggatcgacaagtacaccagccagctcccaccactcacggccttcatcctgccttcgggaggcaagatcagctcggcgctgcatttctgccgggccgtgtgccgccgggccgagagacgtgtggtgcctcttgtccagatgggagagaccgatgcgaacgtggccaagttcttaaacagactcagtgactatctcttcacgctagccagatatgcagccatgaaggaggggaatcaagagaaaatatacatgaaaaatgacccatcggccgagtctgagggactctgaaatcacagaaagtgggagcttggaggatccctccatggcgatggccgtggagagaggagcttgcccttctggggtcctggttcctgaagagctcacccagagaggctcaaagcagccttttgtcccagctcagctttgatctacacctcttgccaccttcctcaagggactgtgaccctttggggattctgtccctgaccctgcttccccaagctctcctgggtcttggagggatgtggg

SEQ ID NO: 17944 - DNA, 2725 bp, Homo sapiens
  source 1..2725: mol_type = unassigned DNA
cctgccgccgccgccgcctccccggccgccgcccctccgcgccgaagccggagcagctccccaactcccacaacccagagcgcccgtgcctcaaggggaggaggcgttgtacttcaggccagccaatcagagcgcgcgagcccggagtacctttaccaataggcttgaacattggtcaataggtgttgcagccaagccgacacgggttttcccgccccgctccttccgttaaaccaatgggaaacaagtccctgggagtgtcccgccctggggtgagaactgcgaaccaataaaaattgaaacctgagcggtggcgcggccagctgtgggtggagtcaccccgcggactggacgggaacctggcggggtcaggtcccgtcaagcagcctggctcatggctgtgtgcggcctggggagccgtcttggcctggggagccgtcttggcctgcgcgggtgcttcggcgccgccaggctcctgtatccccgtttccagagccgcggccctcagggcgtggaagacggggacaggccacagccttcctcgaagacacccaggatccccaagatttacaccaaaacgggagacaaagggttttctagtaccttcacaggagaaaggagacccaaagatgaccaagtgtttgaagccgtgggaactacagatgaattaagttcagctattgggtttgctctggaattagtcacagaaaagggccatacatttgccgaagagcttcagaaaatccagtgcacattgcaggacgtcggctcggccctggcgacaccatgctcctcggcccgggaggctcacttaaagtataccacgttcaaggcggggcccatcctggagctggagcagtggatcgacaagtacaccagccagctcccaccactcacggccttcatcctgccttcgggaggcaagatcagctcggcgctgcatttctgccgggccgtgtgccgccgggccgagagacgtgtggtgcctcttgtccagatgggagagaccgatgcgaacgtggccaagttcttaaacagactcagtgactatctcttcacgctagccagatatgcagccatgaaggaggggaatcaagagaaaatatacatgaaaaatgacccatcggccgagtctgagggactctgaaatcacagaaagtgggagcttggaggatccctccatggcgatggccgtggagagaggagcttgcccttctggggtcctggttcctgaagagctcacccagagaggctcaaagcagccttttgtcccagctcagctttgatctacacctcttgccaccttcctcaagggactgtgaccctttggggattctgtccctgaccctgcttccccaagctctcctgggtcttggagggatgtgggaatgaattggcattgcaggaaagacaggtaaagtgattgctgcaatgagaaggagctgtgcggaaaaggaataaaagttggaaaggctggagccgtgtgtgtgtgtgtgtgtgtgtgtgtgtgtgtgtgtgtgtgtgtgagagagagccctcccactgccagctcaggttgttcacagatttggaatgggaccagaggcccttgaaaatgtaattgtgatttacctgtgccaaaggtgctttaaatgtcacatttgtaaaggggaaggcggacaagatttggaagtttagtcacctctgagccacccatcaccgccaaagtgtgggggaaggatagctgcagattgacaggcgaggctcagaaactcctggcttagattgaagtgtgtgtgatgggggtgcagcttagaggaccccctctgaaagggatggagatgctgatgagaacaacactaccacttgaaggtgaacattccctgtctggttggactgagtcaagggtctgcggtgcagcatcttcagcttgagaaaatgaggttgtcagtttccagcaaggctgacatccaccagactgatttctccgatgttgcacttggctggcttatgcctctgagatcggtgccacggctgtatttatttcagttgtcactgctgctccctcctgctatgaaacgacactgccagtgccagcagtgtccttgggaaaggcaatatttatgaagggcagaagaggcagccccaagaacctaaagactgcaggctgctaattgcaggaaatgactttggaagggcaggctcttgtccagtttcagggctgaaatgcctggcgaactccattcagccatcacatattgactgagtggctgcttagcatgggccaccgcgctaggctcgggacagctggtctttccggccatctttcttgctggcaagtcagcaaacattaccttcttagtcacgtgcatatttttgccttcattcttaccacctggcctgcaaagtttgcaggagggccaggtatattcacttgtgtcttctgggtcctttcattgctgacaggctgtgatggccctcttgagccttgggcagggtgggtgaggtgcagatgaccaggagtgtgtgaatgccttccaggaggtggctttgttccgtgcctccctgcccccatcgtcactaccaggtctggtacggagtcggtgctcagtgtttgcaaaacagagctgaaaacggactttgggaggccgaggcaggcagatcacctgaggtcaggagtttgagaccagcctggtcaacatggtaaaaccccatttctgctaaaaaaaaaaaaaaaaaaaaaaaa

SEQ ID NO: 17945 - DNA, 2981 bp, Homo sapiens
  source 1..2981: mol_type = unassigned DNA
ggcgatggaggcggtggaactacctttctctagaagagacacgtacatgcacacccccaccgtgtagcttgccgggaaactgagtcttcctgatttcgtgtggctgtctccaaggaggaaacgaactacgcatcccaagatgcatcgcgcataggcaatatggtcccgctactggacccatttcctacctgggaaatggagtcgaagctgactcaaaacgtaacggcccaattgtccttgagacttcattccccagcaagctcagcgtgtaacgtgcgctatggagccgaaagtcgcagagctgaagcagaagatcgaggacacgctatgtccttttggcttcgaggtttaccccttccaggtggcatggtacaatgaactcttgcctccagccttccacctaccgctgccaggacctaccctggccttcctggtactcagcacgcctgccatgtttgaccgggccctcaagcccttcttgcagagctgccacctccgaatgctgactgacccagtggaccagtgtgtggcctaccatctgggccgtgttagagagagcctcccagagctgcagatagaaatcattgctgactacgaggtgcaccccaaccgacgccccaagatcctggcccagacagcagcccatgtagctggggctgcttactactaccaacgacaagatgtggaggctgacccatgggggaaccagcgcatatcaggtgtgtgcatacacccccgatttgggggctggtttgccatccgaggggtagtgctgctgccagggatagaggtgccagatctgccacccagaaaacctcatgactgtgtacctacaagagctgaccgtatcgccctactcgaaggcttcaatttccactggcgtgattggacttaccgggatgctgtgacaccccaggagcgctactcagaagagcagaaggcctacttctccactccacctgcccaacgattggccctattgggcttggctcagccctcagagaagcctagttctccctccccggaccttccctttaccacacccgcccccaagaagcctgggaatcccagcagagcccggagctggctcagccccagggtctcaccacctgcatcccctggcccttgattttctcccatgtggaccctgatttatggtggtacttgctaggacttaattggctttggcaaagcaaaaggttttgagtacaagattactatttttgataatatagtagagatcttccatgaagataacaaggctcaaggaagttaggtttggccaagataaaggccagggaaccagaattcccatctgccttcaaatgagttttttttttttttttagacagagtcttactctgtcacctaggctggagtgcagtggcacagtctctactcactgcaacctctgcctcctgggttcaagcaattatctgcctcagcctcctgagtagctgggatgacaggtgcctgccactacacctggctaattttttgtatttttagtagagatggggtttcatcatattggccaggctggtctttaactcctgacctcgtgatccacccatcttggcctcccaaagtcctgggattacaggaatgagccaccgcacccagccaagactctatctgttcccatttctaagcagttccccaagatgttgttacagggcctaaggggcaaatatcctctaaagagtacctaccagcagggtgtggtggctcccgcctgtaatcccagcactctgggaggccgaggcaggtggatcatgaggtcgagtttgagaccagcctggccaatacagtgaaaccccgtctctactaaaaatgcaaagttagccgggcatggtagcgcaggcctgtagtcccagctactcaggaggctgaggcagtagaatcatttgaaccagggaggcagagattgcagtgagccgagattgcatggctgcactctagcctgggtgacagtgtgagactctgtctcaaaaaaaaaaaaaaaagtacctacctcaggtagggactgaataaacacgtgtaaggcactttggaaaaatacctggcatatatagtaagcagtatgttggccattaccaaaggccctgggaattctgtactgctgctcatgggtgtagtcggttctagaggggtgggcaggtgggagtagctgaggaagacaagtggctggaatggtatcacatgatacacagaagtatcctcagttctgaatctaccttggcctcaagggcccaggagaataacttttcccagctgacagcctctctgaggacaatgacatatgaatgaggatcaaaacgagctttggccaggcactgtggcgctcacctgtaatcccaccattttgggaggctgaggcggaggaccgcctgaggcaaggaattcagaaccactctgggcaacataatgacactaaaaaagactatctctaatcaaggctagaaccaagggaaggctaagaattgcccagtactgtgcaactacgaaagccctacccaaggccaccagccttgtcttcctctttcctctgtcagttcaaaaagaacagaaacctccagctcttttacatagcaggtaccaggcatttatcagaagaggccaagcttctggttcccatgcagccctttgaatagtgtgtctaaacaaaaataggtgtccaagtagtcacactgagactttaactggtaacccagcctgtggcgtcagtcgcagtgctctggccaacactatagcagggcttattcttctccctcatgtgtagtgaaacaaaatgtaacaccttgggttcattcagttccattccctatatctacctgtgtcaatataattccctgatttggaggcagctctcctcattttccccaaaacagggaaagcaaggagtaaattcctcttaaaatcaaaagctaataatatgcttcctaaaataaagactcatcaaggtctcagttcaagtttaa

SEQ ID NO: 17946 - DNA, 1436 bp, Homo sapiens
  source 1..1436: mol_type = unassigned DNA
gcgcgtgcgcatcatcgtttcgacgcgctcggaagcaacttcctttgcctgctcaccgccagcgtaggtgctaccaccgctgccgtcgccgccgccattttgatggcaggaagagtccggttctgggacagctggagacagtggtggtgactgaaataactttaccaaaggaaagctattttgcgaactatcttctccagcggagatggccaatgtgctttgtaacagagccagactggtttcctatctcccaggattttgctctttagttaaaagggttgtcaatcccaaagccttttcgactgcaggatcatcaggttcggatgagtctcatgtggctgctgcacctccagatatatgctctcgaacagtgtggcctgatgaaactatgggaccctttggacctcaagatcagaggttccagcttcctgggaacataggttttgattgtcacctcaatgggactgcttcacagaagaaaagcctggttcataaaactttgcctgatgttctagcagaacctttatcaagtgaaagacatgagtttgtgatggcacaatatgtgaatgaatttcagggtaatgatgcacctgttgaacaagaaattaacagtgcagaaacttactttgaaagtgccagagtagagtgtgcaatacagacatgtccagaattgctgcgaaaagattttgaatcactgtttccagaagtagctaatggcaaactaatgattctgactgtaacacaaaaaactaagaatgatatgactgtttggagtgaagaagtagaaattgaaagagaagtgctcttagaaaagttcatcaatggtgctaaggaaatttgctatgctcttcgagctgagggttattgggctgactttattgacccatcatctggtttggcattttttggaccatatacaaacaacactctttttgaaactgatgaacgctaccgacatttaggattctctgttgatgaccttggatgctgtaaagtgattcgtcatagtctctggggtacccatgtagttgtagggagtatcttcactaatgcaacaccagacagccatattatgaagaaattaagtggaaattagcagaaatatccattcatttgctgtactatttgtatgtaatatttgggttgatctataaacactgtcagactaaagtttttaaaatatatttatttctaagtatttatttcagcatttatgaatttacaacattggcaagtgatttgggattttaaaattgcaaatgttcatttattcatatcattgaatacacgttgaacacatccacattgtataggatgtggtaattagcttgtaaccagggtatgatctgctattgttatttctcctctttattggaaaaaggcctcagttttaattattttcttcccaaaataaatcacacatttggttacaataa

SEQ ID NO: 17947 - DNA, 1726 bp, Homo sapiens
  source 1..1726: mol_type = unassigned DNA
tcggtattgcccgtattttcactgggtccctgtcgttgtccccagccatcctgtccgtctgtctttagtctcttttctgcttcctcatctttccgatcagcctgaagctttgcttggagctgttgttacgcagccccaacttctgttaaagcagccgcttcgatcctctggactgaattttggccacccagcccccattcccctcccggatctggtccgagttgtttttccgcggctgtaaaccggaagggctctgagctgcactgccggctccgggctgggggatctgtgcctggcatgggggcgagttctggcctccttagggtacggggagagcttggactttggtcctgacgtggtggacgacacaccttcgaagagtggacgttacctcagttgtctgttgttagagtttaatcgatcactcgtctgttttgttgtgttctttcccagaaataactttaccaaaggaaagctattttgcgaactatcttctccagcggagatggccaatgtgctttgtaacagagccagactggtttcctatctcccaggattttgctctttagttaaaagggttgtcaatcccaaagccttttcgactgcaggatcatcaggttcggatgagtctcatgtggctgctgcacctccagatatatgctctcgaacagtgtggcctgatgaaactatgggaccctttggacctcaagatcagaggttccagcttcctgggaacataggttttgattgtcacctcaatgggactgcttcacagaagaaaagcctggttcataaaactttgcctgatgttctagcagaacctttatcaagtgaaagacatgagtttgtgatggcacaatatgtgaatgaatttcagggtaatgatgcacctgttgaacaagaaattaacagtgcagaaacttactttgaaagtgccagagtagagtgtgcaatacagacatgtccagaattgctgcgaaaagattttgaatcactgtttccagaagtagctaatggcaaactaatgattctgactgtaacacaaaaaactaagaatgatatgactgtttggagtgaagaagtagaaattgaaagagaagtgctcttagaaaagttcatcaatggtgctaaggaaatttgctatgctcttcgagctgagggttattgggctgactttattgacccatcatctggtttggcattttttggaccatatacaaacaacactctttttgaaactgatgaacgctaccgacatttaggattctctgttgatgaccttggatgctgtaaagtgattcgtcatagtctctggggtacccatgtagttgtagggagtatcttcactaatgcaacaccagacagccatattatgaagaaattaagtggaaattagcagaaatatccattcatttgctgtactatttgtatgtaatatttgggttgatctataaacactgtcagactaaagtttttaaaatatatttatttctaagtatttatttcagcatttatgaatttacaacattggcaagtgatttgggattttaaaattgcaaatgttcatttattcatatcattgaatacacgttgaacacatccacattgtataggatgtggtaattagcttgtaaccagggtatgatctgctattgttatttctcctctttattggaaaaaggcctcagttttaattattttcttcccaaaataaatcacacatttg

SEQ ID NO: 17948 - DNA, 835 bp, Homo sapiens
  source 1..835: mol_type = unassigned DNA
ggcgggttgctttccaaaatggcgcgggtgctgaaggctgcagccgcgaatgccgtagggcttttttccagacttcaagctcccattccaacagtaagagcttcttccacatcacagcccttggatcaagtgacaggttctgtgtggaacctgggtcgactcaaccatgtagccatagcagtgccagatttggaaaaggctgcagcattttataagaatattctgggggcccaggtaagtgaagcggtccctcttcctgaacatggagtatctgttgtttttgtcaacctgggaaataccaagatggaactgcttcatccattgggacgtgacagtccaattgcaggttttctgcagaaaaacaaggctggaggaatgcatcacatctgcatcgaggtggataatattaatgcagctgtgatggatttgaaaaaaaagaagatccgcagtctaagtgaagaggtcaaaataggagcacatggaaaaccagtgatttttctccatcctaaagactgtggtggagtccttgtggaactggagcaagcttgatttatatttgcaagcaactaaattaattgacctgaaaaagcctatcaaatactatcaaaatgtactatgacattgagtccttcactgcttccatcatgtaaaagttcacagttaaagactgaattacagaaagattaaaatatatacatatataaatacataaatatgtatattatttagattaacaaacatatttgttaatttgaatttgaagaaaatcttgattactaattacttagggaacattattaaaatcatatagaaataaattattcctcttctacaa

SEQ ID NO: 17949 - DNA, 3022 bp, Homo sapiens
  source 1..3022: mol_type = unassigned DNA
atttaaactcccagagccgttaagttggttcgtagtctgatgcgcgcgcaaccagggtggtggcggagtgcgcatgcgtggttcccgggcgaagggaacgcgcgctcaccgtgcgcgctcgcggccgggtggtagtggcggaggagaaaggggtcggcgcacgcgcggttgagtcctcgagtagttcgggtctcgcgggcctcttgttttggtctcgcgggctagtagggcgcacttggcggggaggcgcttgggcgcgagactaggcgtgaagagcagagctgcgcgcgcactcgggaaaggggggaagggagcagggtccaggcagggggggttaggccccctgatccccctcgttaccccgactggcacggaataaggggaggaaatgatcgagatggcggcggagaaggagccgtttctggtgccggccccgccgccgccgctcaaagatgagtcgggcggagggggcggccccacggtgccaccgcaccaagaggccgcctctggggagctccgcggcgggacggagcgtggtccgggtcgttgcgcgccatctgcggggtccccagccgctgcggtcggtcgggaaagccccggggccgcggccacctcctccagtggtccccaggcgcagcagcaccgagggggcggcccccaggcgcagtcgcatggggaggcccgcctgtcggatcccccggggcgagccgctcccccggacgtgggggaggagcgccggggagggggcgggacagagctgggtccccctgctcctcctcgaccccgcaatggctatcagccccaccggccacctggggggggcgggggcaagaggagaaatagctgtaatgtagggggaggcgggggaggcttcaaacatccggccttcaagaggcgcaggcgggtgaattcggactgtgactctgtgttaccctccaacttcctcctggggggcaatatctttgatcccctgaacctgaatagcctcctggatgaggaagtgagccgcactctcaacgcggagacccctaagtcatccccccttccggccaaagggcgagatccggtggagatcctcatccccaaagatattactgacccgctcagtctcaatacttgcactgatgagggccatgtagttcttgcttcgccactcaagactggtcggaagcggcatagacaccggggacagcaccaccagcagcagcaggcagccggagggagtgagagtcaccccgtgccgcccacagcccctctcacccccttactccacggggagggcgcctcacagcagccgcggcacaggggccagaaccgggatgccccccaaccctatgaactcaacacagccatcaactgcagggatgaagtggtgtctccccttccatctgctctgcagggtccctcaggctccctatcagcccctccagctgcctcagttatctctgcacccccatcttcctcctcccgacatcgcaaacgtcgcaggacttccagcaagtcggaggcaggggctaggggtggaggccagggttccaaggaaaagggccgagggagttggggaggccgccaccaccaccaccacccactgcctgcagcaggcttcaaaaagcaacagcgcaagttccagtatgggaattattgcaaatactatgggtaccgcaatccttcctgtgaggatgggcgccttcgggtgttgaagcctgagtggtttcggggccgggacgtcctagatctgggctgcaatgtgggccatctgaccctgagcattgcctgcaagtggggcccgtcccgcatggtgggcctggatatcgattcccggctcatccattctgcccgccaaaacatccgacactacctttccgaggagctgcgtctcccaccccagactttggaaggggacccgggggcagagggtgaggaagggaccaccaccgttcgaaagaggagctgcttcccagcctcgctgactgccagccggggtcccatcgctgccccccaagtgcccttggatggagcggacacatcagtcttccccaacaatgttgtcttcgtcacgggtaattatgtgctggatcgagatgacctggtggaggcccaaacacctgagtatgatgtggtgctctgcctcagcctcaccaagtgggtgcatctgaactggggagacgagggcctgaagcgcatgtttcgccggatctaccggcacctacgccctgggggcatcctggtcctagagccccaaccctggtcgtcgtatggcaagagaaagactcttacagaaacgatctacaagaactactaccgaatccaattgaagccagagcagttcagttcctacctgacatccccagacgtgggcttctccagctatgagcttgtggccacaccccacaacacctctaaaggcttccagcgtcctgtgtacctgttccacaaggcccgatcccccagccactaagtggccccctaaacagaaagtgtgaagaggctgccctcgctgctcataaggacctgggggaagaggaaagtgtcccaaggtctttcctttctgactccaaaaatagtttcctttcttggatctgcaaagaaagcttttcttccgtcgctgcctcagcctcctccctatgcctctggcacctgcgcagcaaggctggctgtgctggagtcaccatcatcttcctctcccccagcctcccaggctggatggcatggactgtttgctgacctctgttctcttagggcatgggaggtgggaggatatcaaattctctagccctttcctcctattctcccaaggagagagattcccatttctcctcggccattgtacctagctcttgtccctagctgcatttcagtggaccatggatagagggactgagggttagacggggaagactggcagggaggcacgcaggtactgtgaaaatccttccctttgccctcccccagtgggagagggggttgggttttcaatgtgagaacagcacaataaacttgatgtctagggcagtggccccca

SEQ ID NO: 17950 - DNA, 2261 bp, Homo sapiens
  source 1..2261: mol_type = unassigned DNA
agtgagcgggcgtcgggagtgggcggatgcgttggggttcgggtcgtgggtgttgaggcggagaggaaggcgtggtgtggcgtctccaggtgattgcgattgggggaaggtagaggagccagagaacgactcagccgtttcgggggaagaggaagttggacaacatcggctgttttagtgctttttatttttccccaattcagcagagaatattttcaagggggcctcctggatgaggaagtgagccgcactctcaacgcggagacccctaagtcatccccccttccggccaaagggcgagatccggtggagatcctcatccccaaagatattactgacccgctcagtctcaatacttgcactgatgagggccatgtagttcttgcttcgccactcaagactggtcggaagcggcatagacaccggggacagcaccaccagcagcagcaggcagccggagggagtgagagtcaccccgtgccgcccacagcccctctcacccccttactccacggggagggcgcctcacagcagccgcggcacaggggccagaaccgggatgccccccaaccctatgaactcaacacagccatcaactgcagggatgaagtggtgtctccccttccatctgctctgcagggtccctcaggctccctatcagcccctccagctgcctcagttatctctgcacccccatcttcctcctcccgacatcgcaaacgtcgcaggacttccagcaagtcggaggcaggggctaggggtggaggccagggttccaaggaaaagggccgagggagttggggaggccgccaccaccaccaccacccactgcctgcagcaggcttcaaaaagcaacagcgcaagttccagtatgggaattattgcaaatactatgggtaccgcaatccttcctgtgaggatgggcgccttcgggtgttgaagcctgagtggtttcggggccgggacgtcctagatctgggctgcaatgtgggccatctgaccctgagcattgcctgcaagtggggcccgtcccgcatggtgggcctggatatcgattcccggctcatccattctgcccgccaaaacatccgacactacctttccgaggagctgcgtctcccaccccagactttggaaggggacccgggggcagagggtgaggaagggaccaccaccgttcgaaagaggagctgcttcccagcctcgctgactgccagccggggtcccatcgctgccccccaagtgcccttggatggagcggacacatcagtcttccccaacaatgttgtcttcgtcacgggtaattatgtgctggatcgagatgacctggtggaggcccaaacacctgagtatgatgtggtgctctgcctcagcctcaccaagtgggtgcatctgaactggggagacgagggcctgaagcgcatgtttcgccggatctaccggcacctacgccctgggggcatcctggtcctagagccccaaccctggtcgtcgtatggcaagagaaagactcttacagaaacgatctacaagaactactaccgaatccaattgaagccagagcagttcagttcctacctgacatccccagacgtgggcttctccagctatgagcttgtggccacaccccacaacacctctaaaggcttccagcgtcctgtgtacctgttccacaaggcccgatcccccagccactaagtggccccctaaacagaaagtgtgaagaggctgccctcgctgctcataaggacctgggggaagaggaaagtgtcccaaggtctttcctttctgactccaaaaatagtttcctttcttggatctgcaaagaaagcttttcttccgtcgctgcctcagcctcctccctatgcctctggcacctgcgcagcaaggctggctgtgctggagtcaccatcatcttcctctcccccagcctcccaggctggatggcatggactgtttgctgacctctgttctcttagggcatgggaggtgggaggatatcaaattctctagccctttcctcctattctcccaaggagagagattcccatttctcctcggccattgtacctagctcttgtccctagctgcatttcagtggaccatggatagagggactgagggttagacggggaagactggcagggaggcacgcaggtactgtgaaaatccttccctttgccctcccccagtgggagagggggttgggttttcaatgtgagaacagcacaataaacttgatgtctagggcagtggccccc

SEQ ID NO: 17951 - DNA, 6029 bp, Homo sapiens
  source 1..6029: mol_type = unassigned DNA
ctccgcactgctcactcccgcgcagtgaggttggcacagccaccgctctgtggctcgcttggttcccttagtcccgagcgctcgcccactgcagattcctttcccgtgcagacatggcctctggcaccaccaccaccgccgtgaagattggaataattggtggaacaggcctggatgatccagaaattttagaaggaagaactgaaaaatatgtggatactccatttggcaagccatctgatgccttaattttggggaagataaaaaatgttgattgcgtcctccttgcaaggcatggaaggcagcacaccatcatgccttcaaaggtcaactaccaggcgaacatctgggctttgaaggaagagggctgtacacatgtcatagtgaccacagcttgtggctccttgagggaggagattcagcccggcgatattgtcattattgatcagttcattgacaggaccactatgagacctcagtccttctatgatggaagtcattcttgtgccagaggagtgtgccatattccaatggctgagccgttttgccccaaaacgagagaggttcttatagagactgctaagaagctaggactccggtgccactcaaaggggacaatggtcacaatcgagggacctcgttttagctcccgggcagaaagcttcatgttccgcacctggggggcggatgttatcaacatgaccacagttccagaggtggttcttgctaaggaggctggaatttgttacgcaagtatcgccatggcgacagattatgactgctggaaggagcacgaggaagcagtttcggtggaccgggtcttaaagaccctgaaagaaaacgctaataaagccaaaagcttactgctcactaccatacctcagatagggtccacagaatggtcagaaaccctccataacctgaagaatatggcccagttttctgttttattaccaagacattaaagtagcatggctgcccaggagaaaagaagacattctaattccagtcattttgggaattcctgcttaacttgaaaaaaatatgggaaagacatgcagctttcatgcccttgcctatcaaagagtatgttgtaagaaagacaagacattgtgtgtattagagactcctgaatgatttagacaacttcaaaatacagaagaaaagcaaatgactagtaaacatgtgggaaaaaatattacattttaagggggaaaaaaaaacccaccattctcttctccccctattaaatttgcaacaataaagggtggagggtaatctctactttcctatactgccaaagaatgtgaggaagaaatgggactctttggttatttattgatgcgactgtaaattggtacagtatttctggagggcaatttggtaaaatgcatcaaaagacttaaaaatacggacgtactttgtgctgggaactctacatctagcaatttctctttaaaaccatatcagagatgcatacaaagaattatatataaagaagggtgtttaataatgatagttataataataaataattgaaacaatctgaatcccttgcaattggaggtaaattatgtcttagttataattagattgtgaatcagccaactgaaaatcctttttgcatatttcaatgtcctaaaaagacacggttgctctatatatgaagtgaaaaaaggatatggtagcattttatagtactagttttgctttaaaatgctatgtaaatatacaaaaaaactagaaagaaatatatataaccttgttattgtatttgggggagggatactgggataatttttattttctttgaatctttctgtgtcttcacatttttctacagtgaatttaatcaaatagtaaagttgttgtaaaaataaaagtggatttagaaagatccagttcttgaaaacactgtttctggtaatgaagcagaatttaagttggtaatattaaggtgaatgtcatttaagggagttacatctttattctgctaaagaagaggatcattgatttctgtacagtcagaacagtacttgggtttgcaacagctttctgagaaaagctaggtgtttaatagtttaactgaaagtttaactatttaaaagactaaatgcacattttatggtatctgatattttaaaaagtaatgtttgattctcctttttatgagttaaattattttatacgagttggtaatttttgctttttaataaagtggaagcttgcttttttaactctttttttattgttattttatagaaatgctttttgttggccgggcacagttgctcatccatgtaatcccagcactgtgggaggccgagacgggtggatcacaaggtcaggagatcgagaccatcctggctaatgcgttgaaactccgtctctactaaaaatacaaaaaattagctgggcgtggtggtgggcacctgtagtcccagctactcaggaggctgaggcaggagaatggtgtgaacctgggaggtggagcttgcagtgagcagagcttgcagtgagacgagcttgtgccactgcactccagcctgggcaacagagtaagactcagtctcaaaaaaaaaaaaaagagtgaaatgctttttgtttgcttcagttttttatcatggggagatctttttcctcagaattgttttcttttcactgtaggctattacaggatacttcaggatcaagatacagaaccttttatttaaagagtttgtaaagtcaatgtgtttgtttgtgtctctgagattgacttcaagataataagctgctaattgtaaacaaaacagttaccctccagtattaatatgactcattagtgtgagccatttgggtcaagtatgattatgacccttggacttcctgatgtagtattaaatttcaactctggttatccattagcaatctgtagagaacttaatgaacctgaacccaggcttctctagctctggtaacgtgtgattgttttcactacaatatgatacatagatggtaccttacttttcctcattcttaataggtgtctaagaatgtcagggcaaaagtatgggcatttttcttgctatgttcagaaagtacagttctctccaacttgcagaggtacttttcttgattaaatagccttctctagcaacatcattttcagactaactaaatgaatgcagtatactcttttctttgttctcaatcattcactccttatgcaaagccaatataattttcctcataccttatgcttgaggatattgttgaagaacacttcctggaacacttctcacttgtgatgctgtactaattttttttttttaatttaagctagtatactaagtgaacaccatggtcagttgtgagcattttggtttccgcaaaggatggatggtgagcatcatgggaaagctgtagtttagtgacttagcccttagtgattaatagatttgcatgtacatagaagtctttgttggccttataatctgctgttatatttggcatggattttcatggttttgagaatgacatcctggccctgtggtccccgagggtcatggtccttgtgacctggcccctgttcactgcccccttcgctagcacgagttgctgtgcagggctggaggtagctaccatggcttgtttcaaggaaggaaactctggtacggtggcaccctcaggagtggaggacagtgaacttccttgaagagggagtgactaaggtgacctccaacctgccctgagccagctgccctgcaggtgccacgtgagcctgctctggcatccacaggatgctcctggagcctcttctctggctgctacctcagggcatggttgtggccccaccaacacctattttccaaataattattcattcttgtgacagtggcctgaacatgtttttaattttctcaacaagcatttagccagcacttatccagtgaaacaatttgataaggtttcaaggagtatctgatgggttaggaagtcacgaaatgaggagttcttgccacatttgcagagtccctccttgataaggtttggcggtgtccccacccaaatctcatgttgaattgtagttcccataatccccacatgttgtgggagggacccagtgggaggtaattaaatcatgggggtggttacccccacactgctgttctcatgatactgagttctcacaagtcctgtttgttttataaggggcttttcccccttttgctcaacacttcttcctgccatcatgtgaagaaggacgtgtttgtttccccttctgccacgattgtaagtttcctgaggccttcccagctatgtggaactgtgagttaattaaacctctttcctttataaattacccagtcatgggcagtcctttacagcagcatgagaatggactaatacactcctcaaatgttttgaagattgttgcaccttggaactaccagtgtgcacacaatctggctcaatgtatatattggcccagcaaggcaaagaactgaagttccaggatggaagaacctgtgttctcctcataatagtatagaataattcaagataggcaagaaggacagcagtaaatgaagaccatggaagaaaagaaggaatgccaaagatcgaggaaatctaccaagactagtagggtagtccagaagaagctgtttcagggcctgttgccagctatgcctttgagaacctcgggatcccaaagaatgaggggaatttcttcagaaagacaatctcggcatgcattatttctttgttttgaagattcactcatgttgcatgcatctgtagcttgtgccttttttattgcctagtagtattctgtcatatgcctatcttacaatttgattatctattcacctgttgatgaatgtttgaattttttccatttgaggaattttatgaataaagctgctataagcatgaaattacaagtctttttgtgaacatattttcacttgtgcaaatgcctatactcccaccagtaatttgtaagaattcttgacaaagcttggtattgtcagcgtttttaattttagccattctattgggtatattttgatatctcgtggttttgatttgcatttttctgattaaagatgttgaacttcttttcatgtgcttattggccattcacatatttcgtgaactatctgtacaaatatttttgtttattaaaaaattagattgttttgttttattattgaatagtaagaattgtttatatattctggatacactctttttcagatatgtgtgttgtgactattcttagtctttagcttgccttttcattttcttaattatgtctttcaaagaacaagtttttcattttgacgaagcctagtttatcaattttttttatggttggtgctttttgtgtgttccaagaaatctttgcctactcatttaattacctgtgtgcccttgtcaaaatcatttaattttgactactcacttaattaccttgcctactcatttaattacctgtgtgcccttgtcaaaatttactgtttatctgtgaatctggatgatctatttatgtcatttatctatgtgtctcttcttatgccagtaccccactgtcttgattattgtggctttatggtgtcttgaaattaagtattgttaagctttgcaatcttttccaagattgttttggctataggtcctttctttataaagtttatattaagcttctccatttttctttaagaaaaaatctgctggaatggcactgaatttttaggtcgatttgggaagaattgacaatattgaacctttcaatcgatggacatggtatgtttctgcatttatttgggccttttaaaatttatctcagcaatattttgtagttttagtgaagaagtcttgtatatatcttttgttaaatgtattcctaaatattttgtggaaatgttactgtaaatagtactttaatttcatttttaagtttattgctggtatacagaaatatgttttatttttgtatattgactttatattctgtaatcttattaaattcacttagttca

SEQ ID NO: 17952 - DNA, 1096 bp, Homo sapiens
  source 1..1096: mol_type = unassigned DNA
cacgtggatttggtagagaaaccccggactgggatcatggcagccgagactcggaacgtggccggagcagaggccccaccgccccagaagcgctactaccggcaacgtgctcactccaaccccatggcggaccacacgctgcgctaccctgtgaagccagaggagatggactggtctgagctatacccagagttcttcgctccactcactcaaaatcagagccacgatgacccaaaggataagaaagaaaagagagctcaggcccaagtggagtttgcagacataggctgtggctatggtggcctgttagctgacaaagatgttcttcctcttccccgacccacatttcaagcggacaaagcacaagtggcgaatcatcagtcccaccctgctagcagaatatgcctacgtgctaagagttggggggctggtgtataccataaccgatgtgctggagctacacgactggatgtgcactcatttcgaagagcacccactgtttgagcgtgtgcctctggaggacctgagtgaagaccccgttgtgggacatctaggcacctcaactgaggaggggaagaaagttctacgtaatggagggaagaatttcccagccatcttccgaagaatacaagatcccgtcctccaggcagtgacctcccaaaccagcctgcctggtcactgactgcttactctaccttagctggacctcgtctcccagggattagagaaaagagcaggagtcctgggtcttcccagttgagactgctggagctgagacacagtactctcttaaagaaggtggggagctgcccagggcagaacccactggtgttcatgactacccctggctcctctcaccttgtccctccactgccaacagaaaacaaagcagctgactgagatggtcaaaggactttggaccataggggatctttggaaggctgtggggtcttgctcttccttagcactcctttctccttgtgagatctctcctcagctggaatgaggaatgtagtccatctaaactgcttgctaggctcaattaccacttctgtttgctttgtggatcctgggataacatgtatatgtgtacaca

SEQ ID NO: 17953 - DNA, 2066 bp, Homo sapiens
  source 1..2066: mol_type = unassigned DNA
aaagagcccgacctcccgcgggaacaccgattccgactcagattcgggatctgggccggggtccgccatccggcccgccaagggagtgcctgggcaccgcggccggcgctcagatcccggatccggagcggggtagaggctgggggccgcgagccgtcgtggtgtccctgtggaacgagccccgcctccctgagtttgccctccttcctccagttcgatttcctggaggtggaatgaggagctgcccctcccgccccggccccgagcgcacactcgacgaaacccacacgggaccacaagagtcagaccgggcggactggtccgagaccaggagtaaggggacaggagcgaggactgatgccactgtagaaggcgaggtctctagacccctctcacctgtggggtgcacaggtgcctgcaaccaggatggtaacccagaccaggcagaagcaagctaagagaaaacgttgggtccctgggcctggcctcgccctcccagttggaggctaacggtgcggaggttccctccagcactcgctccttacagccctccccacctagcccagcccagcccagcccagcccagctgaatttgctcttgggtctttaaggggcgggaactgccaccaacgcgcatggctgcgtcattaacttgcgcctctggcctgcgcctccacgtggatttggtagagaaaccccggactgggatcatggcagccgagactcggaacgtggccggagcagaggccccaccgccccagaagcgctactaccggcaacgtgctcactccaaccccatggcggaccacacgctgcgctaccctgtgaagccagaggagatggactggtctgagctatacccagagttcttcgctccactcactcaaaatcagagccacgatgacccaaaggataagaaagaaaagagagctcaggcccaagtggagtttgcagacataggctgtggctatggtggcctgttagtggaactgtcaccgctgttcccagacacacttattctgggtctggagatccgggtgaaggtctcagactatgtacaagaccggattcgggccctacgcgcagctcctgcaggtggcttccagaacatcgcctgtctccgtagcaatgccatgaagcaccttcctaacttcttctacaagggccagctgacaaagatgttcttcctcttccccgacccacatttcaagcggacaaagcacaagtggcgaatcatcagtcccaccctgctagcagaatatgcctacgtgctaagagttggggggctggtgtataccataaccgatgtgctggagctacacgactggatgtgcactcatttcgaagagcacccactgtttgagcgtgtgcctctggaggacctgagtgaagaccccgttgtgggacatctaggcacctcaactgaggaggggaagaaagttctacgtaatggagggaagaatttcccagccatcttccgaagaatacaagatcccgtcctccaggcagtgacctcccaaaccagcctgcctggtcactgactgcttactctaccttagctggacctcgtctcccagggattagagaaaagagcaggagtcctgggtcttcccagttgagactgctggagctgagacacagtactctcttaaagaaggtggggagctgcccagggcagaacccactggtgttcatgactacccctggctcctctcaccttgtccctccactgccaacagaaaacaaagcagctgactgagatggtcaaaggactttggaccataggggatctttggaaggctgtggggtcttgctcttccttagcactcctttctccttgtgagatctctcctcagctggaatgaggaatgtagtccatctaaactgcttgctaggctcaattaccacttctgtttgctttgtggatcctgggataacatgtatatgtgtacacatgcctattctgccatttctcaggaaagggtggagtatgtatcatatgccttctaccatcctcctgtcctctccctgcgtaagacttgacctggggaatctgtgttccctaa

SEQ ID NO: 17954 - DNA, 2799 bp, Homo sapiens
  source 1..2799: mol_type = unassigned DNA
atggctgaggtgggccgtaccgggatcagctacccaggcgcgcttctcccacagggcttctgggctgcggtcgaagtgtggctggagaggccgcaggtggcaaacaaacggctttgcggcgcccgcctggaggcccgctggagcgccgccctgccctgcgcggaggcccgcggccccgggactagcgcaggctcggagcagaaggagcggggtccgggacccggccagggttcccccggagggggcccgggtcccaggtcgctatcaggacccgagcagggcacggcatgttgcgaacttgaggaggcccagggccagtgccagcaagaggaggcacagagggaagccgcctcagtgcccctgagggactccgggcaccccggccatgctgaaggaagggagggcgacttccccgccgcagatctggattcgctttgggaggatttctcccaaagtctcgcccgtggcaattcggagttgctggccttcctcaccagctccggggcgggatcgcagccagaggcgcagcgtgagctcgacgtggttctcagaaccgtcatcccgaaaactagcccacattgcccccttacaactcccaggagggaaatagtcgtgcaagatgtcctcaatggaaccataacgtttttgcctttggaagaagatgatgaggggaacctaaaggttaagatgagcaatgtgtatcaaattcagctcagtcatagcaaagaagaatggttcatatctgttttaattttctgtccagaaagatggcattcagatggaatcgtgtatcccaaacccacgtggcttggagaagagttgctggccaagttggccaagtggtctgtagagaacaagaagagtgactttaaaagcaccctttccctcatctccattatgaagtatagcaaggcttaccaggaacttaaagagaagtataaggaaatggttaaggtgtggcctgaagtcactgatcctgagaagttcgtgtatgaagatgtggctatcgcagcatacctgctgattctatgggaagaagaaagggctgagaggagactaactgccaggcagtcctttgtggacctgggatgtggaaatggcctcctggtccacatcctgagcagtgaggggcatccaggcagagggattgatgtccgaagaagaaaaatctgggacatgtatggaccacaaactcagttagaggaagatgcaatcacacccaatgataagacccttttccctgatgttgattggttaatcggtaaccattctgatgaactcacaccatggatacctgtcattgcagccaggtcttcctacaattgccgcttctttgtcctcccctgctgcttctttgacttcattggaagatactcccggaggcagagtaagaagactcagtaccgggaataccttgacttcattaaagaagtgggcttcacctgtgggtttcacgtggacgaagactgcctcaggattccttcaaccaaaagagtctgtctcgttggaaaatccagaacatacccttcctccagagaagcttccgtggatgaaaagaggactcagtacattaagagcaggcggggctgccctgtaagcccacctggctgggagctttccccttctccacgctgggttgctgctggcagtgctggtcactgtgacggtcagcaagctctggacgccagggtcgggtgtgtaaccagggcctgggccgctgagcatggagcagggccccaggctgaaggaccctggctacctggatttcatcccagagaaaaggctgagcgtgtgaggaactgtgccgccctgccacgagattttattgaccaagtggttttgcaagtagcgaatttactgttaggtggaaagcaattaaacacaagaagttctcgaaatgggagtttgaagacctggaatgggggagagagcctatctctggcagaagtagccaacgagctggacacggagaccctgcggaggctgaagcgggagtgtgggggcctgcagacgctgctccggaacagccaccaggtgttccaagttgtgaatgggagagttcacatccgcgactggcgagaggagacactgtggaagacaaagcaaccggaagcgaaacagagactgctctctgaagcctgcaaaacccgcctctgctggttcttcatgcatcaccctgatggctgcgctctgtccacggactgctgcccgtttgcccatgggcctgcggagctgcggccaccccggaccaccccgaggaagaagatttcatgagctgcatccttgccagccgaggcctggttggggaggccaaaccaaggagagcttccccagcagtcgtcagtgctgtggtctctgctctggctgtgtttcagcccacctcctcccagctttctccacatcctcacagtgatgaaccgtatttcataaacatcacacgccagagaagccacagttactcggaagcccccagctgactgcctggcttgtttcagatgcagccgcttgaaacgtgcgcagcatcttcatatcataaagattgtgcacggatccttacaatgtctcctgggggagagcggctgaggctgccttgcacaggcccttcccagggcgctgtccgacgcctgccccaccatgtccacatctgtgaagaggatggggctcctcgagaagtaagaccgtatctgccagcgtttctcaccacactggagagcagctgctctggagcagggatccaccagattggtatttttaaaaaaggtgtcaggcttgctatgttgaggttgtttttagagttac

SEQ ID NO: 17955 - DNA, 1666 bp, Homo sapiens
  source 1..1666: mol_type = unassigned DNA
gattcggagacgagaccaagctgttgctgaggacgacagccctgctctggtcactccggaggctgaccagtctacacacggctgaagcttgaagaaacaacaagcccggctctagtcacgcactggcagctgaatagtctacgcatggccgaagcttgaggacttgtcaagcaaatgtcctcaatggaaccataacgtttttgcctttggaagaagatgatgaggggaacctaaaggttaagatgagcaatgtgtatcaaattcagctcagtcatagcaaagaagaatgaaagatggcattcagatggaatcgtgtatcccaaacccacgtggcttggagaagagttgctggccaagttggccaagtggtctgtagagaacaagaagagtgactttaaaagcaccctttccctcatctccattatgaagtatagcaaggcttaccaggaacttaaagagaagtataaggaaatggttaaggtgtggcctgaagtcactgatcctgagaagttcgtgtatgaagatgtggctatcgcagcatacctgctgattctatgggaagaagaaagggctgagaggagactaactgccaggcagtcctttgtggacctgggatgtggaaatggcctcctggtccacatcctgagcagtgaggggcatccaggcagagggattgatgtccgaagaagaaaaatctgggacatgtatggaccacaaactcagttagaggaagatgcaatcacacccaatgataagacccttttccctgatgttgattggttaatcggtaaccattctgatgaactcacaccatggatacctgtcattgcagccaggtcttcctacaattgccgcttctttgtcctcccctgctgcttctttgacttcattggaagatactcccggaggcagagtaagaagactcagtaccgggaataccttgacttcattaaagaagtgggcttcacctgtgggtttcacgtggacgaagactgcctcaggattccttcaaccaaaagagtctgtctcgttggaaaatccagaacatacccttcctccagagaagcttccgtggatgaaaagaggactcagtacattaagagcaggcggggctgccctgtaagcccacctggctgggagctttccccttctccacgctgggttgctgctggcagtgctggtcactgtgacggtcagcaagctctggacgccagggtcgggtgtgtaaccagggcctgggccgctgagcatggagcagggccccaggctgaaggaccctggctacctggatttcatcccagagaaaaggctgagcgtgtgaggaactgtgccgccctgccacgagattttattgaccaagtggttttgcaagtagcgaatttactgttaggtggaaagcaattaaacacaagaagttctcgaaatgggagtttgaagacctggaatgggggaggtaagctgtccaccatcttagggaggggctagcacgctcccaggcttgagggcaggaattcacgtcttcagaaccgacatgaaatggtgtggccctgtgactacacactttgaaaaagccattgatggtgggtgcataggctctcttcaagcaaattctttaaaattttccaaatagctcttataaacataaaggactttgttatttccaggg

SEQ ID NO: 17956 - DNA, 2015 bp, Homo sapiens
  source 1..2015: mol_type = unassigned DNA
aaatgacttttctgtcttgctcagctccaggggtcattttccggttagccttcggggtgtccgcgtgagaattggctatatcctggagcgagtgctgggaggtgctagtccgccgcgccttattcgagaggtgtcagggctgggagactaggatgtcggacacgtggagctctatccaggcccacaagaagcagctggactctctgcgggagaggctgcagcggaggcggaagcaggactcggggcacttggatctacggaatccagaggcagcattgtctccaaccttccgtagtgacagcccagtgcctactgcacccacctctggtggccctaagcccagcacagcttcagcagttcctgaattagctacagatcctgagttagagaagaagttgctacaccacctctctgatctggccttaacattgcccactgatgctgtgtccatctgtcttgccatctccacgccagatgctcctgccactcaagatggggtagaaagcctcctgcagaagtttgcagctcaggagttgattgaggtaaagcgaggtctcctacaagatgatgcacatcctactcttgtaacctatgctgaccattccaagctctctgccatgatgggtgctgtggcagaaaagaagggccctggggaggtagcagggactgtcacagggcagaagcggcgtgcagaacaggactcgactacagtagctgcctttgccagttcgttagtctctggtctgaactcttcagcatcggaaccagcaaaggagccagccaagaaatcaaggaaacatgctgcctcagatgttgatctggagatagagagccttctgaaccaacagtccactaaggaacaacagagcaagaaggtcagtcaggagatcctagagctattaaatactacaacagccaaggaacaatccattgttgaaaaatttcgctctcgaggtcgggcccaagtgcaagaattctgtgactatggaaccaaggaggagtgcatgaaagccagtgatgctgatcgaccctgtcgcaagctgcacttcagacgaattatcaataaacacactgatgagtctttaggtgactgctctttccttaatacatgtttccacatggatacctgcaagtatgttcactatgaaattgatgcttgcatggattctgaggcccctggcagcaaagaccacacgccaagccaggagcttgctcttacacagagtgtcggaggtgattccagtgcagaccgactcttcccacctcagtggatctgttgtgatatccgctacctggacgtcagtatcttgggcaagtttgcagttgtgatggctgacccaccctgggatattcacatggaactgccctatgggaccctgacagatgatgagatgcgcaggctcaacatacccgtactacaggatgatggctttctcttcctctgggtcacaggcagggccatggagttggggagagaatgtctaaatctctgggggtatgaacgggtagatgaaattatttgggtgaagacaaatcaactgcaacgcatcattcggacaggccgtacaggtcactggttgaaccatgggaaggaacactgcttggttggtgtcaaaggaaatccccaaggcttcaaccagggtctggattgtgatgtgatcgtagctgaggttcgttccaccagtcataaaccagatgaaatctatggcatgattgaaagactatctcctggcactcgcaagattgagttatttggacgaccacacaatgtgcaacccaactggatcacccttggaaaccaactggatgggatccacctactagacccagatgtggttgcacggttcaagcaaaggtacccagatggtatcatctctaaacctaagaatttatagaagcacttccttacagagctaagaatccatagccatggctctgtaagctaaacctgaagagtgatatttgtacaatagctttcttctttatttaaataaacatttgtattgtagttggga

SEQ ID NO: 17957 - DNA, 562 bp, Homo sapiens
  source 1..562: mol_type = unassigned DNA
ttttccggttagccttcggggtgtccgcgtgagaattggctatatcctggagcgagtgctgggagactaggatgtcggacacgtggagctctatccaggcccacaagaagcagctggactctctgcgggagaggctgcagcggaggcggaagcaggactcggggcacttggatctacggaatccagaggcagcattgtctccaaccttccgtagtgacagcccagtgcctactgcacccacctctggtggccctaagcccagcacagcttcagcagttcctgaattagctacagatcctgagttagagaagaagttgctacaccacctctctgatctggccttaacattgcccactgatgctgtgtccatctgtcttgccatctccacgccagatgctcctgccactcaagatggggtagaaagcctcctgcagaagtttgcagctcaggagttgattgaggtaaagcgaggtctcctacaagatgatgcacatcctactcttgtaacctatgctgaccattccaagctctctgccatgatgggtgctgtggcagaaaagaa

SEQ ID NO: 17958 - DNA, 925 bp, Homo sapiens
  source 1..925: mol_type = unassigned DNA
attttccggttagccttcggggtgtccgcgtgagaattggctatatcctggagcgagtgctgggaggtgctagtccgccgcgccttattcgagaggtgtcagggctgggagactaggatgtcggacacgtggagctctatccaggcccacaagaagcagctggactctctgcgggagaggctgcagcggaggcggaagcaggactcggggcacttggatctacggaatccagaggcagcattgtctccaaccttccgtagtgacagcccagtgcctactgcacccacctctggtggccctaagcccagcacagcttcagcagttcctgaattagctacagatcctgagttagagaagaagttgctacaccacctctctgatctggccttaacattgcccactgatgctgtgtccatctgtcttgccatctccacgccagatgctcctgccactcaagatggggtagaaagcctcctgcagaagtttgcagctcaggagttgattgagcatcggaaccagcaaaggagccagccaagaaatcaaggaaacatgctgcctcagatgttgatctggagatagagagccttctgaaccaacagtccactaaggaacaacagagcaagaaggtcagtcaggagatcctagagctattaaatactacaacagccaaggaacaatccattgttgaaaaatttcgctctcgaggtcgggcccaagtgcaagaattctgtgactatggaaccaaggaggagtgcatgaaagccagtgatgctgatcgaccctgtcgcaagctgcacttcagacgaattatcaataaacacactgatgagtctttaggtgactgctctttccttaatacatgtttccacatggatacctgcaagtatgttcactatgaaattgatgcttgcatggattctgaggc

SEQ ID NO: 17959 - DNA, 1952 bp, Homo sapiens
  source 1..1952: mol_type = unassigned DNA
tggggagctgctccggcttcggcgcggaggggcggcggccggggaggcggcggcggcggcaggattcccaggagccatgttgtcagaagtcctactggtgtctgctccggggaaagtcatccttcatggagaacatgccgtggtacatggcaaggtagcactggctgtatccttgaacttgagaacattcctccggcttcaaccccacagcaatgggaaagtggacctcagcttacccaacattggtatcaagcgggcctgggatgtggccaggcttcagtcactggacacaagctttctggagcaaggtgatgtcacaacacccacctcagagcaagtggagaagctaaaggaggttgcaggcttgcctgacgactgtgctgtcaccgagcgcctggctgtgctggcctttctttacttatacctgtccatctgccggaagcagagggccctgccgagcctggatatcgtagtgtggtcggagctgccccccggggcgggcttgggctccagcgccgcctactcggtgtgtctggcagcagccctcctgactgtgtgcgaggagatcccaaacccgctgaaggacggggattgcgtcaacaggtggaccaaggaggatttggagctaattaacaagtgggccttccaaggggagagaatgattcacgggaacccctccggagtggacaatgctgtcagcacctggggaggagccctccgataccatcaagggaagatttcatccttaaagaggtcgccagctctccagatcctgctgaccaacaccaaagtccctcgcaataccagggcccttgtggctggcgtcagaaacaggctgctcaagttcccagagatcgtggcccccctcctgacctcaatagatgccatctccctggagtgtgagcgcgtgctgggagagatgggggaagccccagccccggagcagtacctcgtgctggaagagctcattgacatgaaccagcaccatctgaatgccctcggcgtgggccacgcctctctggaccagctctgccaggtgaccagggcccgcggacttcacagcaagctgactggcgcaggcggtggtggctgtggcatcacactcctcaagccagggctggagcagccagaagtggaggccacgaagcaggccctgaccagctgtggctttgactgcttggaaaccagcatcggtgcccccggcgtctccatccactcagccacctccctggacagccgagtccagcaagccctggatggcctctgagaggagcccacgacactgcagccccacccagatgcccctttctggattattctgggggctgcagttcgactctgtgctggccagcgagcgcccagctcctgacactgctggagaggccccagccgcttggcgatgccagccaagctctgcagtcccagcggtgggacctagggaggcatggtctgccctctgcatcctctggagccagccgagcaggaggcctaggagggtcctctgagactccagacctgaggcgagaagggctgcttccctgaagctcccacagtcccatctgcttcaggcccccgccttggcctgtgttcttcctggccgcctgggtccaatgctcaggtgctggggcctggttcccggagaagtgtgccttctctctcccttttcagggaccgccccctgtctctcagggccaggcctctccctcctccaggaagccttcccctaccccttgtcgcccctccctcccagagcacctgctgtctgggtggctcactcagcacttggtgtggccttcccttctacctagcgggatggggctcccccaggggctgtcccggaggcggtgggcctggttaaataaggcagggtttatatgcactttcttccgatctgtacctgagaggtttgtggaaaagatggcaaatggggaataaaaagattttgtgtcaac

SEQ ID NO: 17960 - DNA, 1770 bp, Homo sapiens
  source 1..1770: mol_type = unassigned DNA
ggaggggcggcggccggggaggcggcggcggcggcaggattcccaggagccatgttgtcagaagtcctactggtgtctgctccggggaaagtcatccttcatggagaacatgccgtggtacatggcaaggtagcactggctgtatccttgaacttgagaacattcctccggcttcaaccccacagcaatgggaaagtggacctcagcttacccaacattggtatcaagcgggcctgggatgtggccaggcttcagtcactggacacaagctttctggagcaaggtgatgtcacaacacccacctcagagcaagtggagaagctaaaggaggttgcaggcttgcctgacgactgtgctgtcaccgagcgcctggctgtgctggcctttctttacttatacctgtccatctgccggaagcagaggtggaccaaggaggatttggagctaattaacaagtgggccttccaaggggagagaatgattcacgggaacccctccggagtggacaatgctgtcagcacctggggaggagccctccgataccatcaagggaagatttcatccttaaagaggtcgccagctctccagatcctgctgaccaacaccaaagtccctcgcaataccagggcccttgtggctggcgtcagaaacaggctgctcaagttcccagagatcgtggcccccctcctgacctcaatagatgccatctccctggagtgtgagcgcgtgctgggagagatgggggaagccccagccccggagcagtacctcgtgctggaagagctcattgacatgaaccagcaccatctgaatgccctcggcgtgggccacgcctctctggaccagctctgccaggtgaccagggcccgcggacttcacagcaagctgactggcgcaggcggtggtggctgtggcatcacactcctcaagccagggctggagcagccagaagtggaggccacgaagcaggccctgaccagctgtggctttgactgcttggaaaccagcatcggtgcccccggcgtctccatccactcagccacctccctggacagccgagtccagcaagccctggatggcctctgagaggagcccacgacactgcagccccacccagatgcccctttctggattattctgggggctgcagttcgactctgtgctggccagcgagcgcccagctcctgacactgctggagaggccccagccgcttggcgatgccagccaagctctgcagtcccagcggtgggacctagggaggcatggtctgccctctgcatcctctggagccagccgagcaggaggcctaggagggtcctctgagactccagacctgaggcgagaagggctgcttccctgaagctcccacagtcccatctgcttcaggcccccgccttggcctgtgttcttcctggccgcctgggtccaatgctcaggtgctggggcctggttcccggagaagtgtgccttctctctcccttttcagggaccgccccctgtctctcagggccaggcctctccctcctccaggaagccttcccctaccccttgtcgcccctccctcccagagcacctgctgtctgggtggctcactcagcacttggtgtggccttcccttctacctagcgggatggggctcccccaggggctgtcccggaggcggtgggcctggttaaataaggcagggtttatatgcactttcttccgatctgtacctgagaggtttgtggaaaagatggcaaatggggaataaaaagattttgtgtcaa

SEQ ID NO: 17961 - DNA, 834 bp, Homo sapiens
  source 1..834: mol_type = unassigned DNA
cgcggtgacctcacggcggtgtgacgtacccatggcgacgacaccacgattcacggcaggtgttcgagttgcccttcccgccagccactcacctgtccccgtcttccacgccctgagggccgcggctctggaaacggggatacaggagcctggcggcgccgaagcacccgcgcaggccaagacggctccccaggccaagacggctccccaggccgcacacagccatgagccaggctgcttgacgggacctgaccccgccaggttcccgtccagtccgcggggtgactccacccacagctggccgcgccaccgctcaggagccatgttgtcagaagtcctactggtgtctgctccggggaaagtcatccttcatggagaacatgccgtggtacatggcaaggtagcactggctgtatccttgaacttgagaacattcctccggcttcaaccccacagcaatgggaaagtggacctcagcttacccaacattggtatcaagcgggcctgggatgtggccaggcttcagtcactggacacaagctttctggagcaaggtgatgtcacaacacccacctcagagcaagtggagaagctaaaggaggttgcaggcttgcctgacgactgtgctgtcaccgagcgcctggctgtgctggcctttctttacttatacctgtccatctgccggaagcagagggccctgccgagcctggatatcgtagtgtggtcggagctgccccccggggcgggcttgggctccagcgccgcctactcggtgtgtctggcagcagccctcctgactgtgtgcgaggagatcccaaacccgctgaaggacgg

SEQ ID NO: 17962 - DNA, 1095 bp, Homo sapiens
  source 1..1095: mol_type = unassigned DNA
aggattcccaggagccatgttgtcagaagtcctactggtgtctgctccggggaaagtcatccttcatggagaacatgccgtggtacatggcaaggtagcactggctgtatccttgaacttgagaacattcctccggcttcaaccccacagcaatgggaaagtggacctcagcttacccaacattggtatcaagcgggcctgggatgtggccaggcttcagtcactggacacaagctttctggagcaaggtgatgtcacaacacccacctcagagcaagtggagaagctaaaggaggttgcaggcttgcctgacgactgtgctgtcaccgagcgcctggctgtgctggcctttctttacttatacctgtccatctgccggaagcagaggtggaccaaggaggatttggagctaattaacaagtgggccttccaaggggagagaatgattcacgggaacccctccggagtggacaatgctgtcagcacctggggaggagccctccgataccatcaagggaagatttcatccttaaagaggtcgccagctctccagatcctgctgaccaacaccaaagtccctcgcaataccagggcccttgtggctggcgtcagaaacaggctgctcaagttcccagagatcgtggcccccctcctgacctcaatagatgccatctccctggagtgtgagcgcgtgctgggagagatgggggaagccccagccccggagcagtacctcgtgctggaagagctcattgacatgaaccagcaccatctgaatgccctcggcgtgggccacgcctctctggaccagctctgccaggtgaccagggcccgcggacttcacagcaagctgactggcgcaggcggtggtggctgtggcatcacactcctcaagccagggctggagcagccagaagtggaggccacgaagcaggccctgaccagctgtggctttgactgcttggaaaccagcatcggtgcccccggcgtctccatccactcagccacctccctggacagccgagtccagcaagccctggatggcctctgagaggagcccacgacactgcagccccacccagatgcccctttctg

SEQ ID NO: 17963 - DNA, 1075 bp, Homo sapiens
  source 1..1075: mol_type = unassigned DNA
aggattcccaggagccatgttgtcagaagtcctactggtgtctgctccggggaaagtcatccttcatggagaacatgccgtggtacatggcaaggtagcactggctgtatccttgaacttgagaacattcctccggcttcaaccccacagcaatgggaaagtggacctcagcttacccaacattggtatcaagcgggcctgggatgtggccaggcttcagtcactggacacaagctttctgggtggaccaaggaggatttggagctaattaacaagtgggccttccaaggggagagaatgattcacgggaacccctccggagtggacaatgctgtcagcacctggggaggagccctccgataccatcaagggaagatttcatccttaaagaggtcgccagctctccagatcctgctgaccaacaccaaagtccctcgcaataccagggcccttgtggctggcgtcagaaacaggctgctcaagttcccagagatcgtggcccccctcctgacctcaatagatgccatctccctggagtgtgagcgcgtgctgggagagatgggggaagccccagccccggagcagtacctcgtgctggaagagctcattgacatgaaccagcaccatctgaatgccctcggcgtgggccacgcctctctggaccagctctgccaggtgaccagggcccgcggacttcacagcaagctgactggcgcaggcggtggtggctgtggcatcacactcctcaagccagggctggagcagccagaagtggaggccacgaagcaggccctgaccagctgtggctttgactgcttggaaaccagcatcggtgcccccggcgtctccatccactcagccacctccctggacagccgagtccagcaagccctggatggcctctgagaggagcccacgacactgcagccccacccagatgcccctttctggattattctgggggctgcagttcgactctgtgctggccagcgagcgcccagctcctgacactgctggagaggccccagccgcttggcgatgccagccaagctctgcagtcccagcggtgggacct

SEQ ID NO: 17964 - DNA, 886 bp, Homo sapiens
  source 1..886: mol_type = unassigned DNA
gattcacggcaggtgttcgagttgcccttcccgccagccactcacctgtccccgtcttccacgccctgagggccgcggctctggaaacggggatacaggagcctggcggcgccgaagcacccgcgcaggccaagacggctccccaggccaagacggctccccaggccgcacacagccatgagccaggctgcttgacgggacctgaccccgccaggttcccgtccagtccgcggggtgactccacccacagctggccgcgccaccgctcaggattcccaggagccatgttgtcagaagtcctactggtgtctgctccggggaaagtcatccttcatggagaacatgccgtggtacatggcaaggtagcactggctgtatccttgaacttgagaacattcctccggcttcaaccccacagcaatgggaaagtggacctcagcttacccaacattggtatcaagcgggcctgggatgtggccaggcttcagtcactggacacaagctttctggagcaaggtgatgtcacaacacccacctcagagcaagtggagaagctaaaggaggttgcaggcttgcctgacgactgtgctgtcaccgagcgcctggctgtgctggcctttctttacttatacctgtccatctgccggaagcagagggccctgccgagcctggatatcgtagtgtggtcggagctgccccccggggcgggcttgggctccagcgccgcctactcggtgtgtctggcagcagccctcctgactgtgtgcgaggagatcccaaacccgctgaaggacggggattgcgtcaacaggtggaccaaggaggatttggagctaattaacaagtgggccttccaaggggagagaatgattcacgggaacccctc

SEQ ID NO: 17965 - DNA, 1648 bp, Homo sapiens
  source 1..1648: mol_type = unassigned DNA
atgcctagtctagtggtatctggaataatggaaagaaatgggggctttggagaactaggatgtttcgggggaagcgctaaggaccgagggctgctggaagacgagcgcgcccttcagctggctctcgatcaactctgcctcctgggtttgggggagccccccgcccccacggcgggcgaggacgggggaggtggggggggcggcgcccccgcgcagccggccgcccccccgcagccggccccgccgccgccgcccgcggcgcccccggccgccccgacggcggcccccgcagcgcagacgccccagccccccaccgcccccaaaggggcgagcgacgccaagctctgcgctctctacaaagaggccgagctgcgcctgaagggcagcagcaacaccacggagtgtgttcccgtgcccacctccgagcacgtggccgagatcgtgggcaggcaaggctgcaagattaaggccttgagggccaagaccaacacctacatcaagacaccggtgaggggcgaggaaccagtgttcatggtgacagggcgacgggaggacgtggccacagcccggcgggaaatcatctcagcagcggagcacttctccatgatccgtgcctcccgcaacaagtcaggcgccgcctttggtgtggctcctgctctgcccggccaggtgaccatccgtgtgcgggtgccctaccgcgtggtggggctggtggtgggccccaaaggggcaaccatcaagcgcatccagcagcaaaccaacacatacattatcacaccaagccgtgaccgcgaccccgtgttcgagatcacgggtgccccaggcaacgtggagcgtgcgcgcgaggagatcgagacgcacatcgcggtgcgcactggcaagatcctcgagtacaacaatgaaaacgacttcctggcggggagccccgacgcagcaatcgatagccgctactccgacgcctggcgggtgcaccagcccggctgcaagcccctctccaccttccggcagaacagcctgggctgcatcggcgagtgcggagtggactctggctttgaggccccacgcctgggtgagcagggcggggactttggctacggcgggtacctctttccgggctatggcgtgggcaagcaggatgtgtactacggcgtggccgagactagccccccgctgtgggcgggccaggagaacgccacgcccacctccgtgctcttctcctctgcctcctcctcctcctcctcttccgccaaggcccgcgctgggcccccgggcgcacaccgctcccctgccacttccgcgggacccgagctggccggactcccgaggcgccccccgggagagccgctccagggcttctctaaacttggtgggggcggcctgcggagccccggcggcgggcgggattgcatggtctgctttgagagcgaagtgactgccgcccttgtgccctgcggacacaacctgttctgcatggagtgtgcagtacgcatctgcgagaggacggacccagagtgtcccgtctgccacatcacagccacgcaagccatccgaatattctcctaagccccgtgccccatgcctccggggcccactccactgggcccaccctggacctgttttccactaaagccttttggaaagcggtgat

SEQ ID NO: 17966 - DNA, 3528 bp, Homo sapiens
  source 1..3528: mol_type = unassigned DNA
tcaagaggcggggaggagaggaggaaaaagcgctgagtgagggcgggcgggcgggcgggagggagggagtggaggagccggggaggggctccttaaagaaacgcttctgtcgctcgcctgctcgcttttcgctcggcattgcggccagccagccgggcactcggggggcacgcgcggccaccgctagagctctgcccccaccccacccgccagcaggtctggggtggggacccaggtgggggctcctgcagccactgcccggtgcggaccgcacggagcgacccactcctcccagcaccgaggaagaagcaacggagccctcagcaggcgaccggcctccccgcccctgaccacccgcttcccggctgcctttgtggccgcagcttctcgccgccgagccgagggccggcgggggcgcggcgcgcacggccgagcgatgcccagctcgctgttcgcagacctggagcgcaacggcagcggcggcggcggcggcggcagcagcggagggggagagaccctggatgaccaaagagccctgcagctcgcgctcgaccagctctccctgctggggctggacagtgacgagggcgcctctctgtacgacagcgagccgcgcaagaagagcgtgaacatgaccgagtgcgtgccagtacccagttctgagcatgtcgccgagatcgtggggcggcaaggttgtaaaatcaaagcgctgcgggcgaagaccaatacttacatcaagaccccagttcgcggggaggagcctgtctttgttgtgacgggcaggaaggaggatgtggccatggctcggagggagatcatctctgctgccgagcacttctccatgatccgcgcctcccggaataagaacacggcactcaacggcgcggtgcctgggccgcccaacctgcccgggcagaccaccatccaagtgcgggtaccctaccgcgtggtggggctcgtggtggggcccaaaggcgccacaatcaagcgcatccagcagcagacgcacacgtacatcgtgacgcccagccgggataaggagccggtgttcgaggtgaccggcatgccagagaacgtggatcgcgctcgagaggagattgaggcgcacattgctctgcgtaccggcggcatcattgagctcacagacgagaacgacttccacgccaacggcaccgatgtgggcttcgatctgcatcatgggtccggcgggtccggcccaggcagcctctggagcaagcccacccccagcatcacgcccacccccggccgcaagcctttctctagctaccgcaacgacagctccagctcgcttggcagtgcttccacagactcttatttcggcggcgggaccagcagcagcgcagcggctacccagcgcctggcggactacagcccccctagccccgccctgagctttgcgcacaacggaaacaataacaataacggcaatgggtacacctacacagcggggggagaagcctcagtgccatcccccgacggctgccccgagctgcagcccacttttgacccggctcccgctcccccacctggggcaccacttatctgggcccagttcgagcggtccccgggaggcggacctgcagctccggtatcttcttcctgctcttcttctgcatcttcgtctgcttcttcctcctccgtggtcttccccgggggtggcgccagtgcgccctccaacgccaacctggggctattggtgcaccgccggctgcaccctggcaccagctgcccgcgcctgtctccacccttgcacatggccccgggggcgggagagcaccacctggctcgccgggtgcgcagcgacccgggtggaggaggcctggcctacgccgcttatgccaacgggctgggggcacagctgcctggcttgcagccgtcggacacgtcgggctcctcctcttcgtccagctcctcctccagctcttcatcctcttcctccgggcttcggcgtaaaggcagccgcgactgctccgtgtgcttcgagagcgaagtgattgccgcgctggtgccctgtggccacaacctcttctgcatggagtgcgccaatcgcatctgtgagaagagcgagcccgagtgcccggtctgccacaccgcggtcactcaggccatccgcatcttttcttaaaggcagcgggcgctgctagtgcgcaccgtgctgggggaagggggaacccctccccaccctctttccccagcgctcgcctgcctccctgggtgccccccctctcccttctccttcccggccccaccaacactctgagatccgagaggagcttggaaagctgtagtatccgctcatttttaaaatttaatttttaagtaaaggaatttgccaggatatctgcatcaagagtactgtagcctgggaaacctgaacacctgaaatgcatgctctataaataataggaacggcgacattctagtaatgatagtttttacactgtacttaataggaagcttccaaaagaagaaaaccccacaagttttccattttcttaaagtaggaaaaaatgaacagtaataattatgatgaagatgatagtagtgctatgggatgtgtggactgtttagtgtgttcccctttgtgggtgggttcctatgatacttattatagaacacagtggatcctttttgaatgttcgtggaagggccaggagttcctgtgaaaccaggatactgcagctttattaaagttaaagaaactgtaacatatctcttatatattaaaaacgtttaaaagttttaaagagaaattgcattaatacagattgaagtattttattcttttttgacttgaaaaattatatttcatattgcaaagatgtttacaagtattttaatttaagttcagtgaacttttttgtagctgggttaaatctttttattttagtatggccttatggcaaagaacactgtattattttaataatcacacaattgtgacggaattacaaccataaaatgtgtaatgttttgaacagtattctgttgggatggagattttataggttcagacaaatcttctagatctgcttcacccagcatattttctattcagtgatataaagcatattttattctatattattacaaaaacggaaatgtataaacatgtcaaaaagaactgttgatgctttctaacatttgtataaatagaattcagtgcaagttacaaaaattctgttgcaccactctagttttagtatttctattttaatacatttgtttaccacttgtttatgtatatgtaggtgatgttacttgagcttaaatgtactttactgagcaaagtttaaaaaacaaagtatattttattttatgataaagggcctttaacctcatggtcaaatactaatattatatttgctgagacaagatttgaaattgtatcaagagttttatttttctgacatttaaagttctacataataaaggtaaaacttaagtaatggtgctacttcattttttaagtatttctatataaataaaatattgaagaaaatctta

SEQ ID NO: 17967 - DNA, 3781 bp, Homo sapiens
  source 1..3781: mol_type = unassigned DNA
atgcccagcggcagctccgcggccctggccctggcggcggccccggcccccctgccgcagccgcccccgccgccgccgccgccaccgccgcctctgccgccgccctcgggcggcccggagctcgagggggacgggctcctgctgagggagcgcttggccgcgctaggcctcgacgaccccagcccggcggagcccggcgccccggcgcttcgggccccggcagcggcggcgcagggccaggcccggcgggcggcggagctgtctccagaggagcgggctccgcccggccggcccggggccccggaggcggccgagctggagctggaagaggacgaggaggagggggaggaagcggagctggacggagacctgctggaggaggaggagctggaggaagcagaggaggaggaccggtcgtcgctgctgctgctgtcgccgcccgcggccaccgcctctcagacccagcagatcccgggcgggtccctggggtctgtgctgctgccagccgccaggttcgatgcccgggaggcggcggccgcggcggcggcggcgggggtgctgtacggaggggacgatgcccagggcatgatggcggcgatgctgtcccacgcctacggccccggcggttgtggggcggcggcggccgccctgaacggggagcaggcggccctgctccggagaaagagcgtcaacaccaccgagtgcgtcccggtgcccagctccgagcacgtcgccgagatcgtcggccgccagggttgtaaaattaaagcactgagagccaagacaaacacgtatatcaagactcctgttcgtggtgaagagcccatttttgttgtcactggaaggaaagaagatgttgccatggccaaaagagagatcctctcagctgcagagcacttctccatgattcgtgcatctcgaaacaaaaatgggcctgccctgggaggattatcatgtagtcctaatctgcccggtcaaaccaccgtccaagtcagggtcccttatcgtgtggtaggattagtggttggacccaaaggagcaactattaaaagaattcagcagcagacccacacctacatagtaactccgagcagagataaggaacctgtctttgaagtgacagggatgcctgaaaatgttgaccgagcacgggaagaaatagaaatgcatattgccatgcgtacaggaaactatatagagctcaatgaagagaatgatttccattacaatggtaccgatgtaagctttgaaggtggcactcttggctctgcgtggctctcctccaatcctgttcctcctagccgcgcaagaatgatatccaattatcgaaatgatagttccagttctctaggaagtggctctacagattcctactttggaagcaataggctggctgactttagtccaacaagcccatttagcacaggaaacttctggtttggagatacactaccatctgtaggctcagaagacctagcagttgactctcctgcctttgactctttaccaacatctgctcaaactatctggactccatttgaaccagttaacccactctctggctttgggagtgatccttctggtaacatgaagactcagcgcagaggaagtcagccatctactcctcgtctgtctcctacatttcctgagagcatagaacatccacttgctcggagggttaggagcgacccacctagtacaggcaaccatgttggccttccaatatatatccctgctttttctaatggtaccaatagttactcctcttccaatggtggttccacctctagctcacctccagaatcaagacgaaagcacgactgtgtgatttgctttgagaatgaggttattgctgccctagttccatgtggccacaacctcttctgcatggaatgtgccaacaagatctgtgaaaagagaacgccatcatgtccagtttgccagacagctgttactcaggcaatccaaattcactcttaactatatatatatacataaatactatatctctatatggactcgtaaaggcatgggtataatggtaccccccagtaaacttcctaatgatttcttatgactgttatcaggctttattgggattaggctaaagttgttagtaaacttataaaaggctgctatggtaacactaaacctaagtggtctcttgtctattagtttggtttgaattattagtactatcctgtagacccagagacatagtttatataagaattgctaaagctgaagttcaacttggctgagtgaagataatcataggttgtgtgagcctatgaaaaagtgtatacgtctaagatttcaaaacaatgggtcccaaagcctaaccactttaagagtttatggagggtacttggcattacagacgattcatacacttccagtgctgccttctttacactgccagttttgacaaaacaggtttgttttttattttacaacaacatatgcctaattctgcaggattgcaagtaactttttaatgcattgtgattacttattggtaatgatagggctgatggcagtttactagatcactggttataatttgggacaaaaactgctacatcaactttcatctcgcccagagtgctcaaggctggtatgatcagtggatcaggaatgcaattgtgaattcctgcccattgcctctcttggtgaatgtggaaatggccacctgggttttcccatatcaggaagggctttgggatggcacctatattggctgataattgaggatgcaaacattccattcattagtgtgatcgagctgttaatttttagactatagatcaaaatgtgaaacattttatgttcaatccatatttgtcttgcacattataaatatatttttattttttagtaatttaggggagggaggagggagaaagggataatgatgcccttggcataattcacaaaagcagctgtgacaacctccaatcagtttacttcatttcaaaactatttccaatcacaaggaaagatttatttaaaatatactcgtacatttcacctgtggatgtctataacttcatcctcagtatgttcccaaatctgtgctggcattgaaaggacaaaacattatactagtgggtttttctactaattattttttgaagcattattttcccaacacaaaagagcttttttctcggtataatgaaaattgaaatcctatgtgtattcaatagtaaatagacaaattttattttttatttccacttgaagagttacatttcgtataaaagtttacaaataacggtttttattttgattttttcagtataaaaaaagttgccttgatggcatattatgatgtaatgctaattgcttgtaggatagtaaatggtcagtattgaaacctaatctctagctgccgtcttgtagatatgaacgaatgttcaccaagcatgtattttgtattttgttgcattgtacactgcaactaataagccaaggaatcgacatatattaggtgcgtgtactgtttctaaaaaccacaaactaagaatgataaattatcaatatagtttagtatttgctaattttactacactcttttgttatgtatatgtagggaagtcatagggattataaattcaatttgagtaaaatttaaaaccatatattttatgataaagggcctttaacttaagatggccaaagcactgatattatatatttgctgtaaagagaattataagagttttatttttctgatattaaaagttacttaataaagacttgtttccattaacttgaa

SEQ ID NO: 17968 - DNA, 2332 bp, Homo sapiens
  source 1..2332: mol_type = unassigned DNA
tggcgctggaccagctgtcggcgctcgggctggggggcgctggcgacacggacgaggagggggcggccggggacgccgccgccgccccggccgtcgccccccgacgtgttcgcgggcttcgcgccccaccccgcggccctggggcccccgacgctgctggccgaccagatgagcgtgatcggcagccgcaagaaaagcgtcaacatgaccgagtgcgtcccggtgcccagctccgagcacgtcgccgagatcgtgggtcgccagggctgcaagatcaaggccctgcgggccaagacaaacacctacatcaagaccccagtgcggggcgaggagccggtcttcatcgtgaccggccggaaggaggacgtggagatggccaagcgtgagatcctgtcggcggccgaacacttctccatcatccgcgccacgcgcagcaaggccgggggtctgcccggcgccgcccagggcccgcccaaccttcccggacagaccaccatccaggtgcgcgtgccctaccgggtggtggggctggtggtggggcccaagggcgccaccatcaagcgcatccagcagcggacgcacacctacatcgtgacgcccgggcgcgacaaggagccggtgttcgcggtcactgggatgcccgagaacgtggaccgcgcgcgcgaggagatcgaggcgcacatcacgctgcgcactggcgccttcaccgacgcgggccccgacagcgacttccacgccaacggcaccgacgtctgcctggacctgctcggggcggccgccagcctctgggccaagacccccaaccagggacgacggccccccacggccacggccggcctccgcggggacacggccctgggcgcccccagcgcccccgaggccttctacgcgggcagccgcggcggcccctccgtgccggacccaggccccgccagcccctacagcggctccggcaacgggggcttcgccttcggcgcggagggtcccggtgccccggtggggacggccgcccccgacgactgcgacttcggcttcgacttcgacttcctggcgctggacctgaccgtgcccgccgcggccaccatctgggcgccttttgagcgcgccgcccccttgcccgccttcagcggctgctccacggtcaacggagccccgggacctcccgccgccggcgcccggcgcagcagtggggccgggaccccccgccactcgcccacgctgcccgagcccggcggcctccgcctggagctcccgctgtctcgccgtggcgccccggacccggtgggcgcgctgtcctggcgacccccgcagggccccgtatccttcccaggcggcgccgccttctccacggccacctcgctgcccagcagccccgcggccgccgcctgcgcccccctggactccggcgcctccgagaacagccgcaagcccccttcggcgtcctcggccccggccctggcgcgagagtgcgtggtgtgcgccgagggcgaggtgatggctgcgctggtcccctgcggccacaacctcttctgcatggactgcgccgtccgcatctgcggcaagagcgagcccgagtgtcccgcctgccgcacgccggccacccaggccattcgcgtggagacggagaccccgcagcccggcggcgcctcagcccttcaacgacagtattgagtggtcaggttacaataaaccggagagaaaaggtccgcttgcactttttttagttttcttatttttagacacccctcccctccagggtgatctttaaaaaagcaaaacaaaaaacacgacttttccagcgctcagcgttttttcctttcgtccgaagccgttttctgatttgacttttctcgccggccggtctcaggccgcacagacgttccagaggaggagggtgacatttttactccctttttggggctaaccatttatgcttttgtacatcaaccgtgcgcggccggagggggcaggggggcgggggcgaggggcgttccaatcaaatttctaactttctgttaattattaatcccctttttactgcggtttctgttgtcatttttaaaatttttttaatttttttttttttttacttttactttttacctcttgtgtatatgtagggaatttatagggaaatatgtactttatggaataaattttaagaactaaaatatattttattttaaataaagtaatggacctttaatcttacacagctaaattactgattatatatttgctgagctgatttaagggttaaaaaaattgtatcaagagttttattttttgacttcaaagccttcttaataaagcctcttttctacatgtgagc

SEQ ID NO: 17969 - DNA, 2660 bp, Homo sapiens
  source 1..2660: mol_type = unassigned DNA
atgcccagctcgctcggccagcccgacggcggcgggggcgggggcggcggcggcggcggcgtgggggcggcgggggaggaccccggacccggacctgcgcccccgcccgagggcgcccaggaggccgcgcccgcgccccggccgccgcccgaacccgacgacgcggccgccgcgctccgcctggcgctggaccagctgtcggcgctcgggctggggggcgctggcgacacggacgaggagggggcggccggggacggcgcagcggcggcggggggcgcggacggcggggcggctccggagcctgtgccccccgacggacctgaggccggcgcgcccccgaccctggcccccgccgtggcccccgggtcgctgccgctgctggaccccaacgcgagtcccccgccgccgccgccgccccggccgtcgccccccgacgtgttcgcgggcttcgcgccccaccccgcggccctggggcccccgacgctgctggccgaccagatgagcgtgatcggcagccgcaagaaaagcgtcaacatgaccgagtgcgtcccggtgcccagctccgagcacgtcgccgagatcgtgggtcgccagggctgcaagatcaaggccctgcgggccaagacaaacacctacatcaagaccccagtgcggggcgaggagccggtcttcatcgtgaccggccggaaggaggacgtggagatggccaagcgtgagatcctgtcggcggccgaacacttctccatcatccgcgccacgcgcagcaaggccgggggtctgcccggcgccgcccagggcccgcccaaccttcccggacagaccaccatccaggtgcgcgtgccctaccgggtggtggggctggtggtggggcccaagggcgccaccatcaagcgcatccagcagcggacgcacacctacatcgtgacgcccgggcgcgacaaggagccggtgttcgcggtcactgggatgcccgagaacgtggaccgcgcgcgcgaggagatcgaggcgcacatcacgctgcgcactggcgccttcaccgacgcgggccccgacagcgacttccacgccaacggcaccgacgtctgcctggacctgctcggggcggccgccagcctctgggccaagacccccaaccagggacgacggccccccacggccacggccggcctccgcggggacacggccctgggcgcccccagcgcccccgaggccttctacgcgggcagccgcggcggcccctccgtgccggacccaggccccgccagcccctacagcggctccggcaacgggggcttcgccttcggcgcggagggtcccggtgccccggtggggacggccgcccccgacgactgcgacttcggcttcgacttcgacttcctggcgctggacctgaccgtgcccgccgcggccaccatctgggcgccttttgagcgcgccgcccccttgcccgccttcagcggctgctccacggtcaacggagccccgggacctcccgccgccggcgcccggcgcagcagtggggccgggaccccccgccactcgcccacgctgcccgagcccggcggcctccgcctggagctcccgctgtctcgccgtggcgccccggacccggtgggcgcgctgtcctggcgacccccgcagggccccgtatccttcccaggcggcgccgccttctccacggccacctcgctgcccagcagccccgcggccgccgcctgcgcccccctggactccggcgcctccgagaacagccgcaagcccccttcggcgtcctcggccccggccctggcgcgagagtgcgtggtgtgcgccgagggcgaggtgatggctgcgctggtcccctgcggccacaacctcttctgcatggactgcgccgtccgcatctgcggcaagagcgagcccgagtgtcccgcctgccgcacgccggccacccaggccattcgcgtggagacggagaccccgcagcccggcggcgcctcagcccttcaacgacagtattgagtggtcaggttacaataaaccggagagaaaaggtccgcttgcactttttttagttttcttatttttagacacccctcccctccagggtgatctttaaaaaagcaaaacaaaaaacacgacttttccagcgctcagcgttttttcctttcgtccgaagccgttttctgatttgacttttctcgccggccggtctcaggccgcacagacgttccagaggaggagggtgacatttttactccctttttggggctaaccatttatgcttttgtacatcaaccgtgcgcggccggagggggcaggggggcgggggcgaggggcgttccaatcaaatttctaactttctgttaattattaatcccctttttactgcggtttctgttgtcatttttaaaatttttttaatttttttttttttttacttttactttttacctcttgtgtatatgtagggaatttatagggaaatatgtactttatggaataaattttaagaactaaaatatattttattttaaataaagtaatggacctttaatcttacacagctaaattactgattatatatttgctgagctgatttaagggttaaaaaaattgtatcaagagttttattttttgacttcaaagccttcttaataaagcctcttttctacatgtga

SEQ ID NO: 17970 - DNA, 2847 bp, Homo sapiens
  source 1..2847: mol_type = unassigned DNA
atgcccagctcgctcggccagcccgacggcggcgggggcgggggcggcggcggcggcggcgtgggggcggcgggggaggaccccggacccggacctgcgcccccgcccgagggcgcccaggaggccgcgcccgcgccccggccgccgcccgaacccgacgacgcggccgccgcgctccgcctggcgctggaccagctgtcggcgctcgggctggggggcgctggcgacacggacgaggagggggcggccggggacggcgcagcggcggcggggggcgcggacggcggggcggctccggagcctgtgccccccgacggacctgaggccggcgcgcccccgaccctggcccccgccgtggcccccgggtcgctgccgctgctggaccccaacgcgagtcccccgccgccgccgccgccccggccgtcgccccccgacgtgttcgcgggcttcgcgccccaccccgcggccctggggcccccgacgctgctggccgaccagatgagcgtgatcggcagccgcaagaaaagcgtcaacatgaccgagtgcgtcccggtgcccagctccgagcacgtcgccgagatcgtgggtcgccagggctgcaagatcaaggccctgcgggccaagacaaacacctacatcaagaccccagtgcggggcgaggagccggtcttcatcgtgaccggccggaaggaggacgtggagatggccaagcgtgagatcctgtcggcggccgaacacttctccatcatccgcgccacgcgcagcaaggccgggggtctgcccggcgccgcccagggcccgcccaaccttcccggacagaccaccatccaggtgcgcgtgccctaccgggtggtggggctggtggtggggcccaagggcgccaccatcaagcgcatccagcagcggacgcacacctacatcgtgacgcccgggcgcgacaaggagccggtgttcgcggtcactgggatgcccgagaacgtggaccgcgcgcgcgaggagatcgaggcgcacatcacgctgcgcactggcgccttcaccgacgcgggccccgacagcgacttccacgccaacggcaccgacgtctgcctggacctgctcggggcggccgccagcctctgggccaagacccccaaccagggacgacggccccccacggccacggccggcctccgcggggacacggccctgggcgcccccagcgcccccgaggccttctacgcgggcagccgcggcggcccctccgtgccggacccaggccccgccagcccctacagcggctccggcaacgggggcttcgccttcggcgcggagggtcccggtgccccggtggggacggccgcccccgacgactgcgacttcggcttcgacttcgacttcctggcgctggacctgaccgtgcccgccgcggccaccatctgggcgccttttgagcgcgccgcccccttgcccgccttcagcggctgctccacggtcaacggagccccgggacctcccgccgccggcgcccggcgcagcagtggggccgggaccccccgccactcgcccacgctgcccgagcccggcggcctccgcctggagctcccgctgtctcgccgtggcgccccggacccggtgggcgcgctgtcctggcgacccccgcagggccccgtatccttcccaggcggcgccgccttctccacggccacctcgctgcccagcagccccgcggccgccgcctgcgcccccctggactccggcgcctccgagaacagccgcaagcccccttcggcgtcctcggccccggccctggcgcgagagtgcgtggtgtgcgccgagggcgaggtgatggctgcgctggtcccctgcggccacaacctcttctgcatggactgcgccgtccgcatctgcggcaagagcgagcccgagtgtcccgcctgccgcacgccggccacccaggccattcatatcttttcctagagcgcggaccaccacgtggccggggccatctgcgggggccaggggtgggcgcgggagacggggcgggacccggggtgggagagggacggggagggggcgaggggcggaggccgagggggcaggggggtgggcggcggccagtgtttacagatgagctttaactgccgcctcaggcgtggagacggagaccccgcagcccggcggcgcctcagcccttcaacgacagtattgagtggtcaggttacaataaaccggagagaaaaggtccgcttgcactttttttagttttcttatttttagacacccctcccctccagggtgatctttaaaaaagcaaaacaaaaaacacgacttttccagcgctcagcgttttttcctttcgtccgaagccgttttctgatttgacttttctcgccggccggtctcaggccgcacagacgttccagaggaggagggtgacatttttactccctttttggggctaaccatttatgcttttgtacatcaaccgtgcgcggccggagggggcaggggggcgggggcgaggggcgttccaatcaaatttctaactttctgttaattattaatcccctttttactgcggtttctgttgtcatttttaaaatttttttaatttttttttttttttacttttactttttacctcttgtgtatatgtagggaatttatagggaaatatgtactttatggaataaattttaagaactaaaatatattttattttaaataaagtaatggacctttaatcttacacagctaaattactgattatatatttgctgagctgatttaagggttaaaaaaattgtatcaagagttttattttttgacttcaaagccttcttaataaagcctcttttctacatgtga

SEQ ID NO: 17971 - DNA, 2088 bp, Homo sapiens
  source 1..2088: mol_type = unassigned DNA
gcaggccggacagcgggagcaggtggaggactggcggcggtcgagatcgtgctgccatggctcagcctctgggtccagagcctcagctcctacctcttccctccttgccagcccctgatgcctgccagacttttgcctctgctggagcccctgcctgaccagcttcccctccctgtctggttgggatttgggggctgagctgtctggggtcccagggccaaccaatgcagtgccggctcccgcggggcctggctggagccctcctcaccctcctgtgcatggggctcctgtgtctgcggtaccacttgaacctgtccccgcagcgggtacaagggacccccgagctgagccagccgaacccggggccccctaagctacagctacacgatgtcttcattgcagtgaagacgacccgggctttccaccgcttgcgcctggagctgctgcttgacacgtgggtttccaggaccagggaacagacatttgtcttcaccgacagcccagacaaaggcctccaggagagactggggtcccaccttgtggtcaccaactgctccgcggaacacagccacccagctctgtcctgcaagatggctgctgagttcgacaccttcttggccagtgggcttaggtggttctgccatgtggacgatgacaactatgtgaacccaagggcgctgctgcagcttctgagagccttcccgctggcccgcgacgtctatgtgggaaggcccagcctgaaccggcccatccatgcctcagagccacagccccacaaccgcacgaggctggtacagttctggtttgccactgggggtgctggcttctgcatcaatcgcaaactggctttgaagatggctccgtgggccagtggctcccgtttcatggacacatctgctctcatccggctgcctgatgactgcaccatgggctatatcattgagtgcaagctgggcggccgcctgcagcccagccccctctttcactcccacctggagaccctgcagctgctgaggactgcacagctcccagaacaggtcaccctcagctacggtgtctttgaggggaaactcaacgtcattaagctacagggccccttctccccggaggaggacccctccagatttcgctccctccattgtctgctctatccagatacaccctggtgtccccagctgggtgcccgatgaatcctgaactgctgggcaaaggttgggcagagacttctgggtgtgccttggctcccaaggtggcactgtgggtccctggcaagtgtcttgtgataggcagtccctggcagggccttcgggtggttggcaagcccaggatctgagtggcaattggcactgaaggcaccccaggcccctgggaggtgagttagacagcccaggggaccaggtggaccaggtggtggccagagaggctccaggggctagactccctcaggaggctgaattgaaaaagggcagggggcacttgagctgggctggggctcaggggtcctaaccctttaggcagtgacatggcctctgggtggggtctggccgttggccctggctaatgtctctcagtcattcccctggggctcaagcgctgggccgcccactcctgcctccctcatctgtgtcccgagttcctgaagggacatgggtggaatgatggcagaatccagggtctgcagcacctgctgttgttgccaaccagtctcccaaagctccttgctccccaccccttgcgaacaggaccagattttgtttggagcctcagcatgccggggcccagatgatggagcataacgggtcccagccaattgtgatgatcctttttgctcatttcccagcctttcttgctgttaggggctaccatgggaccagctctggccagagggaactaagcaaatccaatagagatgtttctggggaaggttttgcagcccactccccatcttcctgctataaatgtgggtgtgatggctggatctggggcagccaccttgctaccatgaaggaaaggccaagacaatcatccacagctattccctccagcatctggttctgtacaaaaattaaatgcttatttgtttaagtc

SEQ ID NO: 17972 - DNA, 2034 bp, Homo sapiens
  source 1..2034: mol_type = unassigned DNA
gggagcaggtggaggactggcggcggtcgagatcgtgctgccatggctcagcctctgggtccagagcctcagctcctacctcttccctccttgccagcccctgatgcctgccagacttttgcctctgctggagcccctgcctgaccagcttcccctccctgtctggttgggatttgggggctgagctgtctggggtcccagggccaaccaatgcagtgccggctcccgcggggcctggctggagccctcctcaccctcctgtgcatggggctcctgtgtctgcggtaccacttgaacctgtccccgcagcgggtacaagggacccccgagctgagccagccgaacccggggccccctaagctacagctacacgatgtcttcattgcagtgaagacgacccgggctttccaccgcttgcgcctggagctgctgcttgacacgtgggtttccaggaccagggaacaggtgacaaggtcccaccttgtggtcaccaactgctccgcggaacacagccacccagctctgtcctgcaagatggctgctgagttcgacaccttcttggccagtgggcttaggtggttctgccatgtggacgatgacaactatgtgaacccaagggcgctgctgcagcttctgagagccttcccgctggcccgcgacgtctatgtgggaaggcccagcctgaaccggcccatccatgcctcagagccacagccccacaaccgcacgaggctggtacagttctggtttgccactgggggtgctggcttctgcatcaatcgcaaactggctttgaagatggctccgtgggccagtggctcccgtttcatggacacatctgctctcatccggctgcctgatgactgcaccatgggctatatcattgagtgcaagctgggcggccgcctgcagcccagccccctctttcactcccacctggagaccctgcagctgctgaggactgcacagctcccagaacaggtcaccctcagctacggtgtctttgaggggaaactcaacgtcattaagctacagggccccttctccccggaggaggacccctccagatttcgctccctccattgtctgctctatccagatacaccctggtgtccccagctgggtgcccgatgaatcctgaactgctgggcaaaggttgggcagagacttctgggtgtgccttggctcccaaggtggcactgtgggtccctggcaagtgtcttgtgataggcagtccctggcagggccttcgggtggttggcaagcccaggatctgagtggcaattggcactgaaggcaccccaggcccctgggaggtgagttagacagcccaggggaccaggtggaccaggtggtggccagagaggctccaggggctagactccctcaggaggctgaattgaaaaagggcagggggcacttgagctgggctggggctcaggggtcctaaccctttaggcagtgacatggcctctgggtggggtctggccgttggccctggctaatgtctctcagtcattcccctggggctcaagcgctgggccgcccactcctgcctccctcatctgtgtcccgagttcctgaagggacatgggtggaatgatggcagaatccagggtctgcagcacctgctgttgttgccaaccagtctcccaaagctccttgctccccaccccttgcgaacaggaccagattttgtttggagcctcagcatgccggggcccagatgatggagcataacgggtcccagccaattgtgatgatcctttttgctcatttcccagcctttcttgctgttaggggctaccatgggaccagctctggccagagggaactaagcaaatccaatagagatgtttctggggaaggttttgcagcccactccccatcttcctgctataaatgtgggtgtgatggctggatctggggcagccaccttgctaccatgaaggaaaggccaagacaatcatccacagctattccctccagcatctggttctgtacaaaaattaaatgcttatttgtttaagtctc

SEQ ID NO: 17973 - DNA, 570 bp, Homo sapiens
  source 1..570: mol_type = unassigned DNA
gacagcgggagcaggtggaggactggcggcggtcgagatcgtgctgccatggctcagcctctgggtccagagcctcagctcctacctcttccctccttgccagcccctgatgcctgccagacttttgcctctgctggagcccctgcctgaccagcttcccctccctgtctggttgggatttgggggctgagctgtctggggtcccagggccaaccaatgcagtgccggctcccgcggggcctggctggagccctcctcaccctcctgtgcatggggctcctgtgtctgcggtaccacttgaacctgtccccgcagcgggtacaagggacccccgagctgagccagccgaacccggggccccctaagctacagctacacgatgtcttcattgcagtgaagacgacccgggctttccaccgcttgcgcctggagctgctgcttgacacgtgggtttccaggaccagggaacagacatttgtcttcaccgacagcccagacaaaggcctccaggagagactggggtcccctgactcctcctcacttctccagggtcccaccttgtggtcacca

SEQ ID NO: 17974 - DNA, 644 bp, Homo sapiens
  source 1..644: mol_type = unassigned DNA
gaacagatgacaacgcctgcctcgtgaggtttgagggtcgttgcgggcaagtgcatgtccaatctgggagagccggactgggttgtgaggcagcatttccgagatggcttgcacagggggtttgtgtggctgtgaagacatttgtcttcaccgacagcccagacaaaggcctccaggagagactggggtcccaccttgtggtcaccaactgctccgcggaacacagccacccagctctgtcctgcaagatggctgctgagttcgacaccttcttggccagtgggcttaggtggttctgccatgtggacgatgacaactatgtgaacccaagggcgctgctgcagcttctgagagccttcccgctggcccgcgacgtctatgtgggaaggcccagcctgaaccggcccatccatgcctcagagccacagccccacaaccgcacgaggctggtacagttctggtttgccactgggggtgctggcttctgcatcaatcgcaaactggctttgaagatggctccgtgggccagtggctcccgtttcatggacacatctgctctcatccggctgcctgatgactgcaccatgggctatatcattgagtgcaagctgggcggccgcctgcagcccagccccctctttcac

SEQ ID NO: 17975 - DNA, 524 bp, Homo sapiens
  source 1..524: mol_type = unassigned DNA
tttcctgtcttatctccatcaccgcggtggtgcccttgccccggatgaggaaactgaggccagagagaggaagtgctggctggcgtggtgtcacgcagaaggcctgaggggacagagcccagtgggacctagaaccttgctcctggttgggtgcttttctcccctgctgagacttgggaacccttttccccatctgcacggggcaggagtgtctggaccgggcctgagctggttaactgcagcgctgggcgcccgcctggctggttaagggcggtcgggtggcagacatttgtcttcaccgacagcccagacaaaggcctccaggagagactggggtcccaccttgtggtcaccaactgctccgcggaacacagccacccagctctgtcctgcaagatggctgctgagttcgacaccttcttggccagtgggcttaggtggttctgccatgtggacgatgacaactatgtgaacccaagggcgctgctgcagcttctgagagccttcccgctggcccgcgacgt

SEQ ID NO: 17976 - DNA, 570 bp, Homo sapiens
  source 1..570: mol_type = unassigned DNA
actcccacctggagaccctgcagctgctgaggactgcacagctcccagaacagatttcgctccctccattgtctgctctatccagatacaccctggtgtccccagctgggtgcccgatgaatcctgaactgctgggcaaaggttgggcagagacttctgggtgtgccttggctcccaaggtggcactgtgggtccctggcaagtgtcttgtgataggcagtccctggcagggccttcgggtggttggcaagcccaggatctgagtggcaattggcactgaaggcaccccaggcccctgggaggtgagttagacagcccaggggaccaggtggaccaggtggtggccagagaggctccaggggctagactccctcaggaggctgaattgaaaaagggcagggggcacttgagctgggctggggctcaggggtcctaaccctttaggcagtgacatggcctctgggtggggtctggccgttggccctggctaatgtctctcagtcattcccctggggctcaagcgctgggccgcccactcctgcctccctcatctgtgtcccgagttcctga

SEQ ID NO: 17977 - DNA, 1735 bp, Homo sapiens
  source 1..1735: mol_type = unassigned DNA
gtcgcctctgtgctcgctagtcaagtgaaacagtgggagtgaagaagaaacaaagacatctataactggttgtgatcaattagttgtaaacactgcactcagaccagcctgggaagattttaaggatatggtgtggtctgatgggttccaaggcagaggttacaatagcctggaagagggagactgcttaggcagtggcatcctggtgggatagggtctccagcccactggaattttctcttccaagcgtggccccgccctctccgctcgtgattggccctaagttccgggccccagtttcattggatgagcggtcgggggaccgggccaggtgactaagtttccgcggcgccttctccccggccactgcttgagccgctgagagggtggcgacgtcggggccatggggctgggcccggtctttctgcttctggctggcatcttcccttttgcacctccgggagctgctgctgagccccacagtcttcgttataacctcacggtgctgtcctgggatggatctgtgcagtcagggtttcttgctgaggtacatctggatggtcagcccttcctgcgctatgacaggcagaaatgcagggcaaagccccagggacagtgggcagaagatgtcctgggaaataagacatgggacagagagaccagggacttgacagggaacggaaaggacctcaggatgaccctggctcatatcaaggaccagaaagaaggcttgcattccctccaggagattagggtctgtgagatccatgaagacaacagcaccaggagctcccagcatttctactacgatggggagctcttcctctcccaaaacctggagactgaggaatggacagtgccccagtcctccagagctcagaccttggccatgaacgtcaggaatttcttgaaggaagatgccatgaagaccaagacacactatcacgctatgcatgcagactgcctgcaggaactacggcgatatctagaatccggcgtagtcctgaggagaacagtgccccccatggtgaatgtcacccgcagcgaggcctcagagggcaacatcaccgtgacatgcagggcttccagcttctatccccggaatatcatactgacctggcgtcaggatggggtatctttgagccacgacacccagcagtggggggatgtcctgcctgatgggaatggaacctaccagacctgggtggccaccaggatttgccgaggagaggagcagaggttcacctgctacatggaacacagcgggaatcacagcactcaccctgtgccctctgggaaagtgctggtgcttcagagtcattggcagacattccatgtttctgctgttgctgctggctgctgctatttttgttattattattttctatgtccgttgttgtaagaagaaaacatcagctgcagagggtccagagctcgtgagcctgcaggtcctggatcaacacccagttgggacgagtgaccacagggatgccacacagctcggatttcagcctctgatgtcagctcttgggtccactggctccactgagggcacctagactctacagccaggcggctggaattgaattccctgcctggatctcacaagcactttccctcttggtgcctcagtttcctgacctatgaaacagagaaaataaaagcacttatttattgttgttggaggctgcaaaatgttagtagatatgaggcatttgcagctgtgccatattaa

SEQ ID NO: 17978 - DNA, 2070 bp, Homo sapiens
  source 1..2070: mol_type = unassigned DNA
gtatcatttcagtgaaggtcactccagtctttcatggaggccaaactaagggtgtaaattaggatcctcactgaagtggcgggaccctaagaggctttttcctggccccttagttgtgggttttcctgcgggcggcgcagccggtttccatcagaaccgcccagaggcggacgctgccttcctggggtgacggagcagcaggaagcgttttcggatcctggaatacgtgggcggcccgtgggaggggctgaggcgcagtttcctactcacccggatccgaatcctccgcggtgctgtttcaagagagccggattccagatcacgctccagcccggactcggaattcctgccctgcgggtctgcattttcataacgggcaggtgtgagtgccctgcagctggagaccagaagcctgaaggcagctcggccctccccagcccacagcgccgttattccgtttctatatcagtaaacacatttcattttccgtagaccagggcggggtgacgggtgatcccagtcctcgcagtgaattccgggcagcaaaattcaaaacacatgcggccaaggccgggcacggtggttcacgcctgtaatcccagcactttgggaggtcgaggcgggcgatcacctgaggtcgggagctcgagaccaacctgaccaacatggggaaatcccgtctctactaaaaatataaaattagacgggcttggtggtgaatgcctgtaatcccagctagtcgggaggctgaggcaggagaatcgcttaaaccttggaggcggaggttgcggtgagccgagatcgcgccattgcacttcagcctgggcaacaagagggaaaactccgtcgcaaaaactttcgggggcggagcggagccccgccctgggttatgtaagcgaccgcgctgggccgtttctctttcttttccggaccctgcagtggcgcctaaagtctgagagagggaagtcgcctctgtgctcagccccacagtcttcgttataacctcacggtgctgtcctgggatggatctgtgcagtcagggtttcttgctgaggtacatctggatggtcagcccttcctgcgctatgacaggcagaaatgcagggcaaagccccagggacagtgggcagaagatgtcctgggaaataagacatgggacagagagaccagggacttgacagggaacggaaaggacctcaggatgaccctggctcatatcaaggaccagaaagaaggaatttcttgaaggaagatgccatgaagaccaagacacactatcacgctatgcatgcagactgcctgcaggaactacggcgatatctagaatccggcgtagtcctgaggagaacagtgccccccatggtgaatgtcacccgcagcgaggcctcagagggcaacatcaccgtgacatgcagggcttccagcttctatccccggaatatcatactgacctggcgtcaggatggggtatctttgagccacgacacccagcagtggggggatgtcctgcctgatgggaatggaacctaccagacctgggtggccaccaggatttgccgaggagaggagcagaggttcacctgctacatggaacacagcgggaatcacagcactcaccctgtgccctctgggaaagtgctggtgcttcagagtcattggcagacattccatgtttctgctgttgctgctggctgctgctatttttgttattattattttctatgtccgttgttgtaagaagaaaacatcagctgcagagggtccagagctcgtgagcctgcaggtcctggatcaacacccagttgggacgagtgaccacagggatgccacacagctcggatttcagcctctgatgtcagctcttgggtccactggctccactgagggcacctagactctacagccaggcggctggaattgaattccctgcctggatctcacaagcactttccctcttggtgcctcagtttcctgacctatgaaacagagaaaataaaagcacttatttattgttgttggaggctgcaaaatgttagtagatatgaggcatttgcagctgtgccatattaa

SEQ ID NO: 17979 - DNA, 2221 bp, Homo sapiens
  source 1..2221: mol_type = unassigned DNA
agcggtcgggggaccgggccaggtgactaagtttccgcggcgccttctccccggccactgcttgagccgctgagagggtggcgacgtcggggccatggggctgggcccggtctttctgcttctggctggcatcttcccttttgcacctccgggagctgctgctgagccccacagtcttcgttataacctcacggtgctgtcctgggatggatctgtgcagtcagggtttcttgctgaggtacatctggatggtcagcccttcctgcgctatgacaggcagaaatgcagggcaaagccccagggacagtgggcagaagatgtcctgggaaataagacatgggacagagagaccagggacttgacagggaacggaaaggacctcaggatgaccctggctcatatcaaggaccagaaagaagtgccccagtcctccagagctcagaccttggccatgaacgtcaggaatttcttgaaggaagatgccatgaagaccaagacacactatcacgctatgcatgcagactgcctgcaggaactacggcgatatctagaatccggcgtagtcctgaggagaacagtgccccccatggtgaatgtcacccgcagcgaggcctcagagggcaacatcaccgtgacatgcagggcttccagcttctatccccggaatatcatactgacctggcgtcaggatggggtatctttgagccacgacacccagcagtggggggatgtcctgcctgatgggaatggaacctaccagacctgggtggccaccaggatttgccgaggagaggagcagaggttcacctgctacatggaacacagcgggaatcacagcactcaccctgtgccctctgggaaagtgctggtgcttcagagtcattggcagacattccatgtttctgctgttgctgctggctgctgctatttttgttattattattttctatgtccgttgttgtaagaagaaaacatcagctgcagagggtccagagctcgtgagcctgcaggtcctggatcaacacccagttgggacgagtgaccacagggatgccacacagctcggatttcagcctctgatgtcagctcttgggtccactggctccactgagggcacctagactctacagccaggcggctggaattgaattccctgcctggatctcacaagcactttccctcttggtgcctcagtttcctgacctatgaaacagagaaaataaaagcacttatttattgttgttggaggctgcaaaatgttagtagatatgaggcatttgcagctgtgccatattaattggtgtcattgtttttgttgttttcgtattattattttttttttttaagacagagtctcaggccaggcacggtggctcacgcctgtaatcccaacactttgggaggccgaggcgggcggatcacaaggtcaagagatcgagaccatcctgatcaacatggtgaaaccctgtctctactaaaaatacaaaaaattagctgggcctggtggcgtgtgcctgtagtcccagctactcaggagctgaggcaggaaaatcacttgaacctgggaggtggaggttgcagtgagctgagatcacaccactgcactccagcctggcgacagagcgagactctgtctcaaaaaaaaaaaaaaaaaaagacagagtctcactctgtcacccaggctgcagttcagtgacatgatctcagctcgttgcagcctccgcctcccgggttcaagcacttctcttgcctcagcctcccgagtagctggggttacagacatgcaccaccatacccggctaatttttgcatttttcatagagacaggattttgccatgttggccaggctggtctcaaactcctgacctcaggtgatctgcctgcctcagcctcccaaagtgctgggattacaagcatgagccaccatacccggcctattttattacattttaatttattttattttattatatcatccaccatgtctggcctattttattatattttaagatattttaatatattacgtgtgttgtaattggattatcatcggtgagctttgtgagtgagtgtcttggagatgactcctcctgaccagcccaggaccagctttcttgtcaccttgaggtcccctcgccccatcacactcttacgcattactctatgtctactgttatgggtgtgtaattttataccatagatgtttactctttaaacaga

SEQ ID NO: 17980 - DNA, 2010 bp, Homo sapiens
  source 1..2010: mol_type = unassigned DNA
gtatcatttcagtgaaggtcactccagtctttcatggaggccaaactaagggtgtaaattaggatcctcactgaagtggcgggaccctaagaggctttttcctggccccttagttgtgggttttcctgcgggcggcgcagccggtttccatcagaaccgcccagaggcggacgctgccttcctggggtgacggagcagcaggaagcgttttcggatcctggaatacgtgggcggcccgtgggaggggctgaggcgcagtttcctactcacccggatccgaatcctccgcggtgctgtttcaagagagccggattccagatcgcgctccagcccggactcggaattcctgccctgcgggtctgcattttcataacgggcaggtgtgagtgccctgcagctggagaccagaagcctgaaggcagctcggccctccccagcccacagcgccgttattccgtttctatatcagtaaacacatttcattttccgtagaccagggcggggtgacgggtgatcccagtcctcgcagtgaattccgggcagcaaaattcaaaacacatgcggccaaggccgggcacggtggttcacgcctgtaatcccagcactttgggaggtcgaggcgggcgatcacctgaggtcgggagctcgagaccaacctgaccaacatggggaaatcccgtctctactaaaaatataaaattagacgggcttggtggtgaatgcctgtaatcccagctagtcgggaggctgaggcaggagaatcgcttaaaccttggaggcggaggttgcggtgagccgagatcgcgccattgcacttcagcctgggcaacaagagggaaaactccgtcgcaaaaactttcgggggcggagcggagccccgccctgggttatgtaagcgaccgcgctgggccgtttctctttcttttccggaccctgcagtggcgcctaaagtctgagagagggaagtcgcctctgtgctcagccccacagtcttcgttataacctcacggtgctgtcctgggatggatctgtgcagtcagggtttctcactgaggtacatctggatggtcagcccttcctgcgctgtgacaggcagaaatgcagggcaaagccccagggacagtgggcagaagatgtcctgggaaataagacatgggacagagagaccagagacttgacagggaacggaaaggacctcaggatgaccctggctcatatcaaggaccagaaagaaggaatttcttgaaggaagatgccatgaagaccaagacacactatcacgctatgcatgcagactgcctgcaggaactacggcgatatctaaaatccggcgtagtcctgaggagaacagtgccccccatggtgaatgtcacccgcagcgaggcctcagagggcaacattaccgtgacatgcagggcttctggcttctatccctggaatatcacactgagctggcgtcaggatggggtatctttgagccacgacacccagcagtggggggatgtcctgcctgatgggaatggaacctaccagacctgggtggccaccaggatttgccaaggagaggagcagaggttcacctgctacatggaacacagcgggaatcacagcactcaccctgtgccctctgggaaagtgctggtgcttcagagtcattggcagacattccatgtttctgctgttgctgctgctgctatttttgttattattattttctatgtccgttgttgtaagaagaaaacatcagctgcagagggtccagagctcgtgagcctgcaggtcctggatcaacacccagttgggacgagtgaccacagggatgccacacagctcggatttcagcctctgatgtcagatcttgggtccactggctccactgagggcgcctagactctacagccaggcagctgggattcaattccctgcctggatctcacgagcactttccctcttggtgcctcagtttcctgacctatgaaacagagaaaataaaagcacttatttattgtt

SEQ ID NO: 17981 - DNA, 1675 bp, Homo sapiens
  source 1..1675: mol_type = unassigned DNA
gtcgcctctgtgctcgctagtcaagtgaaacagtgggagtgaagaagaaacaaagacatctataactggttgtgatcaattagttgtaaacactgcactcagaccagcctgggaagattttaaggatatggtgtggtctgatgggttccaaggcagaggttacaatagcctggaagagggagactgcttaggcagtggcatcctggtgggatagggtctccagcccactggaattttctcttccaagcgtggccccgccctctccgctcgtgattggccctaagttccgggccccagtttcattggatgagcggtcgggggaccgggccaggtgactaagtttccgcggcgccttctccccggccactgcttgagccgctgagagggtggcgacgtcggggccatggggctgggcccggtcttcctgcttctggctggcatcttcccttttgcacctccgggagctgctgctgagccccacagtcttcgttataacctcacggtgctgtcctgggatggatctgtgcagtcagggtttctcactgaggtacatctggatggtcagcccttcctgcgctgtgacaggcagaaatgcagggcaaagccccagggacagtgggcagaagatgtcctgggaaataagacatgggacagagagaccagagacttgacagggaacggaaaggacctcaggatgaccctggctcatatcaaggaccagaaagaaggcttgcattccctccaggagattagggtctgtgagatccatgaagacaacagcaccaggagctcccagcatttctactacgatggggagctcttcctctcccaaaacctggagactaaggaatggacaatgccccagtcctccagagctcagaccttggccatgaacgtcaggaatttcttgaaggaagatgccatgaagaccaagacacactatcacgctatgcatgcagactgcctgcaggaactacggcgatatctaaaatccggcgtagtcctgaggagaacagtgccccccatggtgaatgtcacccgcagcgaggcctcagagggcaacattaccgtgacatgcagggcttctggcttctatccctggaatatcacactgagctggcgtcaggatggggtatctttgagccacgacacccagcagtggggggatgtcctgcctgatgggaatggaacctaccagacctgggtggccaccaggatttgccaaggagaggagcagaggttcacctgctacatggaacacagcgggaatcacagcactcaccctgtgccctctgggaaagtgctggtgcttcagagtcattggcagacattccatgtttctgctgttgctgctgctgctatttttgttattattattttctatgtccgttgttgtaagaagaaaacatcagctgcagagggtccagagctcgtgagcctgcaggtcctggatcaacacccagttgggacgagtgaccacagggatgccacacagctcggatttcagcctctgatgtcagatcttgggtccactggctccactgagggcgcctagactctacagccaggcagctgggattcaattccctgcctggatctcacgagcactttccctcttggtgcctcagtttcctgacctatgaaacagagaaaataaaagcacttatttattgtt

SEQ ID NO: 17982 - DNA, 2221 bp, Homo sapiens
  source 1..2221: mol_type = unassigned DNA
agcggtcgggggaccgggccaggtgactaagtttccgcggcgccttctccccggccactgcttgagccgctgagagggtggcgacgtcggggccatggggctgggcccggtcttcctgcttctggctggcatcttcccttttgcacctccgggagctgctgctgagccccacagtcttcgttataacctcacggtgctgtcctgggatggatctgtgcagtcagggtttcttgctgaggtacatctggatggtcagcccttcctgcgctatgacaggcagaaatgcagggcaaagccccagggacagtgggcagaagatgtcctgggaaataagacatgggacagagagaccagggacttgacagggaacggaaaggacctcaggatgaccctggctcatatcaaggaccagaaagaagtgccccagtcctccagagctcagaccttggccatgaacgtcaggaatttcttgaaggaagatgccatgaagaccaagacacactatcacgctatgcatgcagactgcctgcaggaactacggcgatatctagaatccggcgtagtcctgaggagaacagtgccccccatggtgaatgtcacccgcagcgaggcctcagagggcaacatcaccgtgacatgcagggcttccagcttctatccccggaatatcatactgacctggcgtcaggatggggtatctttgagccacgacacccagcagtggggggatgtcctgcctgatgggaatggaacctaccagacctgggtggccaccaggatttgccgaggagaggagcagaggttcacctgctacatggaacacagcgggaatcacagcactcaccctgtgccctctgggaaagtgctggtgcttcagagtcattggcagacattccatgtttctgctgttgctgctggctgctgctatttttgttattattattttctatgtccgttgttgtaagaagaaaacatcagctgcagagggtccagagctcgtgagcctgcaggtcctggatcaacacccagttgggacgagtgaccacagggatgccacacagctcggatttcagcctctgatgtcagctcttgggtccactggctccactgagggcacctagactctacagccaggcggctggaattgaattccctgcctggatctcacaagcactttccctcttggtgcctcagtttcctgacctatgaaacagagaaaataaaagcacttatttattgttgttggaggctgcaaaatgttagtagatatgaggcatttgcagctgtgccatattaattggtgtcattgtttttgttgttttcgtattattattttttttttttaagacagagtctcaggccaggcacggtggctcacgcctgtaatcccaacactttgggaggccgaggcgggcggatcacaaggtcaagagatcgagaccatcctgatcaacatggtgaaaccctgtctctactaaaaatacaaaaaattagctgggcctggtggcgtgtgcctgtagtcccagctactcaggagctgaggcaggaaaatcacttgaacctgggaggtggaggttgcagtgagctgagatcacaccactgcactccagcctggcgacagagcgagactctgtctcaaaaaaaaaaaaaaaaaaagacagagtctcactctgtcacccaggctgcagttcagtgacatgatctcagctcgttgcagcctccgcctcccgggttcaagcacttctcttgcctcagcctcccgagtagctggggttacagacatgcaccaccatacccggctaatttttgcatttttcatagagacaggattttgccatgttggccaggctggtctcaaactcctgacctcaggtgatctgcctgcctcagcctcccaaagtgctgggattacaagcatgagccaccatacccggcctattttattacattttaatttattttattttattatatcatccaccatgtctggcctattttattatattttaagatattttaatatattacgtgtgttgtaattggattatcatcggtgagctttgtgagtgagtgtcttggagatgactcctcctgaccagcccaggaccagctttcttgtcaccttgaggtcccctcgccccatcacactcttacgcattactctatgtctactgttatgggtgtgtaattttataccatagatgtttactctttaaacaga

SEQ ID NO: 17983 - DNA, 1735 bp, Homo sapiens
  source 1..1735: mol_type = unassigned DNA
gtcgcctctgtgctcgctagtcaagtgaaacagtgggagtgaagaagaaacaaagacatctataactggttgtgatcaattagttgtaaacactgcactcagaccagcctgggaagattttaaggatatggtgtggtctgatgggttccaaggcagaggttacaatagcctggaagagggagactgcttaggcagtggcatcctggtgggatagggtctccagcccactggaattttctcttccaagcgtggccccgccctctccgctcgtgattggccctaagttccgggccccagtttcattggatgagcggtcgggggaccgggccaggtgactaagtttccgcggcgccttctccccggccactgcttgagccgctgagagggtggcgacgtcggggccatggggctgggcccggtcttcctgcttctggctggcatcttcccttttgcacctccgggagctgctgctgagccccacagtcttcgttataacctcacggtgctgtcctgggatggatctgtgcagtcagggtttcttgctgaggtacatctggatggtcagcccttcctgcgctatgacaggcagaaatgcagggcaaagccccagggacagtgggcagaagatgtcctgggaaataagacatgggacagagagaccagggacttgacagggaacggaaaggacctcaggatgaccctggctcatatcaaggaccagaaagaaggcttgcattccctccaggagattagggtctgtgagatccatgaagacaacagcaccaggagctcccagcatttctactacgatggggagctcttcctctcccaaaacctggagactgaggaatggacagtgccccagtcctccagagctcagaccttggccatgaacgtcaggaatttcttgaaggaagatgccatgaagaccaagacacactatcacgctatgcatgcagactgcctgcaggaactacggcgatatctagaatccggcgtagtcctgaggagaacagtgccccccatggtgaatgtcacccgcagcgaggcctcagagggcaacatcaccgtgacatgcagggcttccagcttctatccccggaatatcatactgacctggcgtcaggatggggtatctttgagccacgacacccagcagtggggggatgtcctgcctgatgggaatggaacctaccagacctgggtggccaccaggatttgccgaggagaggagcagaggttcacctgctacatggaacacagcgggaatcacagcactcaccctgtgccctctgggaaagtgctggtgcttcagagtcattggcagacattccatgtttctgctgttgctgctggctgctgctatttttgttattattattttctatgtccgttgttgtaagaagaaaacatcagctgcagagggtccagagctcgtgagcctgcaggtcctggatcaacacccagttgggacgagtgaccacagggatgccacacagctcggatttcagcctctgatgtcagctcttgggtccactggctccactgagggcacctagactctacagccaggcggctggaattgaattccctgcctggatctcacaagcactttccctcttggtgcctcagtttcctgacctatgaaacagagaaaataaaagcacttatttattgttgttggaggctgcaaaatgttagtagatatgaggcatttgcagctgtgccatattaa

SEQ ID NO: 17984 - DNA, 2070 bp, Homo sapiens
  source 1..2070: mol_type = unassigned DNA
gtatcatttcagtgaaggtcactccagtctttcatggaggccaaactaagggtgtaaattaggatcctcactgaagtggcgggaccctaagaggctttttcctggccccttagttgtgggttttcctgcgggcggcgcagccggtttccatcagaaccgcccagaggcggacgctgccttcctggggtgacggagcagcaggaagcgttttcggatcctggaatacgtgggcggcccgtgggaggggctgaggcgcagtttcctactcacccggatccgaatcctccgcggtgctgtttcaagaaagccggattccagatcgcgctccagcccggactcggaattcctgccctgcgggtctgcattttcataacgggcaggtgtgagtgccctgcagctggagaccagaagcctgaaggcagctcggccctccccagcccacagcgccgttattccgtttctatatcagtaaacacatttcattttccgtagaccagggcggggtgacgggtgatcccagtcctcgcagtgaattccgggcagcaaaattcaaaacacatgcggccaaggccgggcacggtggttcacgcctgtaatcccagcactttgggaggtcgaggcgggcgatcacctgaggtcgggagctcgagaccaacctgaccaacatggggaaatcccgtctctactaaaaatataaaattagacgggcttggtggtgaatgcctgtaatcccagctagtcgggaggctgaggcaggagaatcgcttaaaccttggaggcggaggttgcggtgagccgagatcgcgccattgcacttcagcctgggcaacaagagggaaaactccgtcgcaaaaactttcgggggcggagcggagccccgccctgggttatgtaagcgaccgcgctgggccgtttctctttcttttccggaccctgcagtggcgcctaaagtctgagagagggaagtcgcctctgtgctcagccccacagtcttcgttataacctcacggtgctgtcctgggatggatctgtgcagtcagggtttcttgctgaggtacatctggatggtcagcccttcctgcgctatgacaggcagaaatgcagggcaaagccccagggacagtgggcagaagatgtcctgggaaataagacatgggacagagagaccagggacttgacagggaacggaaaggacctcaggatgaccctggctcatatcaaggaccagaaagaaggaatttcttgaaggaagatgccatgaagaccaagacacactatcacgctatgcatgcagactgcctgcaggaactacggcgatatctagaatccggcgtagtcctgaggagaacagtgccccccatggtgaatgtcacccgcagcgaggcctcagagggcaacatcaccgtgacatgcagggcttccagcttctatccccggaatatcatactgacctggcgtcaggatggggtatctttgagccacgacacccagcagtggggggatgtcctgcctgatgggaatggaacctaccagacctgggtggccaccaggatttgccgaggagaggagcagaggttcacctgctacatggaacacagcgggaatcacagcactcaccctgtgccctctgggaaagtgctggtgcttcagagtcattggcagacattccatgtttctgctgttgctgctggctgctgctatttttgttattattattttctatgtccgttgttgtaagaagaaaacatcagctgcagagggtccagagctcgtgagcctgcaggtcctggatcaacacccagttgggacgagtgaccacagggatgccacacagctcggatttcagcctctgatgtcagctcttgggtccactggctccactgagggcacctagactctacagccaggcggctggaattgaattccctgcctggatctcacaagcactttccctcttggtgcctcagtttcctgacctatgaaacagagaaaataaaagcacttatttattgttgttggaggctgcaaaatgttagtagatatgaggcatttgcagctgtgccatattaa

SEQ ID NO: 17985 - DNA, 1007 bp, Homo sapiens
  source 1..1007: mol_type = unassigned DNA
ttcccttttgcacctccgggagctgctgctgagccccacagtcttcgttataacctcacggtgctgtcctgggatggatctgtgcagtcagggtttcttgctgaggtacatctggatggtcagcccttcctgcgctatgacaggcagaaatgcagggcaaagccccagggacagtgggcagaagatgtcctgggaaataagacatgggacagagagaccagggacttgacagggaacggaaaggacctcaggatgaccctggctcatatcaaggaccagaaagaagtgccccccatggtgaatgtcacccgcagcgaggcctcagagggcaacatcaccgtgacatgcagggcttccagcttctatccccggaatatcacactgacctggcgtcaggatggggtatctttgagccacgacacccagcagtggggggatgtcctgcctgatgggaatggaacctaccagacctgggtggccaccaggatttgccaaggagaggagcagaggttcacctgctacatggaacacagcgggaatcacagcactcaccctgtgccctctgggaaagtgctggtgcttcagagtcattggcagacattccatgtttctgctgttgctgctgctgctgctgctatttttgttattattattttctatgtccgttgttgtaagaagaaaacatcagctgcagagggtccagagctcgtgagcctgcaggtcctggatcaacacccagttgggacgagtgaccacagggatgccacacagctcggatttcagcctctgatgtcagctcttgggtccactggctccactgagggcgcctagactctacagccaggcggctggaattgaattccctgcctggatctcacaagcactttccctcttggtgcctcagtttcctgacctatgaaacagagaaaataaaagcacttatttattgttgttggaggctgcaaaatgttagtagatatgaggcatttgcagctgtgccatattaa

SEQ ID NO: 17986 - DNA, 1737 bp, Homo sapiens
  source 1..1737: mol_type = unassigned DNA
gtcgcctctgtgctggctagtcaagtgaaacagtgggagtgaagaagaaacaaagacatctataactggttgtgatcaattagttgtacacactgcactcagaccagcctgggaagattttaaggatatggtgtggtctgatgggttccaaggcagaggttacaatagcctggaagagggagactgcttaggcagtggcatcctggtgggatagggtctccagcccactggaattttctcttccaagcgtggccccgccctctccgctcgtgattggccctaagttccgggccccagtttcattggatgagcggtcgggggaccgggccaggtgactaagtttccgcggcgccttctccccggccactgcttgagccgctgagagggtggcgacgtcggggccatggggctgggcccggtcttcctgcttctggctggcatcttcccttttgcacctccgggagctgctgctgagccccacagtcttcgttataacctcacggtgctgtcctgggatggatctgtgcagtcagggtttcttgctgaggtacatctggatggtcagcccttcctgcgctatgacaggcagaaatgcagggcaaagccccagggacagtgggcagaagatgtcctgggaaataagacatgggacagagagaccagggacttgacagggaacggaaaggacctcaggatgaccctggctcatatcaaggaccagaaagaaggcttgcattccctccaggagattagggtctgtgagatccatgaagacaacagcaccaggagctcccagcatttctactacgatggggagctcttcctctcccaaaacgtggagactgaggaatggacagtgccccagtcctccagagctcagaccttggccatgaacgtcaggaatttcttgaaggaagatgccatgaagaccaagacacactatcacgctatgcatgcagactgcctgcaggaactacggcgatatctagaatccagcgtagtcctgaggagaagagtgccccccatggtgaatgtcacccgcagcgaggcctcagagggcaacatcaccgtgacatgcagggcttccagcttctatccccggaatatcacactgacctggcgtcaggatggggtatctttgagccacgacacccagcagtggggggatgtcctgcctgatgggaatggaacctaccagacctgggtggccaccaggatttgccaaggagaggagcagaggttcacctgctacatggaacacagcgggaatcacagcactcaccctgtgccctctgggaaagtgctggtgcttcagagtcattggcagacattccatgtttctgctgttgctgctgctgctgctgctatttttgttattattattttctatgtccgttgttgtaagaagaaaacatcagctgcagagggtccagagctcgtgagcctgcaggtcctggatcaacacccagttgggacgagtgaccacagggatgccacacagctcggatttcagcctctgatgtcagctcttgggtccactggctccactgagggcgcctagactctacagccaggcggctggaattgaattccctgcctggatctcacaagcactttccctcttggtgcctcagtttcctgacctatgaaacagagaaaataaaagcacttatttattgttgttggaggctgcaaaatgttagtagatatgaggcatttgcagctgtgccatattaa

SEQ ID NO: 17987 - DNA, 2072 bp, Homo sapiens
  source 1..2072: mol_type = unassigned DNA
gtatcatttcagtgaaggtcactccagtctttcatggaggccaaactaagggtgtaaattaggatcctcactgaagtggcgggaccctaagaggctttttcctggccccttagttgtgggttttcctgcgggcggcgcagccggttcccatcagaaccgcccagaggcggacgctgccttcctggggtgacggagcagcaggaagcgttttcggatcctggaatacgtgggcggcccgtgggaggggctgaggcgcagtttcctactcacccggatcagaatcctccgcggtgctgtttcaagagagccggattccagatcgcgctccagcccggactcggaattcctgccctgcgggtctgcattttcataacgggcaggtgtgagtgccctgcagctggagaccagaagcctgaaggcagctcggccctccccagcccacagcgccgttattccgtttctatatcagtaaacacatttcattttccgtagaccagggcggggtgacgggtgatcccagtcctcgcagtgaattccgggcagcaaaattcaaaacacatgcgggcaaggccgggcacggtggttcacgcctgcaatcccagcactttgggaggtcgaggcgggcgatcacctgaggtcgggagctcgagaccaacctgaccaacatggggaaatcccgtctctactaaaaatataaaattagacgggcttggtggtgaatgcctgtaatcccagctagtcgggaggctgaggcaggagaatcgcttaaaccttggaggcggaggttgcggtgagccgagatcgcgccactgcacttcagcctgggcaacaagagggaaaactccgtcgcaaaaactttcgggggcggagcggagccccgccctgggttatgtaagcgaccgcgctgggccgtttctctttcttttccggaccctgcagtggcgcctaaagtctgagagagggaagtcgcctctgtgctgagccccacagtcttcgttataacctcacggtgctgtcctgggatggatctgtgcagtcagggtttcttgctgaggtacatctggatggtcagcccttcctgcgctatgacaggcagaaatgcagggcaaagccccagggacagtgggcagaagatgtcctgggaaataagacatgggacagagagaccagggacttgacagggaacggaaaggacctcaggatgaccctggctcatatcaaggaccagaaagaaggaatttcttgaaggaagatgccatgaagaccaagacacactatcacgctatgcatgcagactgcctgcaggaactacggcgatatctagaatccagcgtagtcctgaggagaagagtgccccccatggtgaatgtcacccgcagcgaggcctcagagggcaacatcaccgtgacatgcagggcttccagcttctatccccggaatatcacactgacctggcgtcaggatggggtatctttgagccacgacacccagcagtggggggatgtcctgcctgatgggaatggaacctaccagacctgggtggccaccaggatttgccaaggagaggagcagaggttcacctgctacatggaacacagcgggaatcacagcactcaccctgtgccctctgggaaagtgctggtgcttcagagtcattggcagacattccatgtttctgctgttgctgctgctgctgctgctatttttgttattattattttctatgtccgttgttgtaagaagaaaacatcagctgcagagggtccagagctcgtgagcctgcaggtcctggatcaacacccagttgggacgagtgaccacagggatgccacacagctcggatttcagcctctgatgtcagctcttgggtccactggctccactgagggcgcctagactctacagccaggcggctggaattgaattccctgcctggatctcacaagcactttccctcttggtgcctcagtttcctgacctatgaaacagagaaaataaaagcacttatttattgttgttggaggctgcaaaatgttagtagatatgaggcatttgcagctgtgccatattaa

SEQ ID NO: 17988 - DNA, 1005 bp, Homo sapiens
  source 1..1005: mol_type = unassigned DNA
ttcccttttgcacctccgggagctgctgctgagccccacagtcttcgttataacctcacggtgctgtcctgggatggatctgtgcagtcagggtttcttgctgaggtacatctggatggtcagcccttcctgcgctatgacaggcagaaatgcagggcaaagccccagggacagtgggcagaagatgtcctgggaaataagacatgggacagagagaccagggacttgacagggaacggaaaggacctcaggatgaccctggctcatatcaaggaccagaaagaagtgccccccatggtgaatgtcacccgcagcgaggcctcagagggcaacatcaccgtgacatgcagggcttccagcttctatccccggaatatcatactgacctggcgtcaggatggggtatctttgagccacgacacccagcagtggggggatgtcctgcctgatgggaatggaacctaccagacctgggtggccaccaggatttgccgaggagaggagcagaggttcacctgctacatggaacacagcgggaatcacagcactcaccctgtgccctctgggaaagtgctggtgcttcagagtcattggcagacattccatgtttctgctgttgctgctggctgctgctatttttgttattattattttctatgtccgttgttgtaagaagaaaacatcagctgcagagggtccagagctcgtgagcctgcaggtcctggatcaacacccagttgggacgagtgaccacagggatgccacacagctcggatttcagcctctgatgtcagctcttgggtccactggctccactgagggcacctagactctacagccaggcggctggaattgaattccctgcctggatctcacaagcactttccctcttggtgcctcagtttcctgacctatgaaacagagaaaataaaagcacttatttattgttgttggaggctgcaaaatgttagtagatatgaggcatttgcagctgtgccatattaa

SEQ ID NO: 17989 - DNA, 1005 bp, Homo sapiens; identical to SEQ ID NO: 17988
  source 1..1005: mol_type = unassigned DNA

SEQ ID NO: 17990 - DNA, 1005 bp, Homo sapiens; identical to SEQ ID NO: 17988
  source 1..1005: mol_type = unassigned DNA

SEQ ID NO: 17991 - DNA, 1735 bp, Homo sapiens; identical to SEQ ID NO: 17983
  source 1..1735: mol_type = unassigned DNA

SEQ ID NO: 17992 - DNA, 2223 bp, Homo sapiens
  source 1..2223: mol_type = unassigned DNA
agcggtcgggggaccgggccaggtgactaagtttccgcggcgccttctccccggccactgcttgagccgctgagagggtggcgacgtcggggccatggggctgggcccggtcttcctgcttctggctggcatcttcccttttgcacctccgggagctgctgctgagccccacagtcttcgttataacctcacggtgctgtcctgggatggatctgtgcagtcagggtttcttgctgaggtacatctggatggtcagcccttcctgcgctatgacaggcagaaatgcagggcaaagccccagggacagtgggcagaagatgtcctgggaaataagacatgggacagagagaccagggacttgacagggaacggaaaggacctcaggatgaccctggctcatatcaaggaccagaaagaagtgccccagtcctccagagctcagaccttggccatgaacgtcaggaatttcttgaaggaagatgccatgaagaccaagacacactatcacgctatgcatgcagactgcctgcaggaactacggcgatatctagaatccagcgtagtcctgaggagaagagtgccccccatggtgaatgtcacccgcagcgaggcctcagagggcaacatcaccgtgacatgcagggcttccagcttctatccccggaatatcacactgacctggcgtcaggatggggtatctttgagccacgacacccagcagtggggggatgtcctgcctgatgggaatggaacctaccagacctgggtggccaccaggatttgccaaggagaggagcagaggttcacctgctacatggaacacagcgggaatcacagcactcaccctgtgccctctgggaaagtgctggtgcttcagagtcattggcagacattccatgtttctgctgttgctgctgctgctgctgctatttttgttattattattttctatgtccgttgttgtaagaagaaaacatcagctgcagagggtccagagctcgtgagcctgcaggtcctggatcaacacccagttgggacgagtgaccacagggatgccacacagctcggatttcagcctctgatgtcagctcttgggtccactggctccactgagggcgcctagactctacagccaggcggctggaattgaattccctgcctggatctcacaagcactttccctcttggtgcctcagtttcctgacctatgaaacagagaaaataaaagcacttatttattgttgttggaggctgcaaaatgttagtagatatgaggcatttgcagctgtgccatattaattggtgtcattgtttttgttgttttcgtattattattttttttttttaagacagagtctcaggccaggcacggtggctcacgcctgtaatcccaacactttgggaggccgaggcgggcggatcacaaggtcaagagatcgagaccatcctgatcaacatggtgaaaccctgtctctactaaaaatacaaaaaattagctgggcctggtggcgtgtgcctgtagtcccagctactcaggagctgaggcaggaaaatcacttgaacctgggaggtggaggttgcagtgagctgagatcacaccactgcactccagcctggcgacagagcgagactctgtctcaaaaaaaaaaaaaaaaaaggacagagtctcactctgtcacccaggctgcagttcagtgacatgatctcagctcgttgcagcctccgcctcccgggttcaagcacttctcttgcctcagcctcccgagtagctggggttacagacatgcaccaccatacccggctaatttttgcatttttcatagagacaggattttgccatgttggccaggctggtctcaaactcctgacctcaggtgatctgcctgcctcaggctcccaaagtgctgggattacaagcatgagccaccatacccggcctattttattacattttaatttattttattttattatatcatccaccatgtctggcctattttattatattttaagatattttaatatattacgtgtgttgtaattggattatcatcagtgagctttgtgagtgagtgtcttggagatgactcctcctgaccagcccaggaccagctttcttgtcaccttgaggtcccctcgccccatcacactcttacgcattactctatgtctactgttatgggtgtgtaattttataccatagatgtttactctttaaacaga

SEQ ID NO: 17993 - DNA, 1001 bp, Homo sapiens
  source 1..1001: mol_type = unassigned DNA
ttcccttttgcacctccgggagctgctgctgagccccacagtcttcgttataacctcacggtgctgtcctgggatggatctgtgcagtcagggtttctcactgaggtacatctggatggtcagcccttcctgcgctgtgacaggcagaaatgcagggcaaagccccagggacagtgggcagaagatgtcctgggaaataagacatgggacagagagaccagagacttgacagggaacggaaaggacctcaggatgaccctggctcatatcaaggaccagaaagaagtgccccccatggtgaatgtcacccgcagcgaggcctcagagggcaacattaccgtgacatgcagggcttctggcttctatccctggaatatcacactgagctggcgtcaggatggggtatctttgagccacgacacccagcagtggggggatgtcctgcctgatgggaatggaacctaccagacctgggtggccaccaggatttgccaaggagaggagcagaggttcacctgctacatggaacacagcgggaatcacagcactcaccctgtgccctctgggaaagtgctggtgcttcagagtcattggcagacattccatgtttctgctgttgctgctgctgctatttttgttattattattttctatgtccgttgttgtaagaagaaaacatcagctgcagagggtccagagctcgtgagcctgcaggtcctggatcaacacccagttgggacgagtgaccacagggatgccacacagctcggatttcagcctctgatgtcagatcttgggtccactggctccactgagggcgcctagactctacagccaggcagctgggattcaattccctgcctggatctcacgagcactttccctcttggtgcctcagtttcctgacctatgaaacagagaaaataaaagcacttatttattgttgttggaggctgcaaaatgttagtagatatgaggcgtttgcagctgtaccatattaa

SEQ ID NO: 17994 - DNA, 2070 bp, Homo sapiens; identical to SEQ ID NO: 17984
  source 1..2070: mol_type = unassigned DNA

SEQ ID NO: 17995 - DNA, 2221 bp, Homo sapiens; identical to SEQ ID NO: 17982
  source 1..2221: mol_type = unassigned DNA

SEQ ID NO: 17996 - DNA, 1369 bp, Homo sapiens
  source 1..1369: mol_type = unassigned DNA
cactgcttgagccgctgagagggtggcgacgtcggggccatggggctgggcccggtctttctgcttctggctggcatcttcccttttgcacctccgggagctgctgctgagccccacagtcttcgttataacctcacggtgctgtcctgggatggatctgtgcagtcagggtttcttgctgaggtacatctggatggtcagcccttcctgcgctatgacaggcagaaatgcagggcaaagccccagggacagtgggcagaagatgtcctgggaaataagacatgggacagagagaccagggacttgacagggaacggaaaggacctcaggatgaccctggctcatatcaaggaccagaaagaaggcttgcattccctccaggagattagggtctgtgagatccatgaagacaacagcaccaggagctcccagcatttctactacgatggggagctcttcctctcccaaaacctggagactgaggaatggacagtgccccagtcctccagagctcagaccttggccatgaacgtcaggaatttcttgaaggaagatgccatgaagaccaagacacactatcacgctatgcatgcagactgcctgcaggaactacggcgatatctagaatccggcgtagtcctgaggagaacagtgccccccatggtgaatgtcacccgcagcgaggcctcagagggcaacatcaccgtgacatgcagggcttccagcttctatccccggaatatcatactgacctggcgtcaggatggggtatctttgagccacgacacccagcagtggggggatgtcctgcctgatgggaatggaacctaccagacctgggtggccaccaggatttgccgaggagaggagcagaggttcacctgctacatggaacacagcgggaatcacagcactcaccctgtgccctctgggaaagtgctggtgcttcagagtcattggcagacattccatgtttctgctgttgctgctggctgctgctatttttgttattattattttctatgtccgttgttgtaagaagaaaacatcagctgcagagggtccagagctcgtgagcctgcaggtcctggatcaacacccagttgggacgagtgaccacagggatgccacacagctcggatttcagcctctgatgtcagctcttgggtccactggctccactgagggcacctagactctacagccaggcggctggaattgaattccctgcctggatctcacaagcactttccctcttggtgcctcagtttcctgacctatgaaacagagaaaataaaagcacttatttattgttgttggaggctgcaaaatgttagtagatatgaggcatttgcagctgtgccatatt

SEQ ID NO: 17997 - DNA, 1369 bp, Homo sapiens
  source 1..1369: mol_type = unassigned DNA
cactgcttgagccgctgagagggtggcgacgtcggggccatggggctgggcccggtcttcctgcttctggctggcatcttcccttttgcacctccgggagctgctgctgagccccacagtcttcgttataacctcacggtgctgtcctgggatggatctgtgcagtcagggtttcttgctgaggtacatctggatggtcagcccttcctgcgctatgacaggcagaaatgcagggcaaagccccagggacagtgggcagaagatgtcctgggaaataagacatgggacagagagaccagggacttgacagggaacggaaaggacctcaggatgaccctggctcatatcaaggaccagaaagaaggcttgcattccctccaggagattagggtctgtgagatccatgaagacaacagcaccaggagctcccagcatttctactacgatggggagctcttcctctcccaaaacctggagactgaggaatggacagtgccccagtcctccagagctcagaccttggccatgaacgtcaggaatttcttgaaggaagatgccatgaagaccaagacacactatcacgctatgcatgcagactgcctgcaggaactacggcgatatctagaatccggcgtagtcctgaggagaacagtgccccccatggtgaatgtcacccgcagcgaggcctcagagggcaacatcaccgtgacatgcagggcttccagcttctatccccggaatatcatactgacctggcgtcaggatggggtatctttgagccacgacacccagcagtggggggatgtcctgcctgatgggaatggaacctaccagacctgggtggccaccaggatttgccgaggagaggagcagaggttcacctgctacatggaacacagcgggaatcacagcactcaccctgtgccctctgggaaagtgctggtgcttcagagtcattggcagacattccatgtttctgctgttgctgctggctgctgctatttttgttattattattttctatgtccgttgttgtaagaagaaaacatcagctgcagagggtccagagctcgtgagcctgcaggtcctggatcaacacccagttgggacgagtgaccacagggatgccacacagctcggatttcagcctctgatgtcagctcttgggtccactggctccactgagggcacctagactctacagccaggcggctggaattgaattccctgcctggatctcacaagcactttccctcttggtgcctcagtttcctgacctatgaaacagagaaaataaaagcacttatttattgttgttggaggctgcaaaatgttagtagatatgaggcatttgcagctgtgccatatt

SEQ ID NO: 17998 - DNA, 1365 bp, Homo sapiens
  source 1..1365: mol_type = unassigned DNA
cactgcttgagccgctgagagggtggcgacgtcggggccatggggctgggcccggtcttcctgcttctggctggcatcttcccttttgcacctccgggagctgctgctgagccccacagtcttcgttataacctcacggtgctgtcctgggatggatctgtgcagtcagggtttctcactgaggtacatctggatggtcagcccttcctgcgctgtgacaggcagaaatgcagggcaaagccccagggacagtgggcagaagatgtcctgggaaataagacatgggacagagagaccagagacttgacagggaacggaaaggacctcaggatgaccctggctcatatcaaggaccagaaagaaggcttgcattccctccaggagattagggtctgtgagatccatgaagacaacagcaccaggagctcccagcatttctactacgatggggagctcttcctctcccaaaacctggagactaaggaatggacaatgccccagtcctccagagctcagaccttggccatgaacgtcaggaatttcttgaaggaagatgccatgaagaccaagacacactatcacgctatgcatgcagactgcctgcaggaactacggcgatatctaaaatccggcgtagtcctgaggagaacagtgccccccatggtgaatgtcacccgcagcgaggcctcagagggcaacattaccgtgacatgcagggcttctggcttctatccctggaatatcacactgagctggcgtcaggatggggtatctttgagccacgacacccagcagtggggggatgtcctgcctgatgggaatggaacctaccagacctgggtggccaccaggatttgccaaggagaggagcagaggttcacctgctacatggaacacagcgggaatcacagcactcaccctgtgccctctgggaaagtgctggtgcttcagagtcattggcagacattccatgtttctgctgttgctgctgctgctatttttgttattattattttctatgtccgttgttgtaagaagaaaacatcagctgcagagggtccagagctcgtgagcctgcaggtcctggatcaacacccagttgggacgagtgaccacagggatgccacacagctcggatttcagcctctgatgtcagatcttgggtccactggctccactgagggcgcctagactctacagccaggcagctgggattcaattccctgcctggatctcacgagcactttccctcttggtgcctcagtttcctgacctatgaaacagagaaaataaaagcacttatttattgttgttggaggctgcaaaatgttagtagatatgaggcgtttgcagctgtaccatatt

SEQ ID NO: 17999 - DNA, 1369 bp, Homo sapiens; identical to SEQ ID NO: 17997
  source 1..1369: mol_type = unassigned DNA

SEQ ID NO: 18000 - DNA, 1369 bp, Homo sapiens
  source 1..1369: mol_type = unassigned DNA
cactgcttgagccgctgagagggtggcgacgtcggggccatggggctgggcccggtcttcctgcttctggctggcatcttcccttttgcacctccgggagctgctgctgagccccacagtcttcgttataacctcacggtgctgtcctgggatggatctgtgcagtcagggtttcttgctgaggtacatctggatggtcagcccttcctgcgctatgacaggcagaaatgcagggcaaagccccagggacagtgggcagaagatgtcctgggaaataagacatgggacagagagaccagggacttgacagggaacggaaaggacctcaggatgaccctggctcatatcaaggaccagaaagaaggcttgcattccctccaggagattagggtctgtgagatccatgaagacaacagcaccaggagctcccagcatttctactacgatggggagctcttcctctcccaaaacgtggagactgaggaatggacagtgccccagtcctccagagctcagaccttggccatgaacgtcaggaatttcttgaaggaagatgccatgaagaccaagacacactatcacgctatgcatgcagactgcctgcaggaactacggcgatatctagaatccagcgtagtcctgaggagaagagtgccccccatggtgaatgtcacccgcagcgaggcctcagagggcaacatcaccgtgacatgcagggcttccagcttctatccccggaatatcacactgacctggcgtcaggatggggtatctttgagccacgacacccagcagtggggggatgtcctgcctgatgggaatggaacctaccagacctgggtggccaccaggatttgccaaggagaggagcagaggttcacctgctacatggaacacagcgggaatcacagcactcaccctgtgccctctgggaaagtgctggtgcttcagagtcattggcagacattccatgtttctgctgttgctgcttgctgctgctatttttgttattattattttctatgtccgttgttgtaagaagaaaacatcagctgcagagggtccagagctcgtgagcctgcaggtcctggatcaacacccagttgggacgagtgaccacagggatgccacacagctcggatttcagcctctgatgtcagctcttgggtccactggctccactgagggcgcctagactctacagccaggcggctggaattgaattccctgcctggatctcacaagcactttccctcttggtgcctcagtttcctgacctatgaaacagagaaaataaaagcacttatttattgttgttggaggctgcaaaatgttagtagatatgaggcatttgcagctgtgccatatt

SEQ ID NO: 18001 - DNA, 2446 bp, Homo sapiens
  source 1..2446: mol_type = unassigned DNA
aaatttcgacggggtcttctcacgggtttcattcagttggccactgctgagcagctgagaaggtggcgacgtaggggccatggggctgggccgggtcctgctgtttctggccgtcgccttcccttttgcacccccggcagccgccgctgagccccacagtcttcgttacaacctcatggtgctgtcccaggatggatctgtgcagtcagggtttctcgctgagggacatctggatggtcagcccttcctgcgctatgacaggcagaaacgcagggcaaagccccagggacagtgggcagaaaatgtcctgggagctaagacctgggacacagagaccgaggacttgacagagaatgggcaagacctcaggaggaccctgactcatatcaaggaccagaaaggaggcttgcattccctccaggagattagggtctgtgagatccatgaagacagcagcaccaggggctcccggcatttctactacgatggggagctcttcctctcccaaaacctggagactcaagaatcgacagtgccccagtcctccagagctcagaccttggctatgaacgtcacaaatttctggaaggaagatgccatgaagaccaagacacactatcgcgctatgcaggcagactgcctgcagaaactacagcgatatctgaaatccggggtggccatcaggagaacagtgccccccatggtgaatgtcacctgcagcgaggtctcagagggcaacatcaccgtgacatgcagggcttccagcttctatccccggaatatcacactgacctggcgtcaggatggggtatctttgagccacaacacccagcagtggggggatgtcctgcctgatgggaatggaacctaccagacctgggtggccaccaggattcgccaaggagaggagcagaggttcacctgctacatggaacacagcgggaatcacggcactcaccctgtgccctctgggaaggcgctggtgcttcagagtcaacggacagactttccatatgtttctgctgctatgccatgttttgttattattattattctctgtgtcccttgttgcaagaagaaaacatcagcggcagagggtccagagcttgtgagcctgcaggtcctggatcaacacccagttgggacaggagaccacagggatgcagcacagctgggatttcagcctctgatgtcagctactgggtccactggttccactgagggcacctagactctacagccaggcggccaggattcaactccctgcctggatctcaccagcactttccctctgtttcctgacctatgaaacagagaaaataacatcacttatttattgttgttggatgctgcaaagtgttagtaggtatgaggtgtttgctgctctgccacgtagagagccagcaaagggatcatgaccaactcaacattccattggaggctatatgatcaaacagcaaattgtttatcatgaatgcaggatgtgggcaaactcacgactgctcctgccaacagaaggtttgctgagggcattcactccatggtgctcattggagttatctactgggtcatctagagcctattgtttgaggaatgcagtcttacaagcctactctggacccagcagctgactccttcttccacccctcttcttgctatctcctataccaataaatacgaagggctgtggaagatcagagcccttgttcacgagaagcaagaagccccctgaccccttgttccaaatatactcttttgtctttctctttattcccacgttcgccctttgttcagtccaatacagggttgtggggcccttaacagtgccatattaattggtatcattatttctgttgtttttgtttttgtttttgtttttgtttttgagacagagtctcactctgtcacccaggctgcagttcactggtgtgatctcagctcactgcaacctctgcctcccaggttcaagcacttctcgtacctcagactcccgaatagctgggattacagacaggcaccaccacacccagctaatttttgtattttttgtagagacggggtttcgccaagttgaccagcccagtttcaaactcctgacctcaggtgatctgcctgccttggcatcccaaagtgctgggattacaagaatgagccaccgtgcctggcctattttattatattgtaatatattttattatattagccaccatgcctgtcctattttcttatgttttaatatattttaatatattacatgtgcagtaattagattatcatgggtgaactttatgagtgagtatcttggtgatgactcctcctgaccagcccaggaccagctttcttgtcaccttgaggtcccctcgccccgtcacaccgttatgcattactctgtgtctactattatgtgtgcataatttataccgtaaatgtttactctttaaataga

SEQ ID NO: 18002 - DNA, 2446 bp, Homo sapiens
  source 1..2446: mol_type = unassigned DNA
aaatttccacggggtcttctcaccgttttcattcagttggccactgctgagcagctgagaaggtggcgacgtaggggccatggggctgggccgggtcctgctgtttctggccgtcgccttcccttttgcacccccggcagccgccgctgagccccacagtcttcgttacaacctcatggtgctgtcccaggatggatctgtgcagtcagggtttctcgctgagggacatctggatggtcagcccttcctgcgctatgacaggcagaaacgcagggcaaagccccagggacagtgggcagaagatgtcctgggagctaagacctgggacacagagaccgaggacttgacagagaatgggcaagacctcaggaggaccctgactcatatcaaggaccagaaaggaggcttgcattccctccaggagattagggtctgtgagatccatgaagacagcagcaccaggggctcccggcatttctactacgatggggagctcttcctctcccaaaacctggagactcaagaatcgacagtgccccagtcctccagagctcagaccttggctatgaacgtcacaaatttctggaaggaagatgccatgaagaccaagacacactatcgcgctatgcaggcagactgcctgcagaaactacagcgatatctgaaatccggggtggccatcaggagaacagtgccccccatggtgaatgtcatctgcagcgaggtctcagagggcaacatcaccgtgacatgcagggcttccagcttctatccccggaatatcacactgacctggcgtcaggatggggtatctttgagccacaacacccagcagtggggggatgtcctgcctgatgggaatggaacctaccagacctgggtggccaccaggattcgccaaggagaggagcagaggttcacctgctacatggaacacagcgggaatcacggcactcaccctgtgccctctgggaaggcgctggtgcttcagagtcaacggacagactttccatatgtttctgctgctatgccatgttttgttattattattattctctgtgtcccttgttgcaagaagaaaacatcagcggcagagggtccagagcttgtgagcctgcaggtcctggatcaacacccagttgggacaggagaccacagggatgcagcacagctgggatttcagcctctgatgtcagctactgggtccactggttccactgagggcacctagactctacagccaggcggccaggattcaactccctgcctggatctcaccagcactttccctctgtttcctgacctatgaaacagagaaaataacatcacttatttattgttgttggatgctgcaaagtgttagtaggtatgaggtgtttgctgctctgccacgtagagagccagcaaagggatcatgaccaactcaacattccattggaggctatatgatcaaacagcaaattgtttatcatgaatgcaggatgtgggcaaactcacgactgctcctgccaacagaaggtttgctgagggcattcactccatggtgctcattggagttatctactgggtcatctagagcctattgtttgaggaatgcagtcttacaagcctactctggacccagcagctgactccttcttccacccctcttcttgctatctcctataccaataaatacgaagggctgtggaagatcagagcccttgttcacgagaagcaagaagccccctgaccccttgttccaaatatactcttttgtctttctctttattcccacgttcgccctttgttcagtccaatacagggttgtggggcccttaacagtgccatattaattggtatcattatttctgttgtttttgtttttgtttttgtttttgtttttgagacagagtctcactctgtcacccaggctgcagttcactggtgtgatctcagctcactgcaacctctgcctcccaggttcaagcacttctcgtacctcagactcccgaatagctgggattacagacaggcaccaccacacccagctaatttttgtattttttgtagagacggggtttcgccaagttgaccagcccagtttcaaactcctgacctcaggtgatctgcctgccttggcatcccaaagtgctgggattacaagaatgagccaccgtgcctggcctattttattatattgtaatatattttattatattagccaccatgcctgtcctattttcttatgttttaatatattttaatatattacatgtgcagtaattagattatcatgggtgaactttatgagtgagtatcttggtgatgactcctcctgaccagcccaggaccagctttcttgtcaccttgaggtcccctcgccccgtcacaccgttatgcattactctgtgtctactattatgtgtgcataatttataccgtaaatgtttactctttaaataga

SEQ ID NO: 18003 - DNA, 2346 bp, Homo sapiens
  source 1..2346: mol_type = unassigned DNA
agcggtcgctgagcggggcgcaggtgactaaatttcgacggggtcttctcacgggtttcattcagttggccactgctgagcagctgagaaggtggcgacgtaggggccatggggctgggccgggtcctgctgtttctggccgtcgccttcccttttgcacccccggcagccgccgctgagccccacagtcttcgttacaacctcatggtgctgtcccaggatggatctgtgcagtcagggtttctcgctgagggacatctggatggtcagcccttcctgcgctatgacaggcagaaacgcagggcaaagccccagggacagtgggcagaaaatgtcctgggagctaagacctgggacacagagaccgaggacttgacagagaatgggcaagacctcaggaggaccctgactcatatcaaggaccagaaaggagtgccccagtcctccagagctcagaccttggctatgaacgtcacaaatttctggaaggaagatgccatgaagaccaagacacactatcgcgctatgcaggcagactgcctgcagaaactacagcgatatctgaaatccggggtggccatcaggagaacagtgccccccatggtgaatgtcacctgcagcgaggtctcagagggcaacatcaccgtgacatgcagggcttccagcttctatccccggaatatcacactgacctggcgtcaggatggggtatctttgagccacaacacccagcagtggggggatgtcctgcctgatgggaatggaacctaccagacctgggtggccaccaggattcgccaaggagaggagcagaggttcacctgctacatggaacacagcgggaatcacggcactcaccctgtgccctctgggaaggcgctggtgcttcagagtcaacggacagactttccatatgtttctgctgctatgccatgttttgttattattattattctctgtgtcccttgttgcaagaagaaaacatcagcggcagagggtccagagcttgtgagcctgcaggtcctggatcaacacccagttgggacaggagaccacagggatgcagcacagctgggatttcagcctctgatgtcagctactgggtccactggttccactgagggcacctagactctacagccaggcggccaggattcaactccctgcctggatctcaccagcactttccctctgtttcctgacctatgaaacagagaaaataacatcacttatttattgttgttggatgctgcaaagtgttagtaggtatgaggtgtttgctgctctgccacgtagagagccagcaaagggatcatgaccaactcaacattccattggaggctatatgatcaaacagcaaattgtttatcatgaatgcaggatgtgggcaaactcacgactgctcctgccaacagaaggtttgctgagggcattcactccatggtgctcattggagttatctactgggtcatctagagcctattgtttgaggaatgcagtcttacaagcctactctggacccagcagctgactccttcttccacccctcttcttgctatctcctataccaataaatacgaagggctgtggaagatcagagcccttgttcacgagaagcaagaagccccctgaccccttgttccaaatatactcttttgtctttctctttattcccacgttcgccctttgttcagtccaatacagggttgtggggcccttaacagtgccatattaattggtatcattatttctgttgtttttgtttttgtttttgtttttgtttttgagacagagtctcactctgtcacccaggctgcagttcactggtgtgatctcagctcactgcaacctctgcctcccaggttcaagcacttctcgtacctcagactcccgaatagctgggattacagacaggcaccaccacacccagctaatttttgtattttttgtagagacggggtttcgccaagttgaccagcccagtttcaaactcctgacctcaggtgatctgcctgccttggcatcccaaagtgctgggattacaagaatgagccaccgtgcctggcctattttattatattgtaatatattttattatattagccaccatgcctgtcctattttcttatgttttaatatattttaatatattacatgtgcagtaattagattatcatgggtgaactttatgagtgagtatcttggtgatgactcctcctgaccagcccaggaccagctttcttgtcaccttgaggtcccctcgccccgtcacaccgttatgcattactctgtgtctactattatgtgtgcataatttataccgtaaatgtttactctttaaataga

SEQ ID NO: 18004 - DNA, 2338 bp, Homo sapiens
  source 1..2338: mol_type = unassigned DNA
agcggtcgctgagcggggcgcaggtgactaaatttcgacggggtcttctcaccggtttcattcagttggccactgctgagcagctgagaaggtggcgacgtaggggccatggggctgggccgggtcctgctgtttctggccgtcgccttcccttttgcacccccggcagccgccgctgagccccacagtcttcgttacaacctcatggtgctgtcccaggatggatctgtgcagtcagggtttctcgctgagggacatctggatggtcagcccttcctgcgctatgacaggcagaaacgcagggcaaagccccagggacagtgggcagaagatgtcctgggagctaagacctgggacacagagaccgaggacttgacagagaatgggcaagacctcaggaggaccctgactcatatcaaggaccagaaaggagtgccccagtcctccagagctcagaccttggctatgaacgtcacaaatttctggaaggaagatgccatgaagaccaagacacactatcgcgctatgcaggcagactgcctgcagaaactacagcgatatctgaaatccggggtggccatcaggagaacagtgccccccatggtgaatgtcacctgcagcgaggtctcagagggcaacatcaccgtgacatgcagggcttccagcttctatccccggaatatcacactgacctggcgtcaggatggggtatctttgagccacaacacccagcagtggggggatgtcctgcctgatgggaatggaacctaccagacctgggtggccaccaggattcgccaaggagaggagcagaggttcacctgctacatggaacacagcgggaatcacggcactcaccctgtgccctctgggaaggcgctggtgcttcagagtcaacggacagactttccatatgtttctgctgctatgccatgttttgttattattattattctctgtgtcccttgttgcaagaagaaaacatcagcggcagagggtccagagcttgtgagcctgcaggtcctggatcaacacccagttgggacaggagaccacagggatgcagcacagctgggatttcagcctctgatgtcagctactgggtccactggttccactgagggcgcctagactctacagccaggcggccaggattcaactccctgcctggatctcaccagcactttccctctgtttcctgacctatgaaacagaaaataacatcacttatttattgttgttggatgctgcaaagtgttagtaggtatgaggtgtttgctgctctgccacgtagagagccagcaaagggatcatgaccaactcaacattccattggaggctatatgatcaaacagcaaattgtttatcatgaatgcaggatgtgggcaaactcacgactgctcctgccaacagaaggtttgctgagggcattcactccatggtgctcattggagttatctactgggtcatctagagcctattgtttgaggaatgcagtcttacaagcctactctggacccagcagctgactccttcttccacccctcttcttgctatctcctataccaataaatacgaagggctgtggaagatcagagcccttgttcacgagaagcaagaagccccctgaccccttgttccaaatatactcttttgtctttctctttattcccacgttcgccctttgttcagtccaatacagggttgtggggcccttaacagtgccatattaattggtatcattatttctgttgtttttgtttttgtttttgtttttgagacagagtctcactctgtcacccaggctgcagttcactggtgtgatctcagctcactgcaacctctgcctcccaggttcaagcacttctcgtacctcagactcccgaatagctgggattacagacaggcaccaccacacccagctaatttttgtattttttgtagagacgggatttcgccaagttgaccagcccagtttcaaactcctgacctcaggtgatctgcctgccttggcatcccaaagtgctgggattacaagaatgagccaccgtgcctggcctattttattatattgtaatatattttattatattagccaccatgcctgtcctattttcttatgttttaatatattttaatatattacatgtgcagtaattagattatcatgggtgaactttatgagtgagtatcttggtgatgactcctcctgaccagcccaggaccagctttcttgtcaccttgaggtcccctcgccccgtcacaccgttatgcattactctgtgtctactattatgtgtgcataatttataccgtaaatgtttactctttaaataga

SEQ ID NO: 18005 - DNA, 175 bp, Homo sapiens
  source 1..175: mol_type = unassigned DNA
attcagttggccactgctgagcagctgagaaggtggcgacgtaggggccatggggctgggccgggtcctgctgtttctggccgtcgccttcccttttgcacccccggcagccgccgctgtagagatggggtttcaccgtgttagtcaggatggtctcgatctcctgacctcgtga

SEQ ID NO: 18006 - DNA, 2295 bp, Homo sapiens
  source 1..2295: mol_type = unassigned DNA
agccccacagtcttcgttacaacctcatggtgctgtcccaggatggatctgtgcagtcagggtttctcgctgagggacatctggatggtcagcccttcctgcgctatgacaggcagaaacgcagggcaaagccccagggacagtgggcagaagatgtcctgggagctaagacctgggacacagagaccgaggacttgacagagaatgggcaagacctcaggaggaccctgactcatatcaaggaccagaaaggaggcttgcattccctccaggagattagggtctgtgagatccatgaagacagcagcaccaggggctcccggcatttctactacgatggggagctcttcctctcccaaaacctggagactcaagaatcgacagtgccccagtcctccagagctcagaccttggctatgaacgtcacaaatttctggaaggaagatgccatgaagaccaagacacactatcgcgctatgcaggcagactgcctgcagaaactacagcgatatctgaaatccggggtggccatcaggagaacagtgccccccatggtgaatgtcacctgcagcgaggtctcagagggcaacatcaccgtgacatgcagggcttccagcttctatccccggaatatcacactgacctggcgtcaggatggggtatctttgagccacaacacccagcagtggggggatgtcctgcctgatgggaatggaacctaccagacctgggtggccaccaggattcgccaaggagaggagcagaggttcacctgctacatggaacacagcgggaatcacggcactcaccctgtgccctctgggaaggcgctggtgcttcagagtcaacggacagactttccatatgtttctgctgctatgccatgttttgttattattattattctctgtgtcccttgttgcaagaagaaaacatcagcggcagagggtccagagcttgtgagcctgcaggtcctggatcaacacccagttgggacaggagaccacagggatgcagcacagctgggatttcagcctctgatgtcagctactgggtccactggttccactgagggcgcctagactctacagccaggcggccaggattcaactccctgcctggatctcaccagcactttccctctgtttcctgacctatgaaacagaaaataacatcacttatttattgttgttggatgctgcaaagtgttagtaggtatgaggtgtttgctgctctgccacgtagagagccagcaaagggatcatgaccaactcaacattccattggaggctatatgatcaaacagcaaattgtttatcatgaatgcaggatgtgggcaaactcacgactgctcctgccaacagaaggtttgctgagggcattcactccatggtgctcattggagttatctactgggtcatctagagcctattgtttgaggaatgcagtcttacaagcctactctggacccagcagctgactccttcttccacccctcttcttgctatctcctataccaataaatacgaagggctgtggaagatcagagcccttgttcacgagaagcaagaagccccctgaccccttgttccaaatatactcttttgtctttctctttattcccacgttcgccctttgttcagtccaatacagggttgtggggcccttaacagtgccatattaattggtatcattatttctgttgtttttgtttttgtttttgtttttgtttttgagacagagtctcactctgtcacccaggctgcagttcactggtgtgatctcagctcactgcaacctctgcctcccaggttcaagcacttctcgtacctcagactcccgaatagctgggattacagacaggcaccaccacacccagctaatttttgtattttttgtagagacggggtttcgccaagttgaccagcccagtttcaaactcctgacctcaggtgatctgcctgccttggcatcccaaagtgctgggattacaagaatgagccaccgtgcctggcctattttattatattgtaatatattttattatattagccaccatgcctgtcctattttcttatgttttaatatattttaatatattacatgtgcagtaattagattatcatgggtgaactttatgagtgagtatcttggtgatgactcctcctgaccagcccaggaccagctttcttgtcaccttgaggtcccctcgccccgtcacaccgttatgcattactctgtgtctactattatgtgtgcataatttataccgtaaatgtttactctttaaataga

SEQ ID NO: 18007 - DNA, 2438 bp, Homo sapiens
  source 1..2438: mol_type = unassigned DNA
aaatttcgacggggtcttctcaccggtttcattcagttggccactgctgagcagctgagaaggtggcgacgtaggggccatggggctgggccgggtcctgctgtttctggccgtcgccttcccttttgcacccccggcagccgccgctgagccccacagtcttcgttacaacctcatggtgctgtcccaggatggatctgtgcagtcagggtttctcgctgagggacatctggatggtcagcccttcctgcgctatgacaggcagaaacgcagggcaaagccccagggacagtgggcagaagatgtcctgggagctaagacctgggacacagagaccgaggacttgacagagaatgggcaagacctcaggaggaccctgactcatatcaaggaccagaaaggaggcttgcattccctccaggagattagggtctgtgagatccatgaagacagcagcaccaggggctcccggcatttctactacgatggggagctcttcctctcccaaaacctggagactcaagaatcgacagtgccccagtcctccagagctcagaccttggctatgaacgtcacaaatttctggaaggaagatgccatgaagaccaagacacactatcgcgctatgcaggcagactgcctgcagaaactacagcgatatctgaaatccggggtggccatcaggagaacagtgccccccatggtgaatgtcacctgcagcgaggtctcagagggcaacatcaccgtgacatgcagggcttccagcttctatccccggaatatcacactgacctggcgtcaggatggggtatctttgagccacaacacccagcagtggggggatgtcctgcctgatgggaatggaacctaccagacctgggtggccaccaggattcgccaaggagaggagcagaggttcacctgctacatggaacacagcgggaatcacggcactcaccctgtgccctctgggaaggcgctggtgcttcagagtcaacggacagactttccatatgtttctgctgctatgccatgttttgttattattattattctctgtgtcccttgttgcaagaagaaaacatcagcggcagagggtccagagcttgtgagcctgcaggtcctggatcaacacccagttgggacaggagaccacagggatgcagcacagctgggatttcagcctctgatgtcagctactgggtccactggttccactgagggcgcctagactctacagccaggcggccaggattcaactccctgcctggatctcaccagcactttccctctgtttcctgacctatgaaacagaaaataacatcacttatttattgttgttggatgctgcaaagtgttagtaggtatgaggtgtttgctgctctgccacgtagagagccagcaaagggatcatgaccaactcaacattccattggaggctatatgatcaaacagcaaattgtttatcatgaatgcaggatgtgggcaaactcacgactgctcctgccaacagaaggtttgctgagggcattcactccatggtgctcattggagttatctactgggtcatctagagcctattgtttgaggaatgcagtcttacaagcctactctggacccagcagctgactccttcttccacccctcttcttgctatctcctataccaataaatacgaagggctgtggaagatcagagcccttgttcacgagaagcaagaagccccctgaccccttgttccaaatatactcttttgtctttctctttattcccacgttcgccctttgttcagtccaatacagggttgtggggcccttaacagtgccatattaattggtatcattatttctgttgtttttgtttttgtttttgtttttgagacagagtctcactctgtcacccaggctgcagttcactggtgtgatctcagctcactgcaacctctgcctcccaggttcaagcacttctcgtacctcagactcccgaatagctgggattacagacaggcaccaccacacccagctaatttttgtattttttgtagagacgggatttcgccaagttgaccagcccagtttcaaactcctgacctcaggtgatctgcctgccttggcatcccaaagtgctgggattacaagaatgagccaccgtgcctggcctattttattatattgtaatatattttattatattagccaccatgcctgtcctattttcttatgttttaatatattttaatatattacatgtgcagtaattagattatcatgggtgaactttatgagtgagtatcttggtgatgactcctcctgaccagcccaggaccagctttcttgtcaccttgaggtcccctcgccccgtcacaccgttatgcattactctgtgtctactattatgtgtgcataatttataccgtaaatgtttactctttaaataga

SEQ ID NO: 18008 - DNA, 2344 bp, Homo sapiens
  source 1..2344: mol_type = unassigned DNA
agcggtcgctgagcggggcgcaggtgactaaatttcgacggggtcttctcaccggtttcattcagttggccactgctgagcagctgagaaggtggcgacgtaggggccatggggctgggccgggtcctgctgtttctggccgtcgccttcccttttgcacccccggcagccgccgctgagccccacagtcttcgttacaacctcatggtgctgtcccaggatggatctgtgcagtcagggtttctcgctgagggacatctggatggtcagcccttcctgcgctatgacaggcagaaacgcagggcaaagccccagggacagtgggcagaagatgtcctgggagctgagacctgggacacagagaccgaggacttgacagagaatgggcaagacctcaggaggaccctgactcatatcaaggaccagaaaggagtgccccagtcctccagagctcagaccttggctatgaacgtcacaaatttctggaaggaagatgccatgaagaccaagacacactatcgcgctatgcaggcagactgcctgcagaaactacagcgatatctgaaatccggggtggccatcaggagaacagtgccccccatggtgaatgtcacctgcagcgaggtctcagagggcaacatcaccgtgacatgcagggcttccagcttctatccccggaatatcacactgacctggcgtcaggatggggtatctttgagccacaacacccagcagtggggggatgtcctgcctgatgggaatggaacctaccagacctgggtggccaccaggattcgccaaggagaggagcagaggttcacctgctacatggaacacagcgggaatcacggcactcaccctgtgccctctgggaaggcgctggtgcttcagagtcaacggacagactttccatatgtttctgctgctatgccatgttttgttattattattattctctgtgtcccttgttgcaagaagaaaacatcagcggcagagggtccagagcttgtgagcctgcaggtcctggatcaacacccagttgggacaggagaccacagggatgcagcacagctgggatttcagcctctgatgtcagctactgggtccactggttccactgagggcgcctagactctacagccaggcggccaggattcaactccctgcctggatctcaccagcactttccctctgtttcctgacctatgaaacagaaaataacatcacttatttattgttgttggatgctgcaaagtgttagtaggtatgaggtgtttgctgctctgccacgtagagagccagcaaagggatcatgaccaactcaacattccattggaggctatatgatcaaacagcaaattgtttatcatgaatgcaggatgtgggcaaactcacgactgctcctgccaacagaaggtttgctgagggcattcactccatggtgctcattggagttatctactgggtcatctagagcctattgtttgaggaatgcagtcttacaagcctactctggacccagcagctgactccttcttccacccctcttcttgctatctcctataccaataaatacgaagggctgtggaagatcagagcccttgttcacgagaagcaagaagccccctgaccccttgttccaaatatactcttttgtctttctctttattcccacgttcgccctttgttcagtccaatacagggttgtggggcccttaacagtgccatattaattggtatcattatttctgttgtttttgtttttgtttttgtttttgtttttgagacagagtctcactctgtcacccaggctgcagttcactggtgtgatctcagctcactgcaacctctgcctcccaggttcaagcacttctcgtacctcagactcccgaatagctgggattacagacaggcaccaccacacccagctaatttttgtattttttgtagagacggggtttcgccaagttgaccagcccagtttcaaactcctgacctcaggtgatctgcctgccttggcatcccaaagtgctgggattacaagaatgagccaccgtgcctggcctattttattatattgtaatatattttattatattagccaccatgcctgtcctattttcttatgttttaatatattttaatatattacatgtgcagtaattagattatcatgggtgaactttatgagtgagtatcttggtgatgactcctcctgaccagcccaggaccagctttcttgtcaccttgaggtcccctcgccccgtcacaccgttatgcattactctgtgtctactattatgtgtgcataatttataccgtaaatgtttactctttaaataga

SEQ ID NO: 18009 - DNA, 2444 bp, Homo sapiens
  source 1..2444: mol_type = unassigned DNA
aaatttcgacggggtcttctcaccggtttcattcagttggccactgctgagcagctgagaaggtggcgacgtaggggccatggggctgggccgggtcctgctgtttctggccgtcgccttcccttttgcacccccggcagccgccgctgagccccacagtcttcgttacaacctcatggtgctgtcccaggatggatctgtgcagtcagggtttctcgctgagggacatctggatggtcagcccttcctgcgctatgacaggcagaaacgcagggcaaagccccagggacagtgggcagaagatgtcctgggagctgagacctgggacacagagaccgaggacttgacagagaatgggcaagacctcaggaggaccctgactcatatcaaggaccagaaaggaggcttgcattccctccaggagattagggtctgtgagatccatgaagacagcagcaccaggggctcccggcatttctactacaatggggagctcttcctctcccaaaacctggagactcaagaatcgacagtgccccagtcctccagagctcagaccttggctatgaacgtcacaaatttctggaaggaagatgccatgaagaccaagacacactatcgcgctatgcaggcagactgcctgcagaaactacagcgatatctgaaatccggggtggccatcaggagaacagtgccccccatggtgaatgtcacctgcagcgaggtctcagagggcaacatcaccgtgacatgcagggcttccagcttctatccccggaatatcacactgacctggcgtcaggatggggtatctttgagccacaacacccagcagtggggggatgtcctgcctgatgggaatggaacctaccagacctgggtggccaccaggattcgccaaggagaggagcagaggttcacctgctacatggaacacagcgggaatcacggcactcaccctgtgccctctgggaaggcgctggtgcttcagagtcaacggacagactttccatatgtttctgctgctatgccatgttttgttattattattattctctgtgtcccttgttgcaagaagaaaacatcagcggcagagggtccagagcttgtgagcctgcaggtcctggatcaacacccagttgggacaggagaccacagggatgcagcacagctgggatttcagcctctgatgtcagctactgggtccactggttccactgagggcgcctagactctacagccaggcggccaggattcaactccctgcctggatctcaccagcactttccctctgtttcctgacctatgaaacagaaaataacatcacttatttattgttgttggatgctgcaaagtgttagtaggtatgaggtgtttgctgctctgccacgtagagagccagcaaagggatcatgaccaactcaacattccattggaggctatatgatcaaacagcaaattgtttatcatgaatgcaggatgtgggcaaactcacgactgctcctgccaacagaaggtttgctgagggcattcactccatggtgctcattggagttatctactgggtcatctagagcctattgtttgaggaatgcagtcttacaagcctactctggacccagcagctgactccttcttccacccctcttcttgctatctcctataccaataaatacgaagggctgtggaagatcagagcccttgttcacgagaagcaagaagccccctgaccccttgttccaaatatactcttttgtctttctctttattcccacgttcgccctttgttcagtccaatacagggttgtggggcccttaacagtgccatattaattggtatcattatttctgttgtttttgtttttgtttttgtttttgtttttgagacagagtctcactctgtcacccaggctgcagttcactggtgtgatctcagctcactgcaacctctgcctcccaggttcaagcacttctcgtacctcagactcccgaatagctgggattacagacaggcaccaccacacccagctaatttttgtattttttgtagagacggggtttcgccaagttgaccagcccagtttcaaactcctgacctcaggtgatctgcctgccttggcatcccaaagtgctgggattacaagaatgagccaccgtgcctggcctattttattatattgtaatatattttattatattagccaccatgcctgtcctattttcttatgttttaatatattttaatatattacatgtgcagtaattagattatcatgggtgaactttatgagtgagtatcttggtgatgactcctcctgaccagcccaggaccagctttcttgtcaccttgaggtcccctcgccccgtcacaccgttatgcattactctgtgtctactattatgtgtgcataatttataccgtaaatgtttactctttaaataga

SEQ ID NO: 18010 - DNA, 2346 bp, Homo sapiens
  source 1..2346: mol_type = unassigned DNA
agcggtcgctgagcggggcgcaggtgactaaatttccacggggtcttctcaccgttttcattcagttggccactgctgagcagctgagaaggtggcgacgtaggggccatggggctgggccgggtcctgctgtttctggccgtcgccttcccttttgcacccccggcagccgccgctgagccccacagtcttcgttacaacctcatggtgctgtcccaggatggatctgtgcagtcagggtttctcgctgagggacatctggatggtcagcccttcctgcgctatgacaggcagaaacgcagggcaaagccccagggacagtgggcagaagatgtcctgggagctaagacctgggacacagagaccgaggacttgacagagaatgggcaagacctcaggaggaccctgactcatatcaaggaccagaaaggagtgccccagtcctccagagctcagaccttggctatgaacgtcacaaatttctggaaggaagatgccatgaagaccaagacacactatcgcgctatgcaggcagactgcctgcagaaactacagcgatatctgaaatccggggtggccatcaggagaacagtgccccccatggtgaatgtcatctgcagcgaggtctcagagggcaacatcaccgtgacatgcagggcttccagcttctatccccggaatatcacactgacctggcgtcaggatggggtatctttgagccacaacacccagcagtggggggatgtcctgcctgatgggaatggaacctaccagacctgggtggccaccaggattcgccaaggagaggagcagaggttcacctgctacatggaacacagcgggaatcacggcactcaccctgtgccctctgggaaggcgctggtgcttcagagtcaacggacagactttccatatgtttctgctgctatgccatgttttgttattattattattctctgtgtcccttgttgcaagaagaaaacatcagcggcagagggtccagagcttgtgagcctgcaggtcctggatcaacacccagttgggacaggagaccacagggatgcagcacagctgggatttcagcctctgatgtcagctactgggtccactggttccactgagggcacctagactctacagccaggcggccaggattcaactccctgcctggatctcaccagcactttccctctgtttcctgacctatgaaacagagaaaataacatcacttatttattgttgttggatgctgcaaagtgttagtaggtatgaggtgtttgctgctctgccacgtagagagccagcaaagggatcatgaccaactcaacattccattggaggctatatgatcaaacagcaaattgtttatcatgaatgcaggatgtgggcaaactcacgactgctcctgccaacagaaggtttgctgagggcattcactccatggtgctcattggagttatctactgggtcatctagagcctattgtttgaggaatgcagtcttacaagcctactctggacccagcagctgactccttcttccacccctcttcttgctatctcctataccaataaatacgaagggctgtggaagatcagagcccttgttcacgagaagcaagaagccccctgaccccttgttccaaatatactcttttgtctttctctttattcccacgttcgccctttgttcagtccaatacagggttgtggggcccttaacagtgccatattaattggtatcattatttctgttgtttttgtttttgtttttgtttttgtttttgagacagagtctcactctgtcacccaggctgcagttcactggtgtgatctcagctcactgcaacctctgcctcccaggttcaagcacttctcgtacctcagactcccgaatagctgggattacagacaggcaccaccacacccagctaatttttgtattttttgtagagacggggtttcgccaagttgaccagcccagtttcaaactcctgacctcaggtgatctgcctgccttggcatcccaaagtgctgggattacaagaatgagccaccgtgcctggcctattttattatattgtaatatattttattatattagccaccatgcctgtcctattttcttatgttttaatatattttaatatattacatgtgcagtaattagattatcatgggtgaactttatgagtgagtatcttggtgatgactcctcctgaccagcccaggaccagctttcttgtcaccttgaggtcccctcgccccgtcacaccgttatgcattactctgtgtctactattatgtgtgcataatttataccgtaaatgtttactctttaaataga

SEQ ID NO: 18011 - DNA, 2344 bp, Homo sapiens; identical to SEQ ID NO: 18008
  source 1..2344: mol_type = unassigned DNA

SEQ ID NO: 18012 - DNA, 2346 bp, Homo sapiens; identical to SEQ ID NO: 18003
  source 1..2346: mol_type = unassigned DNA

SEQ ID NO: 18013 - DNA, 2450 bp, Homo sapiens
  source 1..2450: mol_type = unassigned DNA
aaatttcgacggggtcttctcaccggtttcattcagttggccactgctgagcagctgagaaggtggcgacgtaggggccatggggctgggccgggtcctgctgtttctggccgtcgccttcccttttgcacccccggcagccgccgctgagccccacagtcttcgttacaacctcatggtgctgtcccaggatggatctgtgcagtcagggtttctcgctgagggacatctggatggtcagcccttcctgcgctatgacaggcagaaacgcagggcaaagccccagggacagtgggcagaagatgtcctgggagctaagacctgggacacagagaccgaggacttgacagagaatgggcaagacctcaggaggaccctgactcatatcaaggaccagaaaggaggcttgcattccctccaggagattagggtctgtgagatccatgaagacagcagcaccaggggctcccggcatttctactacgatggggagctcttcctctcccaaaacctggagactcaagaatcgacagtgccccagtcctccagagctcagaccttggctatgaacgtcacaaatttctggaaggaagatgccatgaagaccaagacacactatcgcgctatgcaggcagactgcctgcagaaactacagcgatatctgaaatccggggtggccatcaggagaacagtgccccccatggtgaatgtcacctgcagcgaggtctcagagggcaacatcaccgtgacatgcagggcttccagcttctatccccggaatatcacactgacctggcgtcaggatggggtatctttgagccacaacacccagcagtggggggatgtcctgcctgatgggaatggaacctaccagacctgggtggccaccaggattcgccaaggagaggagcagaggttcacctgctacatggaacacagcgggaatcacggcactcaccctgtgccctctgggaaggcgctggtgcttcagagtcaacggacagactttccatatgtttctgctgctatgccatgttttgttattattattattctctgtgtcccttgttgcaagaagaaaacatcagcggcagagggtccagagcttgtgagcctgcaggtcctggatcaacacccagttgggacaggagaccacagggatgcagcacagctgggatttcagcctctgatgtcagctactgggtccactggttccactgagggcgcctagactctacagccaggcggccaggattcaactccctgcctggatctcaccagcactttccctctgtttcctgacctatgaaacagaaaataacatcacttatttattgttgttggatgctgcaaagtgttagtaggtatgaggtgtttgctgctctgccacgtagagagccagcaaagggatcatgaccaactcaacattccattggaggctatatgatcaaacagcaaattgtttatcatgaatgcaggatgtgggcaaactcacgactgctcctgccaacagaaggtttgctgagggcattcactccatggtgctcattggagttatctactgggtcatctagagcctattgtttgaggaatgcagtcttacaagcctactctggacccagcagctgactccttcttccacccctcttcttgctatctcctataccaataaatacgaagggctgtggaagatcagagcccttgttcacgagaagcaagaagccccctgaccccttgttccaaatatactcttttgtctttctctttattcccacgttcgccctttgttcagtccaatacagggttgtggggcccttaacagtgccatattaattggtatcattatttctgttgtttttgtttttgtttttgtttttgtttttgtttttgagacagagtctcactctgtcacccaggctgcagttcactggtgtgatctcagctcactgcaacctctgcctcccaggttcaagcacttctcgtacctcagactcccgaatagctgggattacagacaggcaccaccacacccagctaatttttgtattttttgtagagacggggtttcgccaagttgaccagcccagtttcaaactcctgacctcaggtgatctgcctgccttggcatcccaaagtgctgggattacaagaatgagccaccgtgcctggcctattttattatattgtaatatattttattatattagccaccatgcctgtcctattttcttatgttttaatatattttaatatattacatgtgcagtaattagattatcatgggtgaactttatgagtgagtatcttggtgatgactcctcctgaccagcccaggaccagctttcttgtcaccttgaggtcccctcgccccgtcacaccgttatgcattactctgtgtctactattatgtgtgcataatttataccgtaaatgtttactctttaaataga

SEQ ID NO: 18014 - DNA, 2446 bp, Homo sapiens; identical to SEQ ID NO: 18001
  source 1..2446: mol_type = unassigned DNA

SEQ ID NO: 18015 - DNA, 2350 bp, Homo sapiens
  source 1..2350: mol_type = unassigned DNA
agcggtcgctgagcggggcgcaggtgactaaatttcgacggggtcttctcaccggtttcattcagttggccactgctgagcagctgagaaggtggcgacgtaggggccatggggctgggccgggtcctgctgtttctggccgtcgccttcccttttgcacccccggcagccgccgctgagccccacagtcttcgttacaacctcatggtgctgtcccaggatggatctgtgcagtcagggtttctcgctgagggacatctggatggtcagcccttcctgcgctatgacaggcagaaacgcagggcaaagccccagggacagtgggcagaagatgtcctgggagctaagacctgggacacagagaccgaggacttgacagagaatgggcaagacctcaggaggaccctgactcatatcaaggaccagaaaggagtgccccagtcctccagagctcagaccttggctatgaacgtcacaaatttctggaaggaagatgccatgaagaccaagacacactatcgcgctatgcaggcagactgcctgcagaaactacagcgatatctgaaatccggggtggccatcaggagaacagtgccccccatggtgaatgtcacctgcagcgaggtctcagagggcaacatcaccgtgacatgcagggcttccagcttctatccccggaatatcacactgacctggcgtcaggatggggtatctttgagccacaacacccagcagtggggggatgtcctgcctgatgggaatggaacctaccagacctgggtggccaccaggattcgccaaggagaggagcagaggttcacctgctacatggaacacagcgggaatcacggcactcaccctgtgccctctgggaaggcgctggtgcttcagagtcaacggacagactttccatatgtttctgctgctatgccatgttttgttattattattattctctgtgtcccttgttgcaagaagaaaacatcagcggcagagggtccagagcttgtgagcctgcaggtcctggatcaacacccagttgggacaggagaccacagggatgcagcacagctgggatttcagcctctgatgtcagctactgggtccactggttccactgagggcgcctagactctacagccaggcggccaggattcaactccctgcctggatctcaccagcactttccctctgtttcctgacctatgaaacagaaaataacatcacttatttattgttgttggatgctgcaaagtgttagtaggtatgaggtgtttgctgctctgccacgtagagagccagcaaagggatcatgaccaactcaacattccattggaggctatatgatcaaacagcaaattgtttatcatgaatgcaggatgtgggcaaactcacgactgctcctgccaacagaaggtttgctgagggcattcactccatggtgctcattggagttatctactgggtcatctagagcctattgtttgaggaatgcagtcttacaagcctactctggacccagcagctgactccttcttccacccctcttcttgctatctcctataccaataaatacgaagggctgtggaagatcagagcccttgttcacgagaagcaagaagccccctgaccccttgttccaaatatactcttttgtctttctctttattcccacgttcgccctttgttcagtccaatacagggttgtggggcccttaacagtgccatattaattggtatcattatttctgttgtttttgtttttgtttttgtttttgtttttgtttttgagacagagtctcactctgtcacccaggctgcagttcactggtgtgatctcagctcactgcaacctctgcctcccaggttcaagcacttctcgtacctcagactcccgaatagctgggattacagacaggcaccaccacacccagctaatttttgtattttttgtagagacggggtttcgccaagttgaccagcccagtttcaaactcctgacctcaggtgatctgcctgccttggcatcccaaagtgctgggattacaagaatgagccaccgtgcctggcctattttattatattgtaatatattttattatattagccaccatgcctgtcctattttcttatgttttaatatattttaatatattacatgtgcagtaattagattatcatgggtgaactttatgagtgagtatcttggtgatgactcctcctgaccagcccaggaccagctttcttgtcaccttgaggtcccctcgccccgtcacaccgttatgcattactctgtgtctactattatgtgtgcataatttataccgtaaatgtttactctttaaataga

SEQ ID NO: 18016 - DNA, 2166 bp, Homo sapiens
  source 1..2166: mol_type = unassigned DNA
agccccacagtcttcgttacaacctcatggtgctgtcccaggatggatctgtgcagtcagggtttctcgctgagggacatctggatggtcagcccttcctgcgctatgacaggcagaaacgcagggcaaagccccagggacagtgggcagaagatgtcctgggagctaagacctgggacacagagaccgaggacttgacagagaatgggcaagacctcaggaggaccctgactcatatcaaggaccagaaaggagtgccccagtcctccagagctcagaccttggctatgaacgtcacaaatttctggaaggaagatgccatgaagaccaagacacactatcgcgctatgcaggcagactgcctgcagaaactacagcgatatctgaaatccggggtggccatcaggagaacagtgccccccatggtgaatgtcacctgcagcgaggtctcagagggcaacatcaccgtgacatgcagggcttccagcttctatccccggaatatcacactgacctggcgtcaggatggggtatctttgagccacaacacccagcagtggggggatgtcctgcctgatgggaatggaacctaccagacctgggtggccaccaggattcgccaaggagaggagcagaggttcacctgctacatggaacacagcgggaatcacggcactcaccctgtgccctctgggaaggcgctggtgcttcagagtcaacggacagactttccatatgtttctgctgctatgccatgttttgttattattattattctctgtgtcccttgttgcaagaagaaaacatcagcggcagagggtccagagcttgtgagcctgcaggtcctggatcaacacccagttgggacaggagaccacagggatgcagcacagctgggatttcagcctctgatgtcagctactgggtccactggttccactgagggcgcctagactctacagccaggcggccaggattcaactccctgcctggatctcaccagcactttccctctgtttcctgacctatgaaacagaaaataacatcacttatttattgttgttggatgctgcaaagtgttagtaggtatgaggtgtttgctgctctgccacgtagagagccagcaaagggatcatgaccaactcaacattccattggaggctatatgatcaaacagcaaattgtttatcatgaatgcaggatgtgggcaaactcacgactgctcctgccaacagaaggtttgctgagggcattcactccatggtgctcattggagttatctactgggtcatctagagcctattgtttgaggaatgcagtcttacaagcctactctggacccagcagctgactccttcttccacccctcttcttgctatctcctataccaataaatacgaagggctgtggaagatcagagcccttgttcacgagaagcaagaagccccctgaccccttgttccaaatatactcttttgtctttctctttattcccacgttcgccctttgttcagtccaatacagggttgtggggcccttaacagtgccatattaattggtatcattatttctgttgtttttgtttttgtttttgtttttgtttttgagacagagtctcactctgtcacccaggctgcagttcactggtgtgatctcagctcactgcaacctctgcctcccaggttcaagcacttctcgtacctcagactcccgaatagctgggattacagacaggcaccaccacacccagctaatttttgtattttttgtagagacggggtttcgccaagttgaccagcccagtttcaaactcctgacctcaggtgatctgcctgccttggcatcccaaagtgctgggattacaagaatgagccaccgtgcctggcctattttattatattgtaatatattttattatattagccaccatgcctgtcctattttcttatgttttaatatattttaatatattacatgtgcagtaattagattatcatgggtgaactttatgagtgagtatcttggtgatgactcctcctgaccagcccaggaccagctttcttgtcaccttgaggtcccctcgccccgtcacaccgttatgcattactctgtgtctactattatgtgtgcataatttataccgtaaatgtttactctttaaataga

SEQ ID NO: 18017 - DNA, 2444 bp, Homo sapiens
  source 1..2444: mol_type = unassigned DNA
aaatttcgacggggtcttctcaccggtttcattcagttggccactgctgagcagctgagaaggtggcgacgtaggggccatggggctgggccgggtcctgctgtttctggccgtcgccttcccttttgcacccccggcagccgccgctgagccccacagtcttcgttacaacctcatggtgctgtcccaggatggatctgtgcagtcagggtttctcgctgagggacatctggatggtcagcccttcctgcgctatgacaggcagaaacgcagggcaaagccccagggacagtgggcagaagatgtcctgggagctgagacctgggacacagagaccgaggacttgacagagaatgggcaagacctcaggaggaccctgactcatatcaaggaccagaaaggaggcttgcattccctccaggagattagggtctgtgagatgcatgaagacagcagcaccaggggctcccggcatttctactacaatggggagctcttcctctcccaaaacctggagactcaagaatcgacagtgccccagtcctccagagctcagaccttggctatgaacgtcacaaatttctggaaggaagatgccatgaagaccaagacacactatcgcgctatgcaggcagactgcctgcagaaactacagcgatatctgaaatccggggtggccatcaggagaacagtgccccccatggtgaatgtcacctgcagcgaggtctcagagggcaacatcaccgtgacatgcagggcttccagcttctatccccggaatatcacactgacctggcgtcaggatggggtatctttgagccacaacacccagcagtggggggatgtcctgcctgatgggaatggaacctaccagacctgggtggccaccaggattcgccaaggagaggagcagaggttcacctgctacatggaacacagcgggaatcacggcactcaccctgtgccctctgggaaggcgctggtgcttcagagtcaacggacagactttccatatgtttctgctgctatgccatgttttgttattattattattctctgtgtcccttgttgcaagaagaaaacatcagcggcagagggtccagagcttgtgagcctgcaggtcctggatcaacacccagttgggacaggagaccacagggatgcagcacagctgggatttcagcctctgatgtcagctactgggtccactggttccactgagggcgcctagactctacagccaggcggccaggattcaactccctgcctggatctcaccagcactttccctctgtttcctgacctatgaaacagaaaataacatcacttatttattgttgttggatgctgcaaagtgttagtaggtatgaggtgtttgctgctctgccacgtagagagccagcaaagggatcatgaccaactcaacattccattggaggctatatgatcaaacagcaaattgtttatcatgaatgcaggatgtgggcaaactcacgactgctcctgccaacagaaggtttgctgagggcattcactccatggtgctcattggagttatctactgggtcatctagagcctattgtttgaggaatgcagtcttacaagcctactctggacccagcagctgactccttcttccacccctcttcttgctatctcctataccaataaatacgaagggctgtggaagatcagagcccttgttcacgagaagcaagaagccccctgaccccttgttccaaatatactcttttgtctttctctttattcccacgttcgccctttgttcagtccaatacagggttgtggggcccttaacagtgccatattaattggtatcattatttctgttgtttttgtttttgtttttgtttttgtttttgagacagagtctcactctgtcacccaggctgcagttcactggtgtgatctcagctcactgcaacctctgcctcccaggttcaagcacttctcgtacctcagactcccgaatagctgggattacagacaggcaccaccacacccagctaatttttgtattttttgtagagacggggtttcgccaagttgaccagcccagtttcaaactcctgacctcaggtgatctgcctgccttggcatcccaaagtgctgggattacaagaatgagccaccgtgcctggcctattttattatattgtaatatattttattatattagccaccatgcctgtcctattttcttatgttttaatatattttaatatattacatgtgcagtaattagattatcatgggtgaactttatgagtgagtatcttggtgatgactcctcctgaccagcccaggaccagctttcttgtcaccttgaggtcccctcgccccgtcacaccgttatgcattactctgtgtctactattatgtgtgcataatttataccgtaaatgtttactctttaaataga

SEQ ID NO: 18018 - DNA, 1485 bp, Homo sapiens
  source 1..1485: mol_type = unassigned DNA
gaattttgtgagcgaccgcgctgggccgtttctctttcttttccggaccctgcagtggcgcctaaagtctgcgaggaggaagtcgcctctgtgctcgtgagtccagggatctaagagccccacagtcttcgttacaacctcatggtgctgtcccaggatggatctgtgcagtcagggtttctcgctgagggacatctggatggtcagcccttcctgcgctatgacaggcagaaacgcagggcaaagccccagggacagtgggcagaaaatgtcctgggagctaagacctgggacacagagaccgaggacttgacagagaatgggcaagacctcaggaggaccctgactcatatcaaggaccagaaaggaggcttgcattccctccaggagattagggtctgtgagatccatgaagacagcagcaccaggggctcccggcatttctactacgatggggagctcttcctctcccaaaacctggagactcaagaatcgacagtgccccagtcctccagagctcagaccttggctatgaacgtcacaaatttctggaaggaagatgccatgaagaccaagacacactatcgcgctatgcaggcagactgcctgcagaaactacagcgatatctgaaatccggggtggccatcaggagaacagtgccccccatggtgaatgtcacctgcagcgaggtctcagagggcaacatcaccgtgacatgcagggcttccagcttctatccccggaatatcacactgacctggcgtcaggatggggtatctttgagccacaacacccagcagtggggggatgtcctgcctgatgggaatggaacctaccagacctgggtggccaccaggattcgccaaggagaggagcagaggttcacctgctacatggaacacagcgggaatcacggcactcaccctgtgccctctgggaaggcgctggtgcttcagagtcaacggacagactttccatatgtttctgctgctatgccatgttttgttattattattattctctgtgtcccttgttgcaagaagaaaacatcagcggcagagggtccagagcttgtgagcctgcaggtcctggatcaacacccagttgggacaggagaccacagggatgcagcacagctgggatttcagcctctgatgtcagctactgggtccactggttccactgagggcacctagactctacagccaggcggccaggattcaactccctgcctggatctcaccagcactttccctctgtttcctgacctatgaaacagagaaaataacatcacttatttattgttgttggatgctgcaaagtgttagtaggtatgaggtgtttgctgctctgccacgtagagagccagcaaagggatcatgaccaactcaacattccattggaggctatatgatcaaacagcaaattgtttatcatgaatgcaggatgtgggcaaactcacgactgctcctgccaacagaagg

SEQ ID NO: 18019 - DNA, 175 bp, Homo sapiens; identical to SEQ ID NO: 18005
  source 1..175: mol_type = unassigned DNA

SEQ ID NO: 18020 - DNA, 175 bp, Homo sapiens; identical to SEQ ID NO: 18005
  source 1..175: mol_type = unassigned DNA

SEQ ID NO: 18021 - DNA, 1483 bp, Homo sapiens
  source 1..1483: mol_type = unassigned DNA
gaattttgtgagcgcccgcgctgggccgtttctctttcttttccggaccctgcagtggcgcctaaagtctgcgaggaggaagtcgcctctgtgctcgtgagtccagggatctaagagccccacagtcttcgttacaacctcatggtgctgtcccaggatggatctgtgcagtcagggtttctcgctgagggacatctggatggtcagcccttcctgcgctatgacaggcagaaacgcagggcaaagccccagggacagtgggcagaagatgtcctgggagctgagacctgggacacagagaccgaggacttgacagagaatgggcaagacctcaggaggaccctgactcatatcaaggaccagaaaggaggcttgcattccctccaggagattagggtctgtgagatgcatgaagacagcagcaccaggggctcccggcatttctactacaatggggagctcttcctctcccaaaacctggagactcaagaatcgacagtgccccagtcctccagagctcagaccttggctatgaacgtcacaaatttctggaaggaagatgccatgaagaccaagacacactatcgcgctatgcaggcagactgcctgcagaaactacagcgatatctgaaatccggggtggccatcaggagaacagtgccccccatggtgaatgtcacctgcagcgaggtctcagagggcaacatcaccgtgacatgcagggcttccagcttctatccccggaatatcacactgacctggcgtcaggatggggtatctttgagccacaacacccagcagtggggggatgtcctgcctgatgggaatggaacctaccagacctgggtggccaccaggattcgccaaggagaggagcagaggttcacctgctacatggaacacagcgggaatcacggcactcaccctgtgccctctgggaaggcgctggtgcttcagagtcaacggacagactttccatatgtttctgctgctatgccatgttttgttattattattattctctgtgtcccttgttgcaagaagaaaacatcagcggcagagggtccagagcttgtgagcctgcaggtcctggatcaacacccagttgggacaggagaccacagggatgcagcacagctgggatttcagcctctgatgtcagctactgggtccactggttccactgagggcgcctagactctacagccaggcggccaggattcaactccctgcctggatctcaccagcactttccctctgtttcctgacctatgaaacagaaaataacatcacttatttattgttgttggatgctgcaaagtgttagtaggtatgaggtgtttgctgctctgccacgtagagagccagcaaagggatcatgaccaactcaacattccattggaggctatatgatcaaacagcaaattgtttatcatgaatgcaggatgtgggcaaactcacgactgctcctgccaacagaagg

SEQ ID NO: 18022 - DNA, 1485 bp, Homo sapiens
  source 1..1485: mol_type = unassigned DNA
gaattttgtgagcgaccgcgctgggccgtttctctttcttttccggaccctgcagtggcgcctaaagtctgcgaggaggaagtcgcctctgtgcttgtgagtccagggatctaagagccccacagtcttcgttacaacctcatggtgctgtcccaggatggatctgtgcagtcagggtttctcgctgagggacatctggatggtcagcccttcctgcgctatgacaggcagaaacgcagggcaaagccccagggacagtgggcagaagatgtcctgggagctaagacctgggacacagagaccgaggacttgacagagaatgggcaagacctcaggaggaccctgactcatatcaaggaccagaaaggaggcttgcattccctccaggagattagggtctgtgagatccatgaagacagcagcaccaggggctcccggcatttctactacgatggggagctcttcctctcccaaaacctggagactcaagaatcgacagtgccccagtcctccagagctcagaccttggctatgaacgtcacaaatttctggaaggaagatgccatgaagaccaagacacactatcgcgctatgcaggcagactgcctgcagaaactacagcgatatctgaaatccggggtggccatcaggagaacagtgccccccatggtgaatgtcatctgcagcgaggtctcagagggcaacatcaccgtgacatgcagggcttccagcttctatccccggaatatcacactgacctggcgtcaggatggggtatctttgagccacaacacccagcagtggggggatgtcctgcctgatgggaatggaacctaccagacctgggtggccaccaggattcgccaaggagaggagcagaggttcacctgctacatggaacacagcgggaatcacggcactcaccctgtgccctctgggaaggcgctggtgcttcagagtcaacggacagactttccatatgtttctgctgctatgccatgttttgttattattattattctctgtgtcccttgttgcaagaagaaaacatcagcggcagagggtccagagcttgtgagcctgcaggtcctggatcaacacccagttgggacaggagaccacagggatgcagcacagctgggatttcagcctctgatgtcagctactgggtccactggttccactgagggcacctagactctacagccaggcggccaggattcaactccctgcctggatctcaccagcactttccctctgtttcctgacctatgaaacagagaaaataacatcacttatttattgttgttggatgctgcaaagtgttagtaggtatgaggtgtttgctgctctgccacgtagagagccagcaaagggatcatgaccaactcaacattccattggaggctatatgatcaaacagcaaattgtttatcatgaatgcaggatgtgggcaaactcacgactgctcctgccaacagaagg

SEQ ID NO: 18023 - DNA, 175 bp, Homo sapiens; identical to SEQ ID NO: 18005
  source 1..175: mol_type = unassigned DNA

SEQ ID NO: 18024 - DNA, 175 bp, Homo sapiens; identical to SEQ ID NO: 18005
  source 1..175: mol_type = unassigned DNA

SEQ ID NO: 18025 - DNA, 1485 bp, Homo sapiens; identical to SEQ ID NO: 18018
  source 1..1485: mol_type = unassigned DNA

SEQ ID NO: 18026 - DNA, 175 bp, Homo sapiens; identical to SEQ ID NO: 18005
  source 1..175: mol_type = unassigned DNA

SEQ ID NO: 18027 - DNA, 175 bp, Homo sapiens; identical to SEQ ID NO: 18005
  source 1..175: mol_type = unassigned DNA

SEQ ID NO: 18028 - DNA, 1483 bp, Homo sapiens
  source 1..1483: mol_type = unassigned DNA
gaattttgtgagcgcccgcgctgggccgtttctctttcttttccggaccctgcagtggcgcctaaagtctgcgaggaggaagtcgcctctgtgctcgtgagtccagggatctaagagccccacagtcttcgttacaacctcatggtgctgtcccaggatggatctgtgcagtcagggtttctcgctgagggacatctggatggtcagcccttcctgcgctatgacaggcagaaacgcagggcaaagccccagggacagtgggcagaagatgtcctgggagctgagacctgggacacagagaccgaggacttgacagagaatgggcaagacctcaggaggaccctgactcatatcaaggaccagaaaggaggcttgcattccctccaggagattagggtctgtgagatccatgaagacagcagcaccaggggctcccggcatttctactacaatggggagctcttcctctcccaaaacctggagactcaagaatcgacagtgccccagtcctccagagctcagaccttggctatgaacgtcacaaatttctggaaggaagatgccatgaagaccaagacacactatcgcgctatgcaggcagactgcctgcagaaactacagcgatatctgaaatccggggtggccatcaggagaacagtgccccccatggtgaatgtcacctgcagcgaggtctcagagggcaacatcaccgtgacatgcagggcttccagcttctatccccggaatatcacactgacctggcgtcaggatggggtatctttgagccacaacacccagcagtggggggatgtcctgcctgatgggaatggaacctaccagacctgggtggccaccaggattcgccaaggagaggagcagaggttcacctgctacatggaacacagcgggaatcacggcactcaccctgtgccctctgggaaggcgctggtgcttcagagtcaacggacagactttccatatgtttctgctgctatgccatgttttgttattattattattctctgtgtcccttgttgcaagaagaaaacatcagcggcagagggtccagagcttgtgagcctgcaggtcctggatcaacacccagttgggacaggagaccacagggatgcagcacagctgggatttcagcctctgatgtcagctactgggtccactggttccactgagggcgcctagactctacagccaggcggccaggattcaactccctgcctggatctcaccagcactttccctctgtttcctgacctatgaaacagaaaataacatcacttatttattgttgttggatgctgcaaagtgttagtaggtatgaggtgtttgctgctctgccacgtagagagccagcaaagggatcatgaccaactcaacattccattggaggctatatgatcaaacagcaaattgtttatcatgaatgcaggatgtgggcaaactcacgactgctcctgccaacagaagg

SEQ ID NO: 18029 - DNA, 3044 bp, Homo sapiens
  source 1..3044: mol_type = unassigned DNA
aagtttggtagagtgtgttgtggggacagcagtatggtgtgagggaaggagagagttcagtctattataatcattagtctattgacttgtggtaattgagctataggagataaattcctacttactctacacatttaatggactcttcctcccaccccatcttccctgtccctttctttttccacagcagctctgcaacgggccaatagcttccagtctccaaccccaagcaaataccagaactggaggagagaattctggtggagtttgacgccagtgaacaaaagaactatgtcacctcctaaggacccttctccttctcttcctcttccttcatcgtcttcccattcatcttccccaccatcttcttcttcaaccagtgtttctgggaatgctccagatggttcctccccgcctcagatgacagcttctgagcccctctcgcaagtctcgagaggtcatccaagtcctcccaccccaaactttcggaggcgagccgtagcccaaggagcacccagggaaattcccctgtatctgcctcatcacccaaagccagagtgggcagagtactgcctggtgagccctggtgaagatggcctctcagaccctgcagagatgacttctgatgagtgccagccagcagaggcccctcttggggacatcggaagcaaccacagagacccacaccccatctgggggaaggacaggagctggacagggcaagagctatctcccttggctggagaagaccgggaaaaagggagtactggagccaggaaggaagaagagggagggccagtgctggtaaaggagaagttgggcctgaagaagttagtcctcactcaggagcagaagaccatgttgttggattggaatgactccatccctgagagtgtgcacctcaaagctggggagcgaatttcccagaaaagtgctgagaatggtagaggaggccgtgtgctaaaaccagtccgccccctgctgctccctagggcagcaggagagcccctgccaacccagagaggggcccaggagaagatggggacccctgcggaacaagctcaaggggagcgaaacgtgcctccacccaagtccccactgcggctcatagccaatgccatccgaaggtctctagagcccctcctttccaactctgaaggcgggaagaaggcctgggccaagcaagaatccaaaactttgcccgcacaggcctgcactcgctcattcagccttcggaaaaccaattccaataaagacggggaccagcattcccctgggagaaaccagtcctcagcctttagccctcctgaccctgccctccgcacccacagtttgcccaatcggccatccaaggtctttcctgcacttaggtccccaccctgcagcaagattgaagatgtccccacactcctcgagaaagtgagtttgcaagagaacttcccagatgcttctaagcctccaaagaaaagaatctcacttttttcctccctcagactcaaagacaaatcttttgagagtttcctccaagaatccagacaaagaaaggacatcagggacctctttggcagccccaagaggaaggtgctgcctgaagatagtgcgcaggccctggagaagctgctgcagcctttcaaaagcacctccctgcgccaggcagctcctcctcctcctcctcctcctcctcctcctcctcctcctcctacagcgggaggtgcagactccaagaactttcccctcagagcacaggtaacagaggcttcctcttctgcctcttcaacctcctcctcctctgcagatgaagaatttgatccccagctttccttgcagttaaaggagaagaagacacttagaagaagaaagaagctagaaaaagcaatgaagcagttggttaagcaagaagaattgaaaagactctataaggctcaggccatccagaggcagctggaggaggtggaggagcggcagagggcttctgagatccagggtgtgaggctggagaaggcgttgcgaggagaagcagattcaggcacacaggatgaagcacagcttttgcaggaatggtttaagctggttctggagaagaataaattaatgcgatatgagtcggagctcctaatcatggcccaggaactggaattagaagatcatcaaagcagactggagcagaaactgagagagaaaatgctcaaggaggagagccagaaagatgagaaggatctaaacgaagagcaagaagtattcaccgagctgatgcaagtgattgagcaaagggacaaactcgtcgattccttagaggaacaacgcatcagagaaaaagccgaggaccagcactttgaaagcttcgtattctccagaggctgtcagctgagcaggacttgaggaggcccgtagtccctctccctggctgcacgttgggaccggatcaggccaagtgcaccacacaccctcatgggtctttctgcaggatttatcatccctggaacttgttataccttactgcattttttaaaattaaaattctcttgcacgcatggcagcttcccaaggttcttccagagattcaaatgaagaaaacccaaagactctttggcaattggcagtcaacttcagccaggctctcagactggaggtgttgttggcagatgaccagcattgttttccctagaaagtgacacaaagacttgactttcctgctacttttatcattttccttcccaattcattgagttacatactttaagatttttgagaagctgccttttcattaatatatccatatttgccttttttgtatggatgaccagtttccaaatgtcagaaagaagcagccgcagtttaaagattaggttaatatttaaattgtgtttccagagaaagaggagaaaccttgagattactgattacataaagcaaataactcatatagcaggtgttaattcaatccagggtgaatttaatttaccaggtgcatttataagccttaatataatatacataagcaatgagagcttaatagaacatttgagccttaattttattttaag

SEQ ID NO: 18030 - DNA, 343 bp, Homo sapiens
  source 1..343: mol_type = unassigned DNA
gtctgactatggtggcagcgagggctcccacacagaaccctgtgaagagaaaccctggcggccaggatccccgcatctaccgcacacgtccctaggggaggccctgagcagggcagtctctccacagtgccctgaggagcccagagctgtgcacgctctgcaacgggccaatagcttccagtctccaaccccaagcaaataccagaactggaggagagaattctggtggagtttgacgccagtgaacaaaagaactatgtcacctcctaaggacccttctccttctcttcctcttccttcatcgtcttcccattcatcttccccaccatcttcttcttcaacc

SEQ ID NO: 18031 - DNA, 2845 bp, Homo sapiens
  source 1..2845: mol_type = unassigned DNA
tctacgcctagcctggctttcttgctctccctcatctcattgtttcagcggaggccaaatctgaagtcctttccagggagtggctctgttcatcttattcgccagccaaagtaggaacagcgtaagaggagagagacacattcagcagccaaaggactcggtggaaagagcagaacaccatagacaatatgtcgctcttgggacccaaggtgctgctgtttcttgctgcattcatcatcacctctgactggatacccctgggggtcaatagtcaacgaggagacgatgtgactcaagcgactccagaaacattcacagaagatcctaatctggtgaatgatcccgctacagatgaaacagttttggctgttttggctgatattgcaccttccacagatgacttggcctccctcagtgaaaaaaataccactgcagagtgctgggatgagaaatttacctgcacaaggctctactctgtgcatcggccggttaaacaatgcattcatcagttatgcttcaccagtttacgacgtatgtacatcgtcaacaaggagatctgctctcgtcttgtctgtaaggaacacgaagctatgaaagatgagctttgccgtcagatggctggtctgccccctaggagactccgtcgctccaattacttccgacttcctccctgtgaaaatgtggatttgcagagacccaatggtctgtgatcattgaaaaagaggaaagaagaaaaaatgtatgggtgagaggaaggaggatctccttcttctccaaccattgacagctaacccttagacagtatttcttaaaccaatccttttgcaatgtccagcttttacccctactctctactttttcacccaaactgataacatttatctcattttctagcacttaaaatacaaagtctatattattgcataattttgctgcttctcaatatcatagacacagtgaatagatgatgactatatggcttatatacaaacattctatgtacaatttcaagggagactaaactttaggctaataatctttactattgaatctgtctgatatagatcttagggttgaagaagctatctttgtctatttgggctaaccatagaatttcatttattttcctcacaatattttcctagaccaactccccatcattcacgtgttcctctttactcttactttaactattttgctggcttgcccgaaaatttgcctggcaagtcttccttataagacacatcatggtaagttttgtagtcctgtaagattctgcaacacagtcaagaattatacaatcctactagcaatatataaggacccaaaatgtcttctgctaagctcagaggctggggctaaagcatgaggactatgccagctatagaacttggactcataattcgctatccaatttttcatgcagttgtctagtcgggaagtaaggttggaaactaagtctcatttactgattcgtttatgggtagtaccgggatgaacccaccaccacaaagcaaattagacaacttaatgtgaaatcataccattggttgacgtttccttgagttgctacttcgttcatcttcacaacttaacaagtgcacggtcgaattattgtgcaagtggcttttggatatcctgattggggcctaagaagggcattcagacttgaattttaataggcagacagaaagtttgcctaatagttaatacgaaagagtgaaagaaacacaatattcagacaacccacattcttatcctggctctagcagtaaccacgtagccttggataagccattttccttcattaggtcctggtttaatttcctcatctttaaaatgagaaggttaaatttatcttagtactgctgggcgcagtggctcatgcctgtaatctgagcactttgggaagctgaggcgggtggatcacttgaggtcagaaatttgagacgagcctggccaacatggtgaaaccccatctctactaaaaatacaaaaattagctgggcgtggtggcacgtgcctgtaatcccagctactcgggaggctgaggcaggagaatcaattgaacctgggaggcagaggttgcagtgagccgagatggcgccattgcactccagcctgggtgacaaaagcaaaagtccatcttaagaaatatatatatatattatatatattcttagttctaagatttcctttaattctatgattctctggatttaaatgcattattcatatttcttgaagcttagatacagtctaattcatagcaaccatatctgctttatcctaggtgagggtagcagtccacaatggaatagaagaaaatcccattataacaaatgacaaattatatatcatgaatccttctgtctgactaactcaataactttctataaaagccaatggaattcaaataggagctaggagacaacaagttatatatgacagtggaggttgtattccttttatattgctgagaaaactagttaaatgatcagattcttgctgttaagaaacaatttcgtttaatgggatctgtacaactgattttaaaaaaatgctacaaaaagccccaaagcatataatctctactccttacagtctctagaattaaatgtactcatttagacaacatattaaatgcatattttagccactttagagaaacctcataggcacagagtttccaagattaattttaagaatatcttcacgaacttgaccctcctactccacattgcaacatttccatcagacagcatttcaattccagtattatgtatattgcaaattaaacattttaaaatatttttttccaatttatttctcaaaataaaatgtc

SEQ ID NO: 18032 - DNA, 1195 bp, Homo sapiens
  source 1..1195: mol_type = unassigned DNA
attgtaacacacattctacgcctagcctggctttcttgctctccctcatctcattgtttcagcggaggccaaatctgaagtcctttccagggagtggctctgttcatcttattcgccagccaaagtaggaacagcgtaagaggagagagacacattcagcagccaaaggactcggtggaaagagcagaacaccatagacaatatgtcgctcttgggacccaaggtgctgctgtttcttgctgcattcatcatcacctctgactggatacccctgggggtcaatagtcaacgaggagacgatgtgactcaagcgactccagaaacattcacagaagatcctaatctggtgaatgatcccgctacagatgaaacagttttggctgttttggctgatattgcaccttccacagatgacttggagtgctgggatgagaaatttacctgcacaaggctctactctgtgcatcggccggttaaacaatgcattcatcagttatgcttcaccagtttacgacgtatgtacatcgtcaacaaggagatctgctctcgtcttgtctgtaaggaacacgaagctatgaaagatgagctttgccgtcagatggctggtctgccccctaggagactccgtcgctccaattacttccgacttcctccctgtgaaaatgtggatttgcagagacccaatggtctgtgatcattgaaaaagaggaaagaagaaaaaatgtatgggtgagaggaaggaggatctccttcttctccaaccattgacagctaacccttagacagtatttcttaaaccaatccttttgcaatgtccagcttttacccctactctctactttttcacccaaactgataacatttatctcattttctagcacttaaaatacaaagtctatattattgcataattttgctgcttctcaatatcatagacacagtgaatagatgatgactatatggcttatatacaaacattctatgtacaatttcaagggagactaaactttaggctaataatctttactattgaatctgtctgatatagatcttagggttgaagaagctatctttgtctatttgggctaaccatagaatttcatttattttcctcacaatattttcctagaccaactccccatcattcacgtgttcctctttactcttactttaactattttgctggcttgcccga

SEQ ID NO: 18033 - DNA, 2308 bp, Homo sapiens
  source 1..2308: mol_type = unassigned DNA
atttggaatgagggtgtgagcaactgcaaattcccatctcccttctcattccagcctcattgtaacacacattctacgcctagcctggctttcttgctctccctcatctcattgtttcagcggaggccaaatctgaagtcctttccagggagtggctctgttcatcttattcgccagccaaagtaggaacagcgtaagaggagagagacacattcagcagccaaaggactcggtggaaagagcagaacaccatagacaatatgtcgctcttgggacccaaggtgctgctgtttcttgctgcattcatcatcacctctgactggatacccctgggggtcaatagtcaacgaggagacgatgtgactcaagcgactccagaaacattcacagaagatcctaatctggtgaatgatcccgctacagatgaaacagagtgctgggatgagaaatttacctgcacaaggctctactctgtgcatcggccggttaaacaatgcattcatcagttatgcttcaccagtttacgacgtatgtacatcgtcaacaaggagatctgctctcgtcttgtctgtaaggaacacgaagctatgaaagatgagctttgccgtcagatggctggtctgccccctaggagactccgtcgctccaattacttccgacttcctccctgtgaaaatgtggatttgcagagacccaatggtctgtgatcattgaaaaagaggaaagaagaaaaaatgtatgggtgagaggaaggaggatctccttcttctccaaccattgacagctaacccttagacagtatttcttaaaccaatccttttgcaatgtccagcttttacccctactctctactttttcacccaaactgataacatttatctcattttctagcacttaaaatacaaagtctatattattgcataattttgctgcttctcaatatcatagacacagtgaatagatgatgactatatggcttatatacaaacattctatgtacaatttcaagggagactaaactttaggctaataatctttactattgaatctgtctgatatagatcttagggttgaagaagctatctttgtctatttgggctaaccatagaatttcatttattttcctcacaatattttcctagaccaactccccatcattcacgtgttcctctttactcttactttaactattttgctggcttgcccgaaaatttgcctggcaagtcttccttataagacacatcatggtaagttttgtagtcctgtaagattctgcaacacagtcaagaattatacaatcctactagcaatatataaggacccaaaatgtcttctgctaagctcagaggctggggctaaagcatgaggactatgccagctatagaacttggactcataattcgctatccaatttttcatgcagttgtctagtcgggaagtaaggttggaaactaagtctcatttactgattcgtttatgggtagtaccgggatgaacccaccaccacaaagcaaattagacaacttaatgtgaaatcataccattggttgacgtttccttgagttgctacttcgttcatcttcacaacttaacaagtgcacggtcgaattattgtgcaagtggcttttggatatcctgattggggcctaagaagggcattcagacttgaattttaataggcagacagaaagtttgcctaatagttaatacgaaagagtgaaagaaacacaatattcagacaacccacattcttatcctggctctagcagtaaccacgtagccttggataagccattttccttcattaggtcctggtttaatttcctcatctttaaaatgagaaggttaaatttatcttagtactgctgggcgcagtggctcatgcctgtaatctgagcactttgggaagctgaggcgggtggatcacttgaggtcagaaatttgagacgagcctggccaacatggtgaaaccccatctctactaaaaatacaaaaattagctgggcgtggtggcacgtgcctgtaatcccagctactcgggaggctgaggcaggagaatcaattgaacctgggaggcagaggttgcagtgagccgagatggcgccattgcactccagcctgggtgacaaaagcaaaagtccatcttaagaaatatatatatatattatatatattcttagttctaagatttcctttaattctatgattctctggatttaaatgcattattcatatttcttgaagcttagatacagtctaattcatagcaaccatatctgctttatcctaggtgagggtagcagtccac

SEQ ID NO: 18034 - DNA, 492 bp, Homo sapiens
  source 1..492: mol_type = unassigned DNA
atgtcgctcttgggacccaaggtgctgctgtttcttgctgcattcatcatcacctctgactggatacccctgggggtcaatagtcaacgaggagacgatgtgactcaagcgactccagaaacattcacagaagatcctaatctggtgaatgatcccgctacagatgaaacagttttggctgttttggctgatattgcaccttccacagatgacttggagtgctgggatgagaaatttacctgcacaaggctctactctgtgcatcggccggttaaacaatgcattcatcagttatgcttcaccagtttacgacgtatgtacatcgtcaacaaggagatctgctctcgtcttgtctgtaaggaacacgaagctatgaaagatgagctttgccgtcagatggctggtctgccccctaggagactccgtcgctccaattacttccgacttcctccctgtgaaaatgtggatttgcagagacccaatggtctgtga

SEQ ID NO: 18035 - DNA, 582 bp, Homo sapiens
  source 1..582: mol_type = unassigned DNA
atttgattacctgaaaccctaaagagacagagggaatgtgtgtatgtctgtgtgtgtgtgaaagggctggagggggcaatggggaatgtcactgaacttagtcttgagcagacctcccaaataaccgtggaattctgatgaaggagacgccaagatgagcagatgatatgaaaaagtcacgcatatgagaaaggaagattccacatcaggggtgaaagaggccaaagggtagggccaagtacggaccatgtagaatgtaaaatttcctctgacttggtagcagagaataataaaagcaagaataatgatatgtcgctcttgggacccaaggtgctgctgtttcttgctgcattcatcatcacctctgactggatacccctgggggtcaatagtcaacgaggagacgatgtgactcaagcgactccagaaacattcacagaagatcctaatctggtgaatgatcccgctacagatgaaacagttttggctgttttggctgatattgcaccttccacagatgacttggcctccctcagtgaaaaaaataccactgcagagtgctgggatgagaaatttacctgc

SEQ ID NO: 18036 - DNA, 2155 bp, Homo sapiens
  source 1..2155: mol_type = unassigned DNA
gcagaaaccgactcgacttcctagctgtgggcgcccaaacgtcgtccaccatcccacaatcctctcgtcacgtatttccggtttatctagctcagccgtaagtagtttctctatcagtcgcgcagctgtgttcgcggactcaggtggaaggaatttcttctcttcgttgacgttgctggtgttcactgtttggaattagtcaagtttcgggaatcaccgtcgctgccatcaacatgtcggtcccaagcgctctcatgaagcaaccgcccattcagtctacggctggggccgtcccagttcgcaatgagaaaggtgagatttcaatggaaaaagtgaaggtaaagcgttatgtgtccggaaaaaggccagactatgcccctatggagtcctcagatgaggaggatgaagaatttcagttcattaagaaagccaaagaacaagaagcagagcctgaggaacaggaggaggattcatccagtgacccccggctacggcgtttacagaaccgtattagtgaagatgtggaagagagattggctcgacatcgaaaaatagtggaacctgaagtggtaggagagagtgactcagaagtagaaggagatgcttggcgcatggaacgagaagacagcagtgaagaagaggaggaggaaattgatgatgaggaaatagagcggcggcgtggcatgatgcgtcagcgagcacaggagagaaaaaatgaagagatggaagtcatggaagtggaagatgagggtcgttctggagaggagtcagaatcagagtctgagtatgaagagtacacagacagtgaagatgagatggagcctcgccttaagccagtcttcattcgaaagaaggaccgagtgacagttcaagaacgtgaagccgaagcattgaaacagaaggagctggagcaggaagcaaaacgcatggctgaggaaaggcgcaagtacacactcaagattgtcgaagaggaaaccaaaaaagagctggaagagaacaagcgatccctggctgcattggatgcactcaatactgatgatgaaaatgatgaggaggaatatgaggcatggaaagttcgagagctaaaaagaatcaagagggacagagaagatcgagaagcgcttgagaaggagaaagcagaaattgaacgcatgcgaaacctgactgaggaagagaggagagctgaacttcgggcaaacggcaaagtcattaccaacaaagctgttaagggcaaatacaagttcttacagaagtattatcaccggggtgccttcttcatggatgaggatgaagaagtatacaagagagatttcagcgctcctaccctggaggatcatttcaataaaaccattcttcctaaagtcatgcaggtcaagaactttggacgctcaggtcgcaccaaatacactcaccttgtggatcaagataccacctcctttgactcagcttggggccaagagagtgcccagaacacaaagttcttcaaacaaaaggcagctggggtacgagatgtatttgagcggccatctgccaagaagcggaaaactacctagggtccaactgcttattcttccaactgtggaacacaaggggagtctcagcatctggtccttgatttggttttttcattgtttccttggcccctgtatccagatattggacttactgctatacttgtgatactgggtagcccagactttgaaggtgctttgtgaggtttggactcatgctgagaaacccacaggaaagcactgtccaggtaggattagaggcttcccacttaaaactatttctgagaaatcttaggttttatcactgctatggtttcccatatttacttgggactgttctgactttctttttccagcccttagcttgggttagaaaagtggacatgtaagtgaacaatgcattacttctaccttaggtttaggagtaatatacccggaaatctaagctcatggaaacatgttttccatttttgcttggagtccgtttttctagttgtacatactttttgatccatatatgtgtgcatgtcaagaaataaaagaatcacacaacaaggagatttttagcatgatactggaaataaaatgtccaagctgacaagtattaattgcctattaaagtaaaagataacaattgtcaggca

SEQ ID NO: 18037 - DNA, 970 bp, Homo sapiens
  source 1..970: mol_type = unassigned DNA
gccatgagagctgcctacctcttcctgctattcctgcctggcttgctggctcagggccagtatgacctggacccgctgccgccgttccctgaccacgtccagtacacccactatagcgaccagatcgacaacccagactactatgattatcaagaggtgactcctcggccctccgaggaacagttccagttccagtcccagcagcaagtccaacaggaagtcatcccagccccaaccccagaaccaggaaatgcagagctggagcccacagagcctgggcctcttgactgccgtgaggaacagtacccgtgcacccgcctctactccatacacaggccttgcaaacagtgtctcaacgaggtctgcttctacagcctccgccgtgtgtacgtcattaacaaggagatctgtgttcgtacagtgtgtgcccatgaggagctcctccgagctgacctctgtcgggacaagttctccaaatgtggcgtgatggccagcagcggcctgtgccaatccgtggcggcctcctgtgccaggagctgtgggagctgctagggtggtgctggcatcctgagtcctggccctcctgggatctggggccctcgggccctgcctgacctggtgcttttttccccatccccatgttccttttattctgtaaaaagttagtggactgcagccctgggggttgcaggctgcggtgcctcaggcccctccttcagcctgtggccacctctggggcacaatgggggctccccactgcccagtctgcccctcgggttgggggagtatcccaggcctctctgtgggacctgggcccctgacgggccttctcagcccgttttgaggacagacagtcccccgaggtaggctacatccccccaccccagctggtctgcttggatttcctacagcccccgtgggcatggaccacctttattttatacaaaattaaaaacaagtttttacaaaa

SEQ ID NO: 18038 - DNA, 1260 bp, Homo sapiens
  source 1..1260: mol_type = unassigned DNA
gaggaagctttgcacagacgtgaggacggccccgggcgcctctaccccggggacacccccccccccaggagatggaaccccgagggcacggcgtggcggcccatgcgggcagctcgcgttaggacccagcggctccggggctggagggcgggcgccagccccgtcgggggcccggagggggactcggagcgggccaaggggcggctccggcgggcggactcggagcgggcggcggagtgacccggacagctgtcctctctgacaccaccccggcctgcctctttgttgccatgagagctgcctacctcttcctgctattcctgcctgcaggcttgctggctcagggccagtatgacctggacccgctgccgccgttccctgaccacgtccagtacacccactatagcgaccagatcgacaacccagactactatgattatcaagaggtgactcctcggccctccgaggaacagttccagttccagtcccagcagcaagtccaacaggaagtcatcccagccccaaccccagaaccaggaaatgcagagctggagcccacagagcctgggcctcttgactgccgtgaggaacagtacccgtgcacccgcctctactccatacacaggccttgcaaacagtgtctcaacgaggtctgcttctacagcctccgccgtgtgtacgtcattaacaaggagatctgtgttcgtacagtgtgtgcccatgaggagctcctccgagctgacctctgtcgggacaagttctccaaatgtggcgtgatggccagcagcggcctgtgccaatccgtggcggcctcctgtgccaggagctgtgggagctgctagggtggtgctggcatcctgagtcctggccctcctgggatctggggccctcgggccctgcctgacctggtgcttttttccccatccccatgttccttttattctgtaaaaagttagtggactgcagccctgggggttgcaggctgcggtgcctcaggcccctccttcagcctgtggccacctctggggcacaatgggggctccccactgcccagtctgcccctcgggttgggggagtatcccaggcctctctgtgggacctgggcccctgacgggccttctcagcccgttttgaggacagacagtcccccgaggtaggctacatccccccaccccagctggtctgcttggatttcctacagcccccgtgggcatggaccacctttattttatacaaaattaaaaacaagtttttacaaaa

SEQ ID NO: 18039 - DNA, 1094 bp, Homo sapiens
  source 1..1094: mol_type = unassigned DNA
gccccgtcgggggcccggagggggactcggagcgggccaaggggcggctccggcgggcggactcggagcgggcggcggagtgacccggacagctgtcctctctgacaccaccccggcctgcctctttgttgccatgagagctgcctacctcttcctgctattcctgcctggcttgctggctcagggccagtatgacctggacccgctgccgccgttccctgaccacgtccagtacacccactatagcgaccagatcgacaacccagactactatgattatcaagaggtgactcctcggccctccgaggaacagttccagttccagtcccagcagcaagtccaacaggaagtcatcccagccccaaccccagaaccaggaaatgcagagctggagcccacagagcctgggcctcttgactgccgtgaggaacagtacccgtgcacccgcctctactccatacacaggccttgcaaacagtgtctcaacgaggtctgcttctacagcctccgccgtgtgtacgtcattaacaaggagatctgtgttcgtacagtgtgtgcccatgaggagctcctccgagctgacctctgtcgggacaagttctccaaatgtggcgtgatggccagcagcggcctgtgccaatccgtggcggcctcctgtgccaggagctgtgggagctgctagggtggtgctggcatcctgagtcctggccctcctgggatctggggccctcgggccctgcctgacctggtgcttttttccccatccccatgttccttttattctgtaaaaagttagtggactgcagccctgggggttgcaggctgcggtgcctcaggcccctccttcagcctgtggccacctctggggcacaatgggggctccccactgcccagtctgcccctcgggttgggggagtatcccaggcctctctgtgggacctgggcccctgacgggccttctcagcccgttttgaggacagacagtcccccgaggtaggctacatccccccaccccagctggtctgcttggatttcctacagcccccgtgggcatggaccacctttattttatacaaaattaaaaacaagttttt

SEQ ID NO: 18040 - DNA, 2891 bp, Homo sapiens
  source 1..2891: mol_type = unassigned DNA
ggagctagacggcggtcgggtaggtgacggcttggttggggtcgctgcgaggggactactaggagcgccgaggcgtgagtcgtagcctgtggcttggggtcgggagtgcaggaggcgaaaatgtttgccattcttttgaaagtctggcctgggtgtgggagttcggtcatcgaacacttactgagagccagatacctgccaggcactgccctgggctccagggacacatcagtcaacgaacggaagggccctgctctcaagcagtgcgaaaagcagattataaacaagtcaacaaacgggattatctaaggtggtagttctctactcacatcttttaatcttgaagactagaaaatataactggatctaccacttgtttggaaaatttctctaccaagcaataaattacccgctgtgcttttgttgtagtgtagaagtttttgagttctccaaatctaaacaagattttgtcccattttcccatgaagctacattgttgcttattcactttagtggcaagtattattgtgccagctgcttttgttttggaagatgtggacttcgaccaaatggtttcactggaagcaaatcgtagttcttacaatgcatcctttccctcaagctttgaactctcagcaagttcccactcggatgatgatgtcatcatagccaaagagggaactagcgtttcaattgagtgtcttctcacagccagtcactatgaagatgtccattggcacaattcaaaaggacagcaactggatggcagaagcagaggtggaaagtggttggtttctgataacttcctaaacatcaccaatgtagcttttgatgaccgtgggctctatacctgtttcgtcacctctccaattcgtgcctcctactctgtcaccctacgtgttatcttcacctcgggagacatgagtgtctattacatgattgtttgcctgattgcctttacaatcacactcatcttgaatgtcacacggctgtgcatgatgagcagccatcttcgcaagactgagaaggctatcaatgagttctttagaactgaaggggctgagaaacttcagaaggcctttgagattgcaaaacgtatccccatcattacctcagccaaaactctggagctcgccaaagtcacacaatttaagaccatggagtttgctcgttatattgaagaactggcaagaagtgtccctcttccacctcttattctaaactgtcgagcctttgttgaggagatgtttgaggctgtgcgagtggacgaccctgatgacctgggtgaaagaattaaagagagacctgccttgaatgctcaaggtggcatctatgtcattaacccagagatgggacggagtaattcaccaggaggagattcagatgatggctctctgaatgaacaaggccaggaaatagcagttcaggtttctgtccaccttcagtcagaaaccaaaagtattgatacagagtctcaaggcagcagtcatttcagtccacctgatgatataggatctgcagaatctaactgtaactacaaagatggggcatatgaaaactgtcagctgtaacctacaatgctgtaacccagtacctacaaaatcagctcgctctcagaaaaggaacctgtttcttagaagaagtaacatttttgccaaaagatgactggggttttccgtttgttaatattaagcacatcagaacgtgaattgccaaagtcttcattagaaggcagcatttttcctctctgatacttttcagtcattttccttagagctttattaaattatgcatgctaagatttaaaggagccccagataaacatgatggggaaaagcactgaactaagagtcccatggtttctcttctggtcacagttcttccattggttggatctgatacttatcttgggacttcagtttttccgtcaataagatgagggattaggtgagatctgaagttgtttctagctctatagcttcttaacccatcacctttaaattaccagaatcttcactcatctctaagtaaacctttcccgggacttttactcgcttcttttggaaaggattaagctgagatctaaatttccacaccaatgtcataatgcacagaggtttttgaaaaacatctgagtgtttttcagatgttttgccatgtggagcatataatgatatgtgcaagattgaatcttttcaatgtagcacatgtctgtagggttatacagatgtcagagagctaactgctctgtaaactactttccatgagtaaattggtccttggtgggggtgtatcatatttttaacttactgagatatcattttagttcattgaggttggcagggattgcctaactgatcttccaaagtgagcagtttatttctaaggtataacgtctttgatgcttttagaataagaacagtgtcaaatcatctgtcttctggaaaatcatggattttcatatttctgttaacagaatttctcaggctttccctttttaaaagtattggactctacaaataggttctatatttgggatctcatcctaggagaaaacccaaaactggattcctcttaagacctctgtcaaccctcctgccctttgtggtcttaggtatggtgctataggttgcatgcgtctttatcttgtttgtttggttaatattttgttgttgaggtttttatttttgtttacttcagatacataattctgagctatggctgcttttgtagcctttccaagaagcactaacctgaaataagattagataattgtgagggtgtgttactatattaaaatacacacacaactgatctagacatcaagaggaagaaaaatgatggatgatgccacctgcttcaactgtatataataaacacttatgatgaca

SEQ ID NO: 18041 - DNA, 5049 bp, Homo sapiens
  source 1..5049: mol_type = unassigned DNA
aaacttccgagttaagccgccgctgaggccggaaggagctagacggcggtcgggttctctactcacatcttttaatcttgaagactagaaaatataactggatctaccacttgtttggaaaatttctctaccaagcaataaattacccgctgtgcttttgttgtagtgtagaagtttttgagttctccaaatctaaacaagattttgtcccattttcccatgaagctacattgttgcttattcactttagtggcaagtattattgtgccagctgcttttgttttggaagatgtggacttcgaccaaatggtttcactggaagcaaatcgtagttcttacaatgcatcctttccctcaagctttgaactctcagcaagttcccactcggatgatgatgtcatcatagccaaagagggaactagcgtttcaattgagtgtcttctcacagccagtcactatgaagatgtccattggcacaattcaaaaggacagcaactggatggcagaagcagaggtggaaagtggttggtttctgataacttcctaaacatcaccaatgtagcttttgatgaccgtgggctctatacctgtttcgtcacctctccaattcgtgcctcctactctgtcaccctacgtgttatcttcacctcgggagacatgagtgtctattacatgattgtttgcctgattgcctttacaatcacactcatcttgaatgtcacacggctgtgcatgatgagcagccatcttcgcaagactgagaaggctatcaatgagttctttagaactgaaggggctgagaaacttcagaaggcctttgagattgcaaaacgtatccccatcattacctcagccaaaactctggagctcgccaaagtcacacaatttaagaccatggagtttgctcgttatattgaagaactggcaagaagtgtccctcttccacctcttattctaaactgtcgagcctttgttgaggagatgtttgaggctgtgcgagtggacgaccctgatgacctgggtgaaagaattaaagagagacctgccttgaatgctcaaggtggcatctatgtcattaacccagagatgggacggagtaattcaccaggaggagattcagatgatggctctctgaatgaacaaggccaggaaatagcagttcaggtttctgtccaccttcagtcagaaaccaaaagtattgatacagagtctcaaggcagcagtcatttcagtccacctgatgatataggatctgcagaatctaactgtaactacaaagatggggcatatgaaaactgtcagctgtaacctacaatgctgtaacccagtacctacaaaatcagctcgctctcagaaaaggaacctgtttcttagaagaagtaacatttttgccaaaagatgactggggttttccgtttgttaatattaagcacatcagaacgtgaattgccaaagtcttcattagaaggcagcatttttcctctctgatacttttcagtcattttccttagagctttattaaattatgcatgctaagatttaaaggagccccagataaacatgatggggaaaagcactgaactaagagtcccatggtttctcttctggtcacagttcttccattggttggatctgatacttatcttgggacttcagtttttccgtcaataagatgagggattaggtgagatctgaagttgtttctagctctatagcttcttaacccatcacctttaaattaccagaatcttcactcatctctaagtaaacctttcccgggacttttactcgcttcttttggaaaggattaagctgagatctaaatttccacaccaatgtcataatgcacagaggtttttgaaaaacatctgagtgtttttcagatgttttgccatgtggagcatataatgatatgtgcaagattgaatcttttcaatgtagcacatgtctgtagggttatacagatgtcagagagctaactgctctgtaaactactttccatgagtaaattggtccttggtgggggtgtatcatatttttaacttactgagatatcattttagttcattgaggttggcagggattgcctaactgatcttccaaagtgagcagtttatttctaaggtataacgtctttgatgcttttagaataagaacagtgtcaaatcatctgtcttctggaaaatcatggattttcatatttctgttaacagaatttctcaggctttccctttttaaaagtattggactctacaaataggttctatatttgggatctcatcctaggagaaaacccaaaactggattcctcttaagacctctgtcaaccctcctgccctttgtggtcttaggtatggtgctataggttgcatgcgtctttatcttgtttgtttggttaatattttgttgttgaggtttttatttttgtttacttcagatacataattctgagctatggctgcttttgtagcctttccaagaagcactaacctgaaataagattagataattgtgagggtgtgttactatattaaaatacacacacaactgatctagacatcaagaggaagaaaaatgatggatgatgccacctgcttcaactgtatataataaacacttatgatgacatttcttgcctggctgagatctgatataatggaattgtaaatactcttcagaacaatttcttcagctacaggaagcgtggtgccatataattttaagaacttggcagtggagctccatttggggcttcacgtttcttcatatgacttctgattattgaagcattacttcagctagaggctcctgagggaaatgttcagaggaggttttatcaggattttaatttaaggtttcaaacaggggaagacaggaaattcaaagcgtgacgggataaaactcatgcctccctttgtccaggcttatcagaagtaatacatctgctctgaatagcatgaatgaatcaatgtgcagttttatcagatggcatcatggataaagatgataatgctgccttttctgtctctcaggctgtttccatggaaacctctagagccaaataaaagctaaccaatcatttagccaaagcttgccttggctcatagactggtatttctttaaggaaaattgtttttatatatttgactataagagcaaaggctcttgaacatatcctagattatggaacactttttcccttcccttttctctggaaaaattaaattttttttctgtccactgagactggagtgcagtggcaagatcatagctcactgcagcctccaactcctggggtcaagcgatcgtcctgcttcagcctcccaagcagctaggactacaggtgtgcaccacctttcctggctaatttttttttattttttgtagagatgggggtctcactttgttgcccaggctgaccttgtacttgtggcttcaaatgatcctcctgccttacctcccaaagtgttgagattacaggcatgagccactgtgcctggccaaaaaacattttaaatcccttgtctgggggtcagtcctctaaacatccctcagatttcagatagtactttcaaccctgtcctaacatagcaggtttgcagtaatcttttagaatatagcttgtcaaattagagaatggttttaccccacatgttctcataggagacattattatttagaaccctaaggtagacatgtttaaaatcaaagtcctaagaaacagaactttggaaaaatggaggaaatgtttttaaagtctgtaagtttgcacgatactgtatagtaactaaatgcatgctactccgttgtatcctagttattttagaaacagaggtggcctaatttggtggccaaagtaactggtttactttgagtgtaccagcttatggtgccattgatgaggaattaaagtaggtcaaaatttaattggagttggtattacttcgtaaagctagttttcaagaggaagaaaaccacacttactaatgttttctgtatctaatcaaatactcttcatatataattaagcctcatgttatcttttttttaaatcaaccttttgaacttcaactacagtctaaaagtcttgatggtaactatagtgtaattatctttttgtctcactggattttatagttagtggaaaatgcctttacaaaatgtatttaaaatagctgtcatctcatttgtaaattttgtcgtgtattgtgatatagtgaaccttattgtccttatgaaatggtagctttgtgaaatacattcaccaaaaatcaaaatttgaacatctttatgattccttaccagctgaagccagatagacaggtattaattgagctgatgccccacttgagtttatagactgtttgataactgcctgtcctccaaattgtgtatgtatatgttacgatggtttaattcttgagtcagggccagcacgcatttatattttctaccaattaccttgatagaaatatcttagaaattgctgacctggaacggttgtgagaagactcctggcttctttcttgcctcacttaacaaatattttaaggtcaaagcaatatctgtgcacggctttccttttgctcctccagacaagtgaggctgttggtatagtcctcttcaccctctgcatgtagcttcaccctagatcagacttttgtctcttgggtcccagatggcacaggagcactgcatgcttgttttctagagcccagccagtcatgggtgctagcctagtctccacacaccagcaagtagaacccaagtgtattgtataaatatttcctgagtaccagtaagagaatgcattcttttctcatctaggccaggaatgttgaaaatgctcagccttacatagaaactcctagattttcactaacgcatttcacaaaagtaaataagtatttcatataattcagaggatgtttaaattgtcagcattttaataaatacttgcattataattttgtctcttttttaaagaaagtcatacttgaatataatttattaaacgttcaatggagtatatagtctatttgaaatttt

SEQ ID NO: 18042 - DNA, 1186 bp, Homo sapiens
  source 1..1186: mol_type = unassigned DNA
aaacttccgagttaagccgccgctgaggccggaaggagctagacggcggtcgggtggaaagtggttggtttctgataacttcctaaacatcaccaatgtagcttttgatgaccgtgggctctatacctgtttcgtcacctctccaattcgtgcctcctactctgtcaccctacgtgttatcttcacctcgggagacatgagtgtctattacatgattgtttgcctgattgcctttacaatcacactcatcttgaatgtcacacggctgtgcatgatgagcagccatcttcgcaagactgagaaggctatcaatgagttctttagaactgaaggggctgagaaacttcagaaggcctttgagattgcaaaacgtatccccatcattacctcagccaaaactctggagctcgccaaagtcacacaatttaagaccatggagtttgctcgttatattgaagaactggcaagaagtgtccctcttccacctcttattctaaactgtcgagcctttgttgaggagatgtttgaggctgtgcgagtggacgaccctgatgacctgggtgaaagaattaaagagagacctgccttgaatgctcaaggtggcatctatgtcattaacccagagatgggacggagtaattcaccaggaggagattcagatgatggctctctgaatgaacaaggccaggaaatagcagttcaggtttctgtccaccttcagtcagaaaccaaaagtattgatacagagtctcaaggcagcagtcatttcagtccacctgatgatataggatctgcagaatctaactgtaactacaaagatggggcatatgaaaactgtcagctgtaacctacaatgctgtaacccagtacctacaaaatcagctcgctctcagaaaaggaacctgtttcttagaagaagtaacatttttgccaaaagatgactggggttttccgtttgttaatattaagcacatcagaacgtgaattgccaaagtcttcattagaaggcagcatttttcctctctgatacttttcagtcattttccttagagctttattaaattatgcatgctaagatttaaaggagccccagataaacatgatggggaaaagcactgaactaagagtcccatggtttctcttctggtcacagttcttccattggttggatctgatacttatcttg

SEQ ID NO: 18043 - DNA, 520 bp, Homo sapiens
  source 1..520: mol_type = unassigned DNA
agacggcggtcgggtaggtgacggcttggttggggtcgctgcgaggggactactaggagcgccgaggcgtgagtcgtagcctgtggcttggggtcgggagtgcaggaggcgaaaatgtttgccattcttttgaaagtctggcctgggtgtgggagttcggtcatcgaacacttactgagagccagatacctgccaggcactgccctgggctccagggacacatcagtcaacgaacggaagggccctgctctcaagcagtgcgaaaagcagattataaacaagtcaacaaacgggattatctaaggttctctactcacatcttttaatcttgaagactagaaaatataactggatctaccacttgtttggaaaatttctctaccaagcaataaattacccgctgtgcttttgttgtagtgtagaagtttttgagttctccaaatctaaacaagattttgtcccattttcccatgaagctacattgttgcttattcactttagtggcaagtattattgtgcc

SEQ ID NO: 18044 - DNA, 567 bp, Homo sapiens
  source 1..567: mol_type = unassigned DNA
gagctagacggcggtcgggtaggtgacggcttggttggggtcgctgcgaggggactactaggagcgccgaggcgttctctactcacatcttttaatcttgaagactagaaaatataactggatctaccacttgtttggaaaatttctctaccaagcaataaattacccgctgtgcttttgttgtagtgtagaagtttttgagttctccaaatctaaacaagattttgtcccattttcccatgaagctacattgttgcttattcactttagtggcaagtattattgtgccagctgcttttgttttggaagatgtggacttcgaccaaatggtttcactggaagcaaatcgtagttcttacaatgcatcctttccctcaagctttgaactctcagcaagttcccactcggatgatgatgtcatcatagccaaagagggaactagcgtttcaattgagtgtcttctcacagccagtcactatgaagatgtccattggcacaattcaaaaggacagcaactggatggcagaagcagaggtggaaagtggttggtttctgataacttcctaa

SEQ ID NO: 18045 - DNA, 643 bp, Homo sapiens
  source 1..643: mol_type = unassigned DNA
ctactgccccggaagtgctccttcagcgcagaggcgtgccggtgtgtccgagaaaacttccgagttaagccgccgctgaggccggaaggagctagacggcggtcgggttctctactcacatcttttaatcttgaagactagaaaatataactggatctaccacttgtttggaaaatttctctaccaagcaataaattacccgctgtgcttttgttgtagtgtagaagtttttgagttctccaaatctaaacaagattttgtcccattttcccatgaagctacattgttgcttattcactttagtggcaagtattattgtgccagctgcttttgttttggaagatgtggacttcgaccaaatggtttcactggaagcaaatcgtagttcttacaatgcatcctttccctcaagctttgaactctcagcaagttcccactcggatgatgatgtcatcatagccaaagagggaactagcgtttcaattgagtgtcttctcacagccagtcactatgaagatgtccattggcacaattcaaaaggacagcaactggatggcagaagcagaggtggaaagtggttggtttctgataacttcctaaacatcaccaatgtagcttttgatgaccgtgggctctatacctg

SEQ ID NO: 18046 - DNA, 1873 bp, Homo sapiens
  source 1..1873: mol_type = unassigned DNA
cggctggcgggggcccagcgcataactctgggcggttgcagtctggggccgcagacacccagccactctgagcagaactgacagcatgaaggcactcctggccctgccgctgctgctgcttctctccacgcccccgtgtgccccccaggtctccgggatccgaggagatgctctggagaggttttgccttcagcaacccctggactgtgacgacatctatgcccagggctaccagtcagacggcgtgtacctcatctacccctcgggccccagtgtgcctgtgcccgtcttctgtgacatgaccaccgagggcgggaagtggacggttttccagaagagattcaatggctcagtaagtttcttccgcggctggaatgactacaagctgggcttcggccgtgctgatggagagtactggctggggctgcagaacatgcacctcctgacactgaagcagaagtatgagctgcgagtggacttggaggactttgagaacaacacggcctatgccaagtacgctgacttctccatctccccgaacgcggtcagcgcagaggaggatggctacaccctctttgtggcaggctttgaggatggcggggcaggtgactccctgtcctaccacagtggccagaagttctctaccttcgaccgggaccaggacctctttgtgcagaactgcgcagctctctcctcaggagccttctggttccgcagctgccactttgccaacctcaatggcttctacctaggtggctcccacctctcttatgccaatggcatcaactgggcccagtggaagggcttctactactccctcaaacgcactgagatgaaaatccgccgggcctgaagggctggccccctcaggcacctttcctcccctggacacccatggtctccatgagtgctccctctgctgcccctgatgcatgcttctgctgattcccgagcaccaactccttacaagggggccttgtggctctcagccatgccacatccctgtcacacacccagggcatccattcctaagccagacccggctcccctacacctgaagttacactgccagcagttccccaggcctcttccgagaggcacatggttctagcctggacctggctgggctccatgagaatgagttgcctccaacctgtcccaacagctgacagccaggagccactctcccagctgcaggcctttgtggtccatcttgtcctgcttcctcactgtggacccctgtctgggccaccctagtgtgctaagctgagcagtgcagtgtgaacagggcccatggtgtattctaggccacagcccagcactcctctgggctgctctcaaaccatgtcccatcttcagcatccctcccaccaacttactcccctgtggtgagtaccgtggaaccccagcccacctcactatcatactcagcttcccctgatggcccatcccagcccctgaagctctatgccaagaacacagctaccgcacaccaccctgaaacagccacagccaaggtaggcatgcatatgaggtcttccccataccctctgggtgttgagaggtttagccacatgagggagcagaggacaatctctgcagggctgggagtgggtagggactgaaggtctcaataaaccttcagaacctgaatgaactggcttcatacacacaaacatatttgtttatcccccaaatgtaggcacctggctcctccttgctcccctgctgatggtgtcctaccccgaactccaaaaattacacctggagtcaggtgcagaagggaaccttgtatttcacaggcctcattttgatggcaaaaagacagtgtaataataacataataataataaaaatataatactgaaaagga

SEQ ID NO: 18047 - DNA, 1903 bp, Homo sapiens
  source 1..1903: mol_type = unassigned DNA
gacagcatgaaggtacggggcccagggtcgggggactcatagcatgggggaactgagcccactccagaggcccctggccacagagggcactatgaaggcacaaggagttctcttgaaactcgcactcctggccctgccgctgctgctgcttctctccacgcccccgtgtgccccccaggtctccgggatccgaggagatgctctggagaggttttgccttcagcaacccctggactgtgacgacatctatgcccagggctaccagtcagacggcgtgtacctcatctacccctcgggccccagtgtgcctgtgcccgtcttctgtgacatgaccaccgagggcgggaagtggacggttttccagaagagattcaatggctcagtaagtttcttccgcggctggaatgactacaagctgggcttcggccgtgctgatggagagtactggctggggctgcagaacatgcacctcctgacactgaagcagaagtatgagctgcgagtggacttggaggactttgagaacaacacggcctatgccaagtacgctgacttctccatctccccgaacgcggtcagcgcagaggaggatggctacaccctctttgtggcaggctttgaggatggcggggcaggtgactccctgtcctaccacagtggccagaagttctctaccttcgaccgggaccaggacctctttgtgcagaactgcgcagctctctcctcaggagccttctggttccgcagctgccactttgccaacctcaatggcttctacctaggtggctcccacctctcttatgccaatggcatcaactgggcccagtggaagggcttctactactccctcaaacgcactgagatgaaaatccgccgggcctgaagggctggccccctcaggcacctttcctcccctggacacccatggtctccatgagtgctccctctgctgcccctgatgcatgcttctgctgattcccgagcaccaactccttacaagggggccttgtggctctcagccatgccacatccctgtcacacacccagggcatccattcctaagccagacccggctcccctacacctgaagttacactgccagcagttccccaggcctcttccgagaggcacatggttctagcctggacctggctgggctccatgagaatgagttgcctccaacctgtcccaacagctgacagccaggagccactctcccagctgcaggcctttgtggtccatcttgtcctgcttcctcactgtggacccctgtctgggccaccctagtgtgctaagctgagcagtgcagtgtgaacagggcccatggtgtattctaggccacagcccagcactcctctgggctgctctcaaaccatgtcccatcttcagcatccctcccaccaacttactcccctgtggtgagtaccgtggaaccccagcccacctcactatcatactcagcttcccctgatggcccatcccagcccctgaagctctatgccaagaacacagctaccgcacaccaccctgaaacagccacagccaaggtaggcatgcatatgaggtcttccccataccctctgggtgttgagaggtttagccacatgagggagcagaggacaatctctgcagggctgggagtgggtagggactgaaggtctcaataaaccttcagaacctgaatgaactggcttcatacacacaaacatatttgtttatcccccaaatgtaggcacctggctcctccttgctcccctgctgatggtgtcctaccccgaactccaaaaattacacctggagtcaggtgcagaagggaaccttgtatttcacaggcctcattttgatggcaaaaagacagtgtaataataacataataataataaaaatataatactgaaaagga

SEQ ID NO: 18048 - DNA, 901 bp, Homo sapiens
  source 1..901: mol_type = unassigned DNA
tcgtgacaaagcaaattgtctggtatcatgaatttggaacaccattccagaccaaaattgaaaaaatggttgacctcacccaggtaatggatgatgaagtattcatggcttttgcatcctatgcaacaattattctttcaaaaatgatgcttatgagtactgcaactgcattctatagattgacaagaaaggtttttgccaatccagaagactgtgtagcatttggcaaaggagaaaatgccaagaagtatcttcgaacagatgacagagtagaacgtgtacgcagagcccacctgaatgaccttgaaaatattattccatttcttggaattggcctcctgtattccttgagtggtcccgacccctctacagccatcctgcacttcagactatttgtcggagcacggatctaccacaccattgcatatttgacaccccttccccagccaaatagagctttgagtttttttgttggatatggagttactctttccatggcttacaggttgctgaaaagtaaattgtacctgtaaagaaaatcatacaactcagcatccagttggctttttaagaattctgtacttccaatttataatgaatactttcttagattttaggtaggaggggagcagaggaattatgaactggggtaaacccattttgaatattagcattgccaatatcctgtattcttgttttacatttggattagaaatttaacatagtaattcttaagtcttttgtctgatttttaaagtactttcttataaatttggatcatgttatgatttgtaacattcacacaacacctcacttttgaatctataaaagaattgcacgtatgagaaacctatatttcaatactgctgaaacagacatgaaataaagaatttaaagaatg

SEQ ID NO: 18049 - DNA, 909 bp, Homo sapiens
  source 1..909: mol_type = unassigned DNA
gaattcaagtcctaaagcctacagttttgaatactactgaaatgacaagttattccagaccaaaattgaaaaaatggttgacctcacccaggtaatggatgatgaagtattcatggcttttgcatcctatgcaacaattattctttcaaaaatgatgcttatgagtactgcaactgcattctatagattgacaagaaaggtttttgccaatccagaagactgtgtagcatttggcaaaggagaaaatgccaagaagtatcttcgaacagatgacagagtagaacgtgtacgcagagcccacctgaatgaccttgaaaatattattccatttcttggaattggcctcctgtattccttgagtggtcccgacccctctacagccatcctgcacttcagactatttgtcggagcacggatctaccacaccattgcatatttgacaccccttccccagccaaatagagctttgagtttttttgttggatatggagttactctttccatggcttacaggttgctgaaaagtaaattgtacctgtaaagaaaatcatacaactcagcatccagttggctttttaagaattctgtacttccaatttataatgaatactttcttagattttaggtaggaggggagcagaggaattatgaactggggtaaacccattttgaatattagcattgccaatatcctgtattcttgttttacatttggattagaaatttaacatagtaattcttaagtcttttgtctgatttttaaagtactttcttataaatttggatcatgttatgatttgtaacattcacacaacacctcacttttgaatctataaaagaattgcacgtatgagaaacctatatttcaatactgctgaaacagacatgaaataaagaatttaaagaatg

SEQ ID NO: 18050 - DNA, 979 bp, Homo sapiens
  source 1..979: mol_type = unassigned DNA
ggcagatggaagacttgggggggtctctgccagctggaagtgcttggctccacttagcagctaaacttagcttttcaatcgatcgcttttgaaagggaattgtatttctgtccccgtgcggattccagaccaaaattgaaaaaatggttgacctcacccaggtaatggatgatgaagtattcatggcttttgcatcctatgcaacaattattctttcaaaaatgatgcttatgagtactgcaactgcattctatagattgacaagaaaggtttttgccaatccagaagactgtgtagcatttggcaaaggagaaaatgccaagaagtatcttcgaacagatgacagagtagaacgtgtacgcagagcccacctgaatgaccttgaaaatattattccatttcttggaattggcctcctgtattccttgagtggtcccgacccctctacagccatcctgcacttcagactatttgtcggagcacggatctaccacaccattgcatatttgacaccccttccccagccaaatagagctttgagtttttttgttggatatggagttactctttccatggcttacaggttgctgaaaagtaaattgtacctgtaaagaaaatcatacaactcagcatccagttggctttttaagaattctgtacttccaatttataatgaatactttcttagattttaggtaggaggggagcagaggaattatgaactggggtaaacccattttgaatattagcattgccaatatcctgtattcttgttttacatttggattagaaatttaacatagtaattcttaagtcttttgtctgatttttaaagtactttcttataaatttggatcatgttatgatttgtaacattcacacaacacctcacttttgaatctataaaagaattgcacgtatgagaaacctatatttcaatactgctgaaacagacatgaaataaagaatttaaagaatg

SEQ ID NO: 18051 - DNA, 914 bp, Homo sapiens
  source 1..914: mol_type = unassigned DNA
cctgcattgcgcgcgacccggcggcgggacaggcttgctgcttcctcctcctcggcctcaccattccagaccaaaattgaaaaaatggttgacctcacccaggtaatggatgatgaagtattcatggcttttgcatcctatgcaacaattattctttcaaaaatgatgcttatgagtactgcaactgcattctatagattgacaagaaaggtttttgccaatccagaagactgtgtagcatttggcaaaggagaaaatgccaagaagtatcttcgaacagatgacagagtagaacgtgtacgcagagcccacctgaatgaccttgaaaatattattccatttcttggaattggcctcctgtattccttgagtggtcccgacccctctacagccatcctgcacttcagactatttgtcggagcacggatctaccacaccattgcatatttgacaccccttccccagccaaatagagctttgagtttttttgttggatatggagttactctttccatggcttacaggttgctgaaaagtaaattgtacctgtaaagaaaatcatacaactcagcatccagttggctttttaagaattctgtacttccaatttataatgaatactttcttagattttaggtaggaggggagcagaggaattatgaactggggtaaacccattttgaatattagcattgccaatatcctgtattcttgttttacatttggattagaaatttaacatagtaattcttaagtcttttgtctgatttttaaagtactttcttataaatttggatcatgttatgatttgtaacattcacacaacacctcacttttgaatctataaaagaattgcacgtatgagaaacctatatttcaatactgctgaaacagacatgaaataaagaatttaa

SEQ ID NO: 18052 - DNA, 298 bp, Homo sapiens
  source 1..298: mol_type = unassigned DNA
tcgtgacaaagcaaattgtctggtatcatgaatttggaacaccattccagaccaaaattgaaaaaatggttgacctcacccaggtaatggatgatgaagtattcatggcttttgcatcctatgcaacaattattctttcaaaaatgatgcttatgagtactgcaactgcattctatagattgacaagaaaggtttttgccaatccagaagactgtgtagcatttggcaaaggagaaaatgccaagaagtatcttcgaacagatgacagagtagaacgtgtacgcagagcccacctgaa

SEQ ID NO: 18053 - DNA, 202 bp, Homo sapiens
  source 1..202: mol_type = unassigned DNA
gtacctgtgaaggggaagatgttaccctggagagatggttcattgactcatcagattccagaccaaaattgaaaaaatggttgacctcacccaggtaatggatgatgaagtattcatggcttttgcatcctatgcaacaattattctttcaaaaatgatgcttatgagtactgcaactgcattctatagattgacaagaaag

SEQ ID NO: 18054 - DNA, 365 bp, Homo sapiens
  source 1..365: mol_type = unassigned DNA
ggggtctctgccagctggaagtgcttggctccacttagcagctaaacttagcttttcaatcgatcgcttttgaaagggaattgtatttctgtccccgtgcggattccagaccaaaattgaaaaaatggttgacctcacccaggtaatggatgatgaagtattcatggcttttgcatcctatgcaacaattattctttcaaaaatgatgcttatgagtactgcaactgcattctatagattgacaagaaaggtttttgccaatccagaagactgtgtagcatttggcaaaggagaaaatgccaagaagtatcttcgaacagatgacagagtagaacgtgtacgcagagcccacctgaatgaccttg

SEQ ID NO: 18055 - DNA, 1331 bp, Homo sapiens
  source 1..1331: mol_type = unassigned DNA
tcctcctcggcctcaccattccagaccaaaattgaaaaaatggttgacctcacccaggtaatggatgatgaagtattcatggcttttgcatcctatgcaacaattattctttcaaaaatgatgcttatgagtactgcaactgcattctatagattgacaagaaaggtttttgccaatccagaagactgtgtagcatttggcaaaggagaaaatgccaagaagtatcttcgaacagatgacagagtagaacgtgtacgcagaatcaaacaaaccctgagcatttatcttgcctcttctatataaagtttaactcggcataaccaattgctgatgaagaagaaatgtttccttgtagaagcaaaccagtgaataattgaagaaaaaatttatcttttcaacatctaatgagttaatggattcaagcaaagattatccacggctgttaacaacacaaaaagacaatcggaaattagctattactgcgggaagtacccaataccatctatgaaactgtgtggacaaaaacactgacaaaaatctccacgaatctctaattttgaatacaaatttaaagaaaatgcaaaggattaaaatagaccatgatgaagtcagaaaaattcagacagagaaaaatgctccaggaccagaaacccatttcttccgcaaaagcttccaggtagagattgactgaccgagagaacagagacatagagagaacctagagattaaaagaaacttgagcgatttgtcagcattcagttgcaacgtatggatgtgatttgaattctaatttaaaaaccaaagtagaaagtggtaaacaattggggaaatgtgaacaatgatagaatatttaatattaatgaaatatgttaaatattttcagatatgataatggcattgagtatgtaaaaaagagcctgtttttaaagaaatacctctgaaatacagatgatataatatcatctgtatattagatgatattatatatatcagtatcatcagaataaagtaaggttagcatgaattgttaattgttgacactgtgcaataggtacgtggataattactatactgttctcattccttttatttatgtttgaaatgttctaaaattaaaagttaaagcatagagtgtaaagttgagcaaattcctccaagacctaaatatagcttatcaaaacttacattaattagatgctgactgttgagctaatacttttttttaatgatgtgtgcttcagtttattgcacttttcaaatactccagttttttgtgtgcgtgtgttttttaaattttattattattaaagttttagggtacatgtgcacaa

SEQ ID NO: 18056 - DNA, 801 bp, Homo sapiens
  source 1..801: mol_type = unassigned DNA
gctggccgtgggagaggcttaaaacaaacgccggaagcaactcccagccccataaagatctgtgaccggcagccccagacctgcctgccttcctgacttctgttccagagcaaaggtcattcagccgcttgaatcagccttttccccccacccggtccccaactttgtttacccgataaggaaggtcagcattcaaagtcaagaagcgccatttatcttcccgtgcgctctacaaatagttccgtgagaaagatggccgggaactcgatcctgctggctgctgtctctattctctcggcctgtcagcaaagttattttgctttgcaagttggaaaggcaagattaaaatacaaagttacgcccccagcagtcactgggtcaccagagtttgagagagtatttcgggcacaacaaaactgtgtggagttttatcctatattcataattacattgtggatggctgggtggtatttcaaccaagtttttgctacttgtctgggtctggtgtacatatatggccgtcacctatacttctggggatattcagaagctgctaaaaaacggatcaccggtttccgactgagtctggggattttggccttgttgaccctcctaggtgccctgggaattgcaaacagctttctggatgaatatctggacctcaatattgccaagaaactgaggcggcaattctaactttttctcttccctttaatacttgcagaagctgttcccaccatgaaggtaatatggtatcatttgttaaataaaaataaagtctttattctgtttttcttgaaa

SEQ ID NO: 18057 - DNA, 1780 bp, Homo sapiens
  source 1..1780: mol_type = unassigned DNA
aaagatggccgggaactcgatcctgctggctgctgtctctattctctcggcctgtcagcaaagttattttgctttgcaagttggaaaggcaagattaaaatacaaagttacgcccccagcagtcactgggtcaccagagtttgagagagtatttcgggcacaacaaaactgtgtggagttttatcctatattcataattacattgtggatggctgggtggtatttcaaccaagtttttgctacttgtctgggtctggtgtacatatatggccgtcacctatacttctggggatattcagaagctgctaaaaaacggatcaccggtttccgactgagtctggggattttggccttgttgaccctcctaggtgccctgggaattgcaaacagctttctggatgaatatctggacctcaatattgccaagaaactgaggcggcaattctaactttttctcttccctttaatacttgcagaagctgttcccaccatgaagttattggtttcttgaactctttggggcacaatttcaagaggaagaagtaaaaaaaggataccatttcaaggaattgcccagggacaagtgcgaagagaatattctttctcttggctgaggaaggttctcttgtgatcctgggaaatgctagaccgtgagcatcttgatggaggatgtgaactgccacttcctcacaggcagcaggcaggtgctgaataagtgcttgctgaatgaatgaatgaatcacgccaaggggcatgttacctgttccgccaaaatctgctgctgctgctgctgctgctgctgcctttgctcccgcaggaactgttgcttctgctgctctatcaactgggcccgctgatcaatgagcatctgcttcatgatggctgcttggggctggctgcccaggaagccggggcctgcgggactggctcctgagaccatgccacctgagcctgggggcacggaggactgcatggggcctgtggttcggggaagtccaactggatgctgctcctgggaagacaagagagagggagatgcagggattccccatagagactcactgctgtttgaagggaagcccctggaaaaagggaacggggcagaagtcccagcttatggactggagggtttttgagtggcacgcattgcatttccataaacgtagcttcaaacccgaccttacctgagtagaatgagagaggccacaagggacagtaagagagcatggctctgggaagtccaaggccaagtccagtctgtttcggatgggactgactattgcatatagactggattttcaactaacatcctgtgttcctccaaggaaagggaataagccctcaggctgagctcacctaaagtctggaacacgagacacatcctgacctcacctgttaatccttatttcttactgtctacttggccaaaatggacgtcttctttgcaagtaggagggacatttgcagaaaactgcaggaatttgttaatcaacagatctgatatttgatggaattctaacgagttgcaacatttgagagcttagatatatgtcagaaagaaaaatcctcctggccagagttgttgatggtgagaactgggaatgttttacaccgatcaaagctatgtaatctcctaatatttttaaaaatagaattgagtcggccgggcgcggtgtctcacgcctgtaatcccagtactttgggaggcccagtactttgggtggatcacgaggtcagttcgagaccagcttggccaagatggtgaaaccctgtctctact

SEQ ID NO: 18058 - DNA, 634 bp, Homo sapiens
  source 1..634: mol_type = unassigned DNA
ggcagccccagacctgcctgccttcctgacttctgttccagagcaaaggtcattcagccgcttgaatcagccttttccccccacccggtccccaactttgtttacccgataaggaaggtcagcattcaaagtcaagaagcgccatttatcttcccgtgcgctctacaaatagttccgtgagaaagatggccgggaactcgatcctgctggctgctgtctctattctctcggcctgtcagcaaagttattttgctttgcaagttggaaaggcaagattaaaatacaaagttacgcccccagcagtcactgggtcaccagagtttgagagagtatttcgggcacatttttgctacttgtctgggtctggtgtacatatatggccgtcacctatacttctggggatattcagaagctgctaaaaaacggatcaccggtttccgactgagtctggggattttggccttgttgaccctcctaggtgccctgggaattgcaaacagctttctggatgaatatctggacctcaatattgccaagaaactgaggcggcaattctaactttttctcttccctttaatacttgcagaagctgttcccaccatgaaggtaatatggtatcatttgttaaataaaa

SEQ ID NO: 18059 - DNA, 706 bp, Homo sapiens
  source 1..706: mol_type = unassigned DNA
attccccgaagttgtggcttctgctgatactttccttgagagtcacgagtttacaagctacataatagcgtcgggggcaaggacaggagatgccctggaggggaaggcgcttccggctctgcagacgcaagatggctgtcctctctaaggaatatggttttgtgcttctaactggtgctgccagctttataatggtggcccacctagccatcaatgtttccaaggcccgcaagaagtacaaagtggagtatcctatcatgtacagcacggaccctgaaaatgggcacatcttcaactgcattcagcgagcccaccagaacacgttggaagtgtatcctcccttcttattttttctagctgttggaggtgtttaccacccgcgtatagcttctggcctgggcttggcctggattgttggacgagttctttatgcttatggctattacacgggagaacccagcaagcgtagtcgaggagccctggggtccatcgccctcctgggcttggtgggcacaactgtgtgctctgctttccagcatcttggttgggttaaaagtggcttgggcagtggacccaaatgctgccattaaagaattataggggtttaaaaactctcattcattttaaatgacttacctttatttccagttacattttttttctaaatataataaaaacttacctggcatcagcctcatacctaaaa

SEQ ID NO: 18060 - DNA, 717 bp, Homo sapiens
  source 1..717: mol_type = unassigned DNA
gcagttttgttctgctccagctgttcgaaggtgatccagggacagatcttccatcctcctaacatatagttagcttccactctccaaatattccaccagcaacattgatgaatattgaagactatggactgtgagacgcaagatggctgtcctctctaaggaatatggttttgtgcttctaactggtgctgccagctttataatggtggcccacctagccatcaatgtttccaaggcccgcaagaagtacaaagtggagtatcctatcatgtacagcacggaccctgaaaatgggcacatcttcaactgcattcagcgagcccaccagaacacgttggaagtgtatcctcccttcttattttttctagctgttggaggtgtttaccacccgcgtatagcttctggcctgggcttggcctggattgttggacgagttctttatgcttatggctattacacgggagaacccagcaagcgtagtcgaggagccctggggtccatcgccctcctgggcttggtgggcacaactgtgtgctctgctttccagcatcttggttgggttaaaagtggcttgggcagtggacccaaatgctgccattaaagaattataggggtttaaaaactctcattcattttaaatgacttacctttatttccagttacattttttttctaaatataataaaaacttacctggcatcagcctcatacctaaaa

SEQ ID NO: 18061 - DNA, 680 bp, Homo sapiens
  source 1..680: mol_type = unassigned DNA
cccacaccgcgctgcgcagttttgttctgctccagctgttcgaaggtgatccagggacaggagatgccctggaggggaaggcgcttccggctctgcagacgcaagatggctgtcctctctaaggaatatggttttgtgcttctaactggtgctgccagctttataatggtggcccacctagccatcaatgtttccaaggcccgcaagaagtacaaagtggagtatcctatcatgtacagcacggaccctgaaaatgggcacatcttcaactgcattcagcgagcccaccagaacacgttggaagtgtatcctcccttcttattttttctagctgttggaggtgtttaccacccgcgtatagcttctggcctgggcttggcctggattgttggacgagttctttatgcttatggctattacacgggagaacccagcaagcgtagtcgaggagccctggggtccatcgccctcctgggcttggtgggcacaactgtgtgctctgctttccagcatcttggttgggttaaaagtggcttgggcagtggacccaaatgctgccattaaagaattataggggtttaaaaactctcattcattttaaatgacttacctttatttccagttacattttttttctaaatataataaaaacttacctggcatcagcctcatacctaaaa

SEQ ID NO: 18062 - DNA, 613 bp, Homo sapiens
  source 1..613: mol_type = unassigned DNA
atgccctggaggggaaggcgcttccggctctgcagacgcaagatggctgtcctctctaaggaatatggttttgtgcttctaactggtgctgccagctttataatggtggcccacctagccatcaatgtttccaaggcccgcaagaagtacaaagtggagtatcctatcatgtacagcacggaccctgaaaatgggcacatcttcaactgcattcagcgagcccaccagaacacgttggaagtgtatcctcccttcttattttttctagctgttggaggtgtttaccacccgcgtatagcttctggcctgggcttggcctggattgttggacgagttctttatgcttatggctattacacgggagaacccagcaagcgtagtcgaggagccctggggtccatcgccctcctgggcttggtgggcacaactgtgtgctctgctttccagcatcttggttgggttaaaagtggcttgggcagtggacccaaatgctgccattaaagaattataggggtttaaaaactctcattcattttaaatgacttacctttatttccagttacattttttttctaaatataataaaaacttacctggcatcagcctcatacct

SEQ ID NO: 18063 - DNA, 1015 bp, Homo sapiens
  source 1..1015: mol_type = unassigned DNA
atgcccgtgcttcgcccttacagcagagcgcctaaaaccgctacggtggctctgctggggacaaattattcacgtcccactgttctgcaaacccaatccgggaggtatgacctggctgggacagtttaggaagatggccacgaaggcacctgggggagtagatatatgtttttgagaatgagaggagtaaatcgctggacgaccatgagcaggaagaaaattaggcctccacctcccaaccagtggccctgagttggcaacttagacagcgcgcgccagcgccaggagccccgccttgggggcgtggccgcgcgctggtcggctggggcggggcctgcttctggcctcatctagccccgccccaggcgagggcgccgcacccacaccgcgctgcgcagttttgttctgctccagctgttcgaaggtgatccagacgcaagatggctgtcctctctaaggaatatggttttgtgcttctaactggtgctgccagctttataatggtggcccacctagccatcaatgtttccaaggcccgcaagaagtacaaagtggagtatcctatcatgtacagcacggaccctgaaaatgggcacatcttcaactgcattcagcgagcccaccagaacacgttggaagtgtatcctcccttcttattttttctagctgttggaggtgtttaccacccgcgtatagcttctggcctgggcttggcctggattgttggacgagttctttatgcttatggctattacacgggagaacccagcaagcgtagtcgaggagccctggggtccatcgccctcctgggcttggtgggcacaactgtgtgctctgctttccagcatcttggttgggttaaaagtggcttgggcagtggacccaaatgctgccattaaagaattataggggtttaaaaactctcattcattttaaatgacttacctttatttccagttacattttttttctaaatataataaaaacttacctggcatcagcctcatacctaaaa

SEQ ID NO: 18064 - DNA, 678 bp, Homo sapiens
  source 1..678: mol_type = unassigned DNA
cccacaccgcgctgcgcagttttgttctgctccagctgttcgaaggtgatccaggtgagagatgccctggaggggaaggcgcttccggctctgcagacgcaagatggctgtcctctctaaggaatatggttttgtgcttctaactggtgctgccagctttataatggtggcccacctagccatcaatgtttccaaggcccgcaagaagtacaaagtggagtatcctatcatgtacagcacggaccctgaaaatgggcacatcttcaactgcattcagcgagcccaccagaacacgttggaagtgtatcctcccttcttattttttctagctgttggaggtgtttaccacccgcgtatagcttctggcctgggcttggcctggattgttggacgagttctttatgcttatggctattacacgggagaacccagcaagcgtagtcgaggagccctggggtccatcgccctcctgggcttggtgggcacaactgtgtgctctgctttccagcatcttggttgggttaaaagtggcttgggcagtggacccaaatgctgccattaaagaattataggggtttaaaaactctcattcattttaaatgacttacctttatttccagttacattttttttctaaatataataaaaacttacctggcatcagcctcatacctaaaa

SEQ ID NO: 18065 - DNA, 1098 bp, Homo sapiens
  source 1..1098: mol_type = unassigned DNA
atgccaaggctcacctttgctccgaaggggtggcctcaccccccgacctcactccactggtggcttttccaggagctccccacaccaagtgagaatagcatgccaccaggcctctcaactcccacagcctcgcaggagggggccggtcctgttccagatcccagccagcccacccgtcggcagatccgcctctccagcccggagcgccagcggttgtcctcccttaaccttacccctgacccggaaatggagcctccacccaagcctccccgcagctgctccgccttggcccgccacgccctggagagcagctttgtgggctggggcctgccagtccagagccctcaagctcttgtggccatggagaaggaggaaaaagagagtcccttctccagtgaagaggaagaagaagatgtgcctttggactcagatgtggaacaggccctgcagacctttgccaagacctcaggcaccatgaataactacccaacatggcgtcggactctgctgcgccgtgcgaaggaggaggagatgaagaggttctgcaaggcccagaccatccaacggcgactaaatgagattgaggctgccttgagggagctagaggccgagggcgtgaagctggagctggccttgaggcgccagagcagttccccagaacagcaaaagaaactatgggtaggacagctgctacagctcgttgacaagaaaaacagcctggtggctgaggaggccgagctcatgatcacggtgcaggaattgaatctggaggagaaacagtggcagctggaccaggagctacgaggctacatgaaccgggaagaaaacctaaagacagctgctgatcggcaggctgaggaccaggtcctgaggaagctggtggatttggtcaaccagagagatgccctcatccgcttccaggaggagcgcaggctcagcgagctggccttggggacaggggcccagggctagacgagggtgggccgtctgctttcgttcccacaaagaaagcacctcaccccagcacagtgccacccctgttcatctgggctgcctggcagagagccttgctgtttacaattaaaatgtttctgccac

SEQ ID NO: 18066 - DNA, 3384 bp, Homo sapiens
  source 1..3384: mol_type = unassigned DNA
cccaagactgtccccgctggaggcggtagagggatccagaagtaatgagatgctaatgagtcgcgaataaagcccgggcggcgccccgcgcccctcgcggaagcccacactccgcgcgactccaggcgcacgccccgggccgccccgcatcccagcatccccgcccgatctcggcgtttccgcccccgcccccgcccccgccctcccacccgctcagacctggttgccagcccaacaggaagcggcccctcccggcttcggagccgccgccactcatctctgcccagctgctgccctccccaggaggcctccatggcttcacctacctccaccaacccagcgcatgcccactttgagagcttcctgcaggcccagctgtgccaggacgtgctgagcagcttccaggagctgtgtggggccctggggctggaacccggtggggggctgccccagtaccacaagatcaaggaccagctcaactactggagcgccaagtcactgtggaccaagctggacaagcgagcaggccagcctgtctaccagcagggccgggcctgcaccagcaccaagtgcctggtggtgggtgctggaccttgcgggctgcgggtcgctgtggagctggcgctgctgggggcccgagtggtgctggtggaaaagcgcaccaagttctctcgccacaacgtgctccacctctggcccttcaccatccacgacctgcgggcactcggtgctaagaagttctacgggcgcttctgcaccggcaccctggaccacatcagcatcaggcagctccagctgcttctgctgaaggtagcattgctgctgggggtggaaattcactggggtgtcactttcactggcctccagccccctcctaggaaggggagtggctggcgtgcccagctccaacccaacccccctgcccagctggccaactatgaatttgacgtccttatctcggctgcaggaggtaaattcgtccctgaaggcttcaaagttcgagaaatgcgaggcaaactggccattggcatcacagccaactttgtgaatggacgcaccgtggaggagacacaggtgccggagatcagtggtgtagccaggatctacaaccagagcttcttccagagccttctcaaagccacaggcattgatctggagaacattgtgtactacaaggacgacacccactactttgtgatgacagccaagaagcagtgcctgctgcggctgggggtgctgcgccagcccttctggcccctgggcactggagtggcacggggcttcctggcagcctttgatgcagcctggatggtgaagcggtgggcagagggcgctgagtccctagaggtgttggctgagcgtgagagcctgtaccagcttctgtcacagacatccccagaaaacatgcatcgcaatgtggcccagtatgggctggacccagccacccgctaccccaacctgaacctccgggcagtgacccccaatcaggtacgagacctgtatgatgtgctagccaaggagcctgtgcagaggaacaacgacaagacagatacagggatgccagccaccgggtcggcaggcacccaggaggagctgctacgctggtgccaggagcagacagctgggtacccgggagtccacgtctccgatttgtcttcctcctgggctgatgggctagctctgtgtgccctggtgtaccggctgcagcctggcctgctggaaccctcagagctgcaggggctgggagctctggaagcaactgcttgggcactaaaggtggcagagaatgagctgggcatcacaccggtggtgtctgcacaggccgtggtagcagggagtgacccactgggcctcattgcctacctcagccacttccacagtgccttcaagagcatggcccacagcccaggccctgtcagccaggcctccccagggacctccagtgctgtattattccttagtaaacttcagaggaccctgcagcgatcccgggccaaggaaaatgcagaggatgctggtggcaagaagctgcgcttggagatggaggccgagaccccaagtactgaggtgccacctgacccagagcctggtgtacccctgacacccccatcccaacaccaggaggccggtgctggggacctgtgtgcactttgtggggaacacctctatgtcctggaacgcctctgtgtcaacggccatttcttccaccggagctgcttccgctgccatacctgtgaggccacactgtggccaggtggctacgagcagcacccaggagatggacatttctactgcctccagcacctgccccagacagaccacaaagcggaaggcagcgatagaggccctgagagtccggagctccccacaccaagtgagaatagcatgccaccaggcctctcaactcccacagcctcgcaggagggggccggtcctgttccagatcccagccagcccacccgtcggcagatccgcctctccagcccggagcgccagcggttgtcctcccttaaccttacccctgacccggaaatggagcctccacccaagcctccccgcagctgctccgccttggcccgccacgccctggagagcagctttgtgggctggggcctgccagtccagagccctcaagctcttgtggccatggagaaggaggaaaaagagagtcccttctccagtgaagaggaagaagaagatgtgcctttggactcagatgtggaacaggccctgcagacctttgccaagacctcaggcaccatgaataactacccaacatggcgtcggactctgctgcgccgtgcgaaggaggaggagatgaagaggttctgcaaggcccagaccatccaacggcgactaaatgagattgaggctgccttgagggagctagaggccgagggcgtgaagctggagctggccttgaggcgccagagcagttccccagaacagcaaaagaaactatgggtaggacagctgctacagctcgttgacaagaaaaacagcctggtggctgaggaggccgagctcatgatcacggtgcaggaattgaatctggaggagaaacagtggcagctggaccaggagctacgaggctacatgaaccgggaagaaaacctaaagacagctgctgatcggcaggctgaggaccaggtcctgaggaagctggtggatttggtcaaccagagagatgccctcatccgcttccaggaggagcgcaggctcagcgagctggccttggggacaggggcccagggctagacgagggtgggccgtctgctttcgttcccacaaagaaagcacctcaccccagcacagtgccacccctgttcatctgggctgcctggcagagagccttgctgtttacaattaaaatgtttctgccac

SEQ ID NO: 18067 - DNA, 3645 bp, Homo sapiens
  source 1..3645: mol_type = unassigned DNA
cccaagactgtccccgctggaggcggtagagggatccagaagtaatgagatgctaatgagtcgcgaataaagcccgggcggcgccccgcgcccctcgcggaagcccacactccgcgcgactccaggcgcacgccccgggccgccccgcatcccagcatccccgcccgatctcggcgtttccgcccccgcccccgcccccgccctcccacccgctcagacctggttgccagcccaacaggaagcggcccctcccggcttcggagccgccgccactcatctctgcccagctgctgccctccccaggaggcctccatggcttcacctacctccaccaacccagcgcatgcccactttgagagcttcctgcaggcccagctgtgccaggacgtgctgagcagcttccaggagctgtgtggggccctggggctggaacccggtggggggctgccccagtaccacaagatcaaggaccagctcaactactggagcgccaagtcactgtggaccaagctggacaagcgagcaggccagcctgtctaccagcagggccgggcctgcaccagcaccaagtgcctggtggtgggtgctggaccttgcgggctgcgggtcgctgtggagctggcgctgctgggggcccgagtggtgctggtggaaaagcgcaccaagttctctcgccacaacgtgctccacctctggcccttcaccatccacgacctgcgggcactcggtgctaagaagttctacgggcgcttctgcaccggcaccctggaccacatcagcatcaggcagctccagctgcttctgctgaaggtagcattgctgctgggggtggaaattcactggggtgtcactttcactggcctccagccccctcctaggaaggggagtggctggcgtgcccagctccaacccaacccccctgcccagctggccaactatgaatttgacgtccttatctcggctgcaggaggtaaattcgtccctgaaggcttcaaagttcgagaaatgcgaggcaaactggccattggcatcacagccaactttgtgaatggacgcaccgtggaggagacacaggtgccggagatcagtggtgtagccaggatctacaaccagagcttcttccagagccttctcaaagccacaggcattgatctggagaacattgtgtactacaaggacgacacccactactttgtgatgacagccaagaagcagtgcctgctgcggctgggggtgctgcgccaggactggccagacaccaatcggctgctgggcagtgccaatgtggtgcccgaggctctgcagcgctttacccgggcagctgctgactttgccacccatggcaagctcgggaaactagagtttgcccaggatgcccatgggcagcctgatgtctctgcctttgacttcacgagcatgatgcgggcagagagttctgctcgtgtgcaagagaagcatggcgcccgcctgctgctgggactggtgggggactgcctggtggagcccttctggcccctgggcactggagtggcacggggcttcctggcagcctttgatgcagcctggatggtgaagcggtgggcagagggcgctgagtccctagaggtgttggctgagcgtgagagcctgtaccagcttctgtcacagacatccccagaaaacatgcatcgcaatgtggcccagtatgggctggacccagccacccgctaccccaacctgaacctccgggcagtgacccccaatcaggtacgagacctgtatgatgtgctagccaaggagcctgtgcagaggaacaacgacaagacagatacagggatgccagccaccgggtcggcaggcacccaggaggagctgctacgctggtgccaggagcagacagctgggtacccgggagtccacgtctccgatttgtcttcctcctgggctgatgggctagctctgtgtgccctggtgtaccggctgcagcctggcctgctggaaccctcagagctgcaggggctgggagctctggaagcaactgcttgggcactaaaggtggcagagaatgagctgggcatcacaccggtggtgtctgcacaggccgtggtagcagggagtgacccactgggcctcattgcctacctcagccacttccacagtgccttcaagagcatggcccacagcccaggccctgtcagccaggcctccccagggacctccagtgctgtattattccttagtaaacttcagaggaccctgcagcgatcccgggccaaggaaaatgcagaggatgctggtggcaagaagctgcgcttggagatggaggccgagaccccaagtactgaggtgccacctgacccagagcctggtgtacccctgacacccccatcccaacaccaggaggccggtgctggggacctgtgtgcactttgtggggaacacctctatgtcctggaacgcctctgtgtcaacggccatttcttccaccggagctgcttccgctgccatacctgtgaggccacactgtggccaggtggctacgagcagcacccaggagatggacatttctactgcctccagcacctgccccagacagaccacaaagcggaaggcagcgatagaggccctgagagtccggagctccccacaccaagtgagaatagcatgccaccaggcctctcaactcccacagcctcgcaggagggggccggtcctgttccagatcccagccagcccacccgtcggcagatccgcctctccagcccggagcgccagcggttgtcctcccttaaccttacccctgacccggaaatggagcctccacccaagcctccccgcagctgctccgccttggcccgccacgccctggagagcagctttgtgggctggggcctgccagtccagagccctcaagctcttgtggccatggagaaggaggaaaaagagagtcccttctccagtgaagaggaagaagaagatgtgcctttggactcagatgtggaacaggccctgcagacctttgccaagacctcaggcaccatgaataactacccaacatggcgtcggactctgctgcgccgtgcgaaggaggaggagatgaagaggttctgcaaggcccagaccatccaacggcgactaaatgagattgaggctgccttgagggagctagaggccgagggcgtgaagctggagctggccttgaggcgccagagcagttccccagaacagcaaaagaaactatgggtaggacagctgctacagctcgttgacaagaaaaacagcctggtggctgaggaggccgagctcatgatcacggtgcaggaattgaatctggaggagaaacagtggcagctggaccaggagctacgaggctacatgaaccgggaagaaaacctaaagacagctgctgatcggcaggctgaggaccaggtcctgaggaagctggtggatttggtcaaccagagagatgccctcatccgcttccaggaggagcgcaggctcagcgagctggccttggggacaggggcccagggctagacgagggtgggccgtctgctttcgttcccacaaagaaagcacctcaccccagcacagtgccacccctgttcatctgggctgcctggcagagagccttgctgtttacaattaaaatgtttctgccacaaa

SEQ ID NO: 18068 - DNA, 3678 bp, Homo sapiens
  source 1..3678: mol_type = unassigned DNA
tttagctacaagtacttcagatccagctcagcacctgcagctgacacaggagcctggtccgccaccacccactcaccacgtgccccagccaacgccacttggccaggagcagagctgacctgtaaacacgtttgactgcttgattgggctcttcttataagccagctctgactggattttgaacgcttgaaatcaggctctccacaccattgacttgcagatgcttctgtgagagctgtgatggctaactgatgtttataatgccctccatccaggtagcaagatgtgtgtatgtcttgtctaagccactcatctctgcccagctgctgccctccccaggaggcctccatggcttcacctacctccaccaacccagcgcatgcccactttgagagcttcctgcaggcccagctgtgccaggacgtgctgagcagcttccaggagctgtgtggggccctggggctggaacccggtggggggctgccccagtaccacaagatcaaggaccagctcaactactggagcgccaagtcactgtggaccaagctggacaagcgagcaggccagcctgtctaccagcagggccgggcctgcaccagcaccaagtgcctggtggtgggtgctggaccttgcgggctgcgggtcgctgtggagctggcgctgctgggggcccgagtggtgctggtggaaaagcgcaccaagttctctcgccacaacgtgctccacctctggcccttcaccatccacgacctgcgggcactcggtgctaagaagttctacgggcgcttctgcaccggcaccctggaccacatcagcatcaggcagctccagctgcttctgctgaaggtagcattgctgctgggggtggaaattcactggggtgtcactttcactggcctccagccccctcctaggaaggggagtggctggcgtgcccagctccaacccaacccccctgcccagctggccaactatgaatttgacgtccttatctcggctgcaggaggtaaattcgtccctgaaggcttcaaagttcgagaaatgcgaggcaaactggccattggcatcacagccaactttgtgaatggacgcaccgtggaggagacacaggtgccggagatcagtggtgtagccaggatctacaaccagagcttcttccagagccttctcaaagccacaggcattgatctggagaacattgtgtactacaaggacgacacccactactttgtgatgacagccaagaagcagtgcctgctgcggctgggggtgctgcgccaggactggccagacaccaatcggctgctgggcagtgccaatgtggtgcccgaggctctgcagcgctttacccgggcagctgctgactttgccacccatggcaagctcgggaaactagagtttgcccaggatgcccatgggcagcctgatgtctctgcctttgacttcacgagcatgatgcgggcagagagttctgctcgtgtgcaagagaagcatggcgcccgcctgctgctgggactggtgggggactgcctggtggagcccttctggcccctgggcactggagtggcacggggcttcctggcagcctttgatgcagcctggatggtgaagcggtgggcagagggcgctgagtccctagaggtgttggctgagcgtgagagcctgtaccagcttctgtcacagacatccccagaaaacatgcatcgcaatgtggcccagtatgggctggacccagccacccgctaccccaacctgaacctccgggcagtgacccccaatcaggtacgagacctgtatgatgtgctagccaaggagcctgtgcagaggaacaacgacaagacagatacagggatgccagccaccgggtcggcaggcacccaggaggagctgctacgctggtgccaggagcagacagctgggtacccgggagtccacgtctccgatttgtcttcctcctgggctgatgggctagctctgtgtgccctggtgtaccggctgcagcctggcctgctggaaccctcagagctgcaggggctgggagctctggaagcaactgcttgggcactaaaggtggcagagaatgagctgggcatcacaccggtggtgtctgcacaggccgtggtagcagggagtgacccactgggcctcattgcctacctcagccacttccacagtgccttcaagagcatggcccacagcccaggccctgtcagccaggcctccccagggacctccagtgctgtattattccttagtaaacttcagaggaccctgcagcgatcccgggccaaggaaaatgcagaggatgctggtggcaagaagctgcgcttggagatggaggccgagaccccaagtactgaggtgccacctgacccagagcctggtgtacccctgacacccccatcccaacaccaggaggccggtgctggggacctgtgtgcactttgtggggaacacctctatgtcctggaacgcctctgtgtcaacggccatttcttccaccggagctgcttccgctgccatacctgtgaggccacactgtggccaggtggctacgagcagcacccaggagatggacatttctactgcctccagcacctgccccagacagaccacaaagcggaaggcagcgatagaggccctgagagtccggagctccccacaccaagtgagaatagcatgccaccaggcctctcaactcccacagcctcgcaggagggggccggtcctgttccagatcccagccagcccacccgtcggcagatccgcctctccagcccggagcgccagcggttgtcctcccttaaccttacccctgacccggaaatggagcctccacccaagcctccccgcagctgctccgccttggcccgccacgccctggagagcagctttgtgggctggggcctgccagtccagagccctcaagctcttgtggccatggagaaggaggaaaaagagagtcccttctccagtgaagaggaagaagaagatgtgcctttggactcagatgtggaacaggccctgcagacctttgccaagacctcaggcaccatgaataactacccaacatggcgtcggactctgctgcgccgtgcgaaggaggaggagatgaagaggttctgcaaggcccagaccatccaacggcgactaaatgagattgaggctgccttgagggagctagaggccgagggcgtgaagctggagctggccttgaggcgccagagcagttccccagaacagcaaaagaaactatgggtaggacagctgctacagctcgttgacaagaaaaacagcctggtggctgaggaggccgagctcatgatcacggtgcaggaattgaatctggaggagaaacagtggcagctggaccaggagctacgaggctacatgaaccgggaagaaaacctaaagacagctgctgatcggcaggctgaggaccaggtcctgaggaagctggtggatttggtcaaccagagagatgccctcatccgcttccaggaggagcgcaggctcagcgagctggccttggggacaggggcccagggctagacgagggtgggccgtctgctttcgttcccacaaagaaagcacctcaccccagcacagtgccacccctgttcatctgggctgcctggcagagagccttgctgtttacaattaaaatgtttctgccac

SEQ ID NO: 18069 - DNA, 1902 bp, Homo sapiens
  source 1..1902: mol_type = unassigned DNA
ccaaaatatgtactacccagcgaggcccaggtggtccctgcaaagcagctgcagcctcaggacaggagcagcgtgccggagcactcattgttggctggcacccaggaggagctgctacgctggtgccaggagcagacagctgggtacccgggagtccacgtctccgatttgtcttcctcctgggctgatgggctagctctgtgtgccctggtgtaccggctgcagcctggcctgctggaaccctcagagctgcaggggctgggagctctggaagcaactgcttgggcactaaaggtggcagagaatgagctgggcatcacaccggtggtgtctgcacaggccgtggtagcagggagtgacccactgggcctcattgcctacctcagccacttccacagtgccttcaagagcatggcccacagcccaggccctgtcagccaggcctccccagggacctccagtgctgtattattccttagtaaacttcagaggaccctgcagcgatcccgggccaaggaaaatgcagaggatgctggtggcaagaagctgcgcttggagatggaggccgagaccccaagtactgaggtgccacctgacccagagcctggtgtacccctgacacccccatcccaacaccaggaggccggtgctggggacctgtgtgcactttgtggggaacacctctatgtcctggaacgcctctgtgtcaacggccatttcttccaccggagctgcttccgctgccatacctgtgaggccacactgtggccaggtggctacgagcagcacccaggagatggacatttctactgcctccagcacctgccccagacagaccacaaagcggaaggcagcgatagaggccctgagagtccggagctccccacaccaagtgagaatagcatgccaccaggcctctcaactcccacagcctcgcaggagggggccggtcctgttccagatcccagccagcccacccgtcggcagatccgcctctccagcccggagcgccagcggttgtcctcccttaaccttacccctgacccggaaatggagcctccacccaagcctccccgcagctgctccgccttggcccgccacgccctggagagcagctttgtgggctggggcctgccagtccagagccctcaagctcttgtggccatggagaaggaggaaaaagagagtcccttctccagtgaagaggaagaagaagatgtgcctttggactcagatgtggaacaggccctgcagacctttgccaagacctcaggcaccatgaataactacccaacatggcgtcggactctgctgcgccgtgcgaaggaggaggagatgaagaggttctgcaaggcccagaccatccaacggcgactaaatgagattgaggctgccttgagggagctagaggccgagggcgtgaagctggagctggccttgaggcgccagagcagttccccagaacagcaaaagaaactatgggtaggacagctgctacagctcgttgacaagaaaaacagcctggtggctgaggaggccgagctcatgatcacggtgcaggaattgaatctggaggagaaacagtggcagctggaccaggagctacgaggctacatgaaccgggaagaaaacctaaagacagctgctgatcggcaggctgaggaccaggtcctgaggaagctggtggatttggtcaaccagagagatgccctcatccgcttccaggaggagcgcaggctcagcgagctggccttggggacaggggcccagggctagacgagggtgggccgtctgctttcgttcccacaaagaaagcacctcaccccagcacagtgccacccctgttcatctgggctgcctggcagagagccttgctgtttacaattaaaatgtttctgccac

SEQ ID NO: 18070 - DNA, 887 bp, Homo sapiens
  source 1..887: mol_type = unassigned DNA
gccggtaagtcgtccagcggagccggctgcgagccccgcggccgggtggggtgaggtggggtgcgcttccggggaaacgcagctgcggtcgctcgggaaccacgcctggcagccactcatctctgcccagctgctgccctccccaggaggcctccatggcttcacctacctccaccaacccagcgcatgcccactttgagagcttcctgcaggcccagctgtgccaggacgtgctgagcagcttccaggagctgtgtggggccctggggctggaacccggtggggggctgccccagtaccacaagatcaaggaccagctcaactactggagcgccaagtcactgtggaccaagctggacaagcgagcaggccagcctgtctaccagcagggccgggcctgcaccagcaccaagtgcctggtggtgggtgctggaccttgcgggctgcgggtcgctgtggagctggcgctgctgggggcccgagtggtgctggtggaaaagcgcaccaagttctctcgccacaacgtgctccacctctggcccttcaccatccacgacctgcgggcactcggtgctaagaagttctacgggcgcttctgcaccggcaccctggaccacatcagcatcaggcagctccagctgcttctgctgaaggtagcattgctgctgggggtggaaattcactggggtgtcactttcactggcctccagccccctcctaggaaggggagtggctggcgtgcccagctccaacccaacccccctgcccagctggccaactatgaatttgacgtccttatctcggctgcaggaggtaaattcgtccctgaaggcttcaaagttcgagaaatgcgaggcaaactggccattggcatcacagccaacttt

SEQ ID NO: 18071 - DNA, 3906 bp, Homo sapiens
  source 1..3906: mol_type = unassigned DNA
ctcggctggctaagcctgcgccgggccgcctcgctcgctcccagctctgtcagtggcccgcggggcccgatcgctgcgcccgcggccagggccgaggcaggcctgacccggggccgggcagcccgcgcgactttcggaacatggcaacccgtgtgtgtctcatcccagaaagagaagactttaaccactgtgatgcctgagaatccagtgagtgtgacgtttctccagatacttcatgctgttcacctgtgtcctcgccgcaccactgccgcacacgactcctgaaccatgggggaaaacgaggatgagaagcaggcccaggcggggcaggtttttgagaactttgtccaggcatccacgtgcaaaggtaccctccaggccttcaacattctcacacgacacctggacctagaccctctggaccacagaaacttttattccaagctcaagtccaaggtgaccacctggaaagccaaagccctgtggtacaaattggataagcgtggttcccacaaagagtataagcgagggaagtcgtgcacgaacaccaagtgtctcatagttgggggaggaccctgtggcttgcgcactgccattgaacttgcctacctgggagccaaagtggtcgtggtggagaagagggactccttctcccggaacaacgtgctacacctctggcctttcaccatccatgaccttcgtggcctgggagccaagaagttctatgggaagttctgtgctggctccatcgaccatatcagtattcgccaactacagctcatcctattcaaggtggccctgatgctgggagttgaaatccatgtgaatgtggagttcgtgaaggttctagagcctcctgaagatcaagaaaatcaaaaaattggctggcgggcagaatttctccctacagaccattctctgtcggagtttgagtttgacgtcatcattggtgccgatggccgcaggaacaccctggaagggttcagaagaaaagaattccgtgggaagctggcgattgccatcaccgccaacttcataaacagaaacagcacagcggaagccaaggtggaagagattagtggtgtggctttcatcttcaatcagaaattttttcaggaccttaaagaagaaacaggcatagatcttgagaacattgtttactacaaggactgcacccactattttgtaatgacagccaagaagcagagcctgctcgacaaaggtgtcatcattaacgactacatcgacacagagatgctgctgtgtgcggagaacgtgaaccaagacaacctgctatcctatgcccgggaagctgcagactttgccaccaactaccagctgccatccttagactttgccatgaaccactatgggcagcctgatgtggccatgtttgactttacctgcatgtatgcctcagagaacgcggccctggtgcgggagcggcaggcgcaccagctgctcgtggcccttgtgggtgacagcttgcttgagccattttggcccatgggtacaggctgtgcccgtggcttcctggcagcctttgacacggcatggatggtgaagagctggaaccagggcacccctcccctggagctgctggctgaaagggaaagtctctaccggctgttacctcagacaaccccggagaacatcaacaagaactttgagcagtacacgttggacccagggacacggtacccaaacctcaactcacactgtgtcaggccccatcaggtgaagcatttgtatatcactaaggagctggagcactaccctctcgagagactgggctcggtgaggagatctgtcaacctctccaggaaggagtcagatatccggcccagcaagctcctgacctggtgccagcagcagacagagggctaccagcatgtcaacgtcaccgacctgaccacatcctggcgcagtgggttggccctgtgtgccatcatccaccgcttccggcctgagctcatcaactttgactctttgaatgaagatgatgctgtggagaacaaccagctcgcatttgatgtggccgagcgagagtttgggatccctccagtgaccacgggcaaagagatggcatctgcccaggagcctgacaagctcagcatggtcatgtacctctccaagttctacgagctcttccggggcaccccactgaggcccgtggattcttggcgcaaaaactatggagaaaatgctgacctcagcttggccaaatcatccatttctaataactatctcaacctcacatttccaaggaagaggactccacgggtggatggtcaaaccggagagaatgacatgaacaaacggagacggaagggcttcaccaacctggacgagccttcaaacttttccagccgtagcttgggctccaatcaagagtgtgggagcagtaaggaaggtggaaatcagaacaaagtcaagtccatggcgaatcagctgctggccaagtttgaggagagcactcggaacccctcactcatgaagcaggaacgccgtgtctcagggataggtaagccggtcctgtgctcttcctccggccctcctgttcactcttgctgccccaagccggaggaggccacacccagcccatcacctcctctgaaaaggcagttcccctctgtggtcgtgacggggcacgtgctcagagagctcaagcaagtgtctgctggcagtgagtgcctgagcagaccttggagagccagagccaagtctgacctacagctgggtgggacagaaaatttcgctaccctgccttctacccgcccgagggcgcaggctctttccggggtgctgtggcggctgcagcaagtggaggaaaagattctccagaagagggctcagaacttggccaacagggaatttcacacaaagaacattaaggagaaggcggctcaccttgcctccatgtttggacacggggatttcccgcagaataaactactctctaaaggcctgtctcatactcatcctccatctcctccctctcgccttccgtctcctgatccagctgcttcttcctctccatcaactgttgactctgcttctcctgccagaaaggaaaagaagtcaccttcagggttccattttcatcccagccatttgagaacagtgcatcctcagctgacggtagggaaagtgtccagcggaataggggctgcagctgaagtcctggtcaatctgtacatgaatgatcacagacctaaggcccaggccacctctccagacctggaatctatgcgaaagtcatttccccttaacctgggaggcagcgacacgtgttacttctgtaagaaacgtgtgtacgtgatggaacggctgagcgccgagggccacttcttccaccgggagtgtttccgctgcagcatctgtgccaccaccttgcgcctggccgcctacacctttgactgcgatgaaggcaaattttactgcaagcctcacttcattcactgtaaaaccaatagcaaacaacggaagagacgggcagagttgaagcaacaaagagaggaggaggcaacatggcaagagcaggaagcccctcggagagacactcccaccgaaagttcttgcgcagtggccgccattggcaccctggaaggcagccccccagttcatttcagccttccagtgctacacccacttcttggctgacacacttctgctctaagagtctccctccctttatagaatgtcaaccaaagagtgccctcctcccctctcagcctcctctttagctagcctccccatctcatcacaacgcatgtctgtgacctttggtaatcatttacagtgccacacggaaccctgtattttgcacacagcaaaacaaacaatgtttagctttatttatggtatttgatgctgtaaatggaaataaatattgttctttataaa

SEQ ID NO: 18072 - DNA, 3477 bp, Homo sapiens
  source 1..3477: mol_type = unassigned DNA
aagagaagactttaaccactgtgatgcctgagaatccagtgagtgtgacgtttctccagatacttcatgctgttcacctgtgtcctcgccgcaccactgccgcacacgactcctgaaccatgggggaaaacgaggatgagaagcaggcccaggcggggcaggtttttgagaactttgtccaggcatccacgtgcaaaggtaccctccaggccttcaacattctcacacgacacctggacctagaccctctggaccacagaaacttttattccaagctcaagtccaaggtgaccacctggaaagccaaagccctgtggtacaaattggataagcgtggttcccacaaagagtataagcgagggaagtcgtgcacgaacaccaagtgtctcatagttgggggaggaccctgtggcttgcgcactgccattgaacttgcctacctgggagccaaagtggtcgtggtggagaagagggactccttctcccggaacaacgtgctacacctctggcctttcaccatccatgaccttcgtggcctgggagccaagaagttctatgggaagttctgtgctggctccatcgaccatatcagtattcgccaactacagctcatcctattcaaggtggccctgatgctgggagttgaaatccatgtgaatgtggagttcgtgaaggttctagagcctcctgaagatcaagaaaatcaaaaaattggctggcgggcagaatttctccctacagaccattctctgtcggagtttgagtttgacgtcatcattggtgccgatggccgcaggaacaccctggaagggttcagaagaaaagaattccgtgggaagctggcgattgccatcaccgccaacttcataaacagaaacagcacagcggaagccaaggtggaagagattagtggtgtggctttcatcttcaatcagaaattttttcaggaccttaaagaagaaacaggcatagatcttgagaacattgtttactacaaggactgcacccactattttgtaatgacagccaagaagcagagcctgctcgacaaaggtgtcatcattaacgactacatcgacacagagatgctgctgtgtgcggagaacgtgaaccaagacaacctgctatcctatgcccgggaagctgcagactttgccaccaactaccagctgccatccttagactttgccatgaaccactatgggcagcctgatgtggccatgtttgactttacctgcatgtatgcctcagagaacgcggccctggtgcgggagcggcaggcgcaccagctgctcgtggcccttgtgggtgacagcttgcttgagccattttggcccatgggtacaggctgtgcccgtggcttcctggcagcctttgacacggcatggatggtgaagagctggaaccagggcacccctcccctggagctgctggctgaaagggaaagtctctaccggctgttacctcagacaaccccggagaacatcaacaagaactttgagcagtacacgttggacccagggacacggtacccaaacctcaactcacactgtgtcaggccccatcaggtgaagcatttgtatatcactaaggagctggagcactaccctctcgagagactgggctcggtgaggagatctgtcaacctctccaggaaggagtcagatatccggcccagcaagctcctgacctggtgccagcagcagacagagggctaccagcatgtcaacgtcaccgacctgaccacatcctggcgcagtgggttggccctgtgtgccatcatccaccgcttccggcctgagctcatcaactttgactctttgaatgaagatgatgctgtggagaacaaccagctcgcatttgatgtggccgagcgagagtttgggatccctccagtgaccacgggcaaagagatggcatctgcccaggagcctgacaagctcagcatggtcatgtacctctccaagttctacgagctcttccggggcaccccactgaggcccgtggattcttggcgcaaaaactatggagaaaatgctgacctcagcttggccaaatcatccatttctaataactatctcaacctcacatttccaaggaagaggactccacgggtggatggtcaaaccggagagaatgacatgaacaaacggagacggaagggcttcaccaacctggacgagccttcaaacttttccagccgtagcttgggctccaatcaagagtgtgggagcagtaaggaaggtggaaatcagaacaaagtcaagtccatggcgaatcagctgctggccaagtttgaggagagcactcggaacccctcactcatgaagcaggaacgccgtgtctcagggataggtaagccggtcctgtgctcttcctccggccctcctgttcactcttgctgccccaagccggaggaggccacacccagcccatcacctcctctgaaaaggcagttcccctctgtggtcgtgacggggcacgtgctcagagagctcaagcaagtgtctgctggcagtgagtgcctgagcagaccttggagagccagagccaagtctgacctacagctgggtgggacagaaaatttcgctaccctgccttctacccgcccgagggcgcaggctctttccggggtgctgtggcggctgcagcaagtggaggaaaagattctccagaagagggctcagaacttggccaacagggaatttcacacaaagaacattaaggagaaggcggctcaccttgcctccatgtttggacacggggatttcccgcagaataaactactctctaaaggcctgtctcatactcatcctccatctcctccctctcgccttccgtctcctgatccagctgcttcttcctctccatcaactgttgactctgcttctcctgccagaaagctgacggtagggaaagtgtccagcggaataggggctgcagctgaagtcctggtcaatctgtacatgaatgatcacagacctaaggcccaggccacctctccagacctggaatctatgcgaaagtcatttccccttaacctgggaggcagcgacacgtgttacttctgtaagaaacgtgtgtacgtgatggaacggctgagcgccgagggccacttcttccaccgggagtgtttccgctgcagcatctgtgccaccaccttgcgcctggccgcctacacctttgactgcgatgaaggcaaattttactgcaagcctcacttcattcactgtaaaaccaatagcaaacaacggaagagacgggcagagttgaagcaacaaagagaggaggaggcaacatggcaagagcaggaagcccctcggagagacactcccaccgaaagttcttgcgcagtggccgccattggcaccctggaaggcagccccccagttcatttcagccttccagtgctacacccacttcttggctgacacacttctgctctaagagtctccctccctttatagaatgtcaacc

SEQ ID NO: 18073 - DNA, 2931 bp, Homo sapiens
  source 1..2931: mol_type = unassigned DNA
atgggggaaaacgaggatgagaagcaggcccaggcggggcaggtttttgagaactttgtccaggcatccacgtgcaaaggtaccctccaggccttcaacattctcacacgacacctggacctagaccctctggaccacagaaacttttattccaagctcaagtccaaggtgaccacctggaaagccaaagccctgtggtacaaattggataagcgtggttcccacaaagagtataagcgagggaagtcgtgcacgaacaccaagtgtctcatagttgggggaggaccctgtggcttgcgcactgccattgaacttgcctacctgggagccaaagtggtcgtggtggagaagagggactccttctcccggaacaacgtgctacacctctggcctttcaccatccatgaccttcgtggcctgggagccaagaagttctatgggaagttctgtgctggctccatcgaccatatcagtattcgccaactacagctcatcctattcaaggtggccctgatgctgggagttgaaatccatgtgaatgtggagttcgtgaaggttctagagcctcctgaagatcaagaaaatcaaaaaattggctggcgggcagaatttctccctacagaccattctctgtcggagtttgagtttgacgtcatcattggtgccgatggccgcaggaacaccctggaagggttcagaagaaaagaattccgtgggaagctggcgattgccatcaccgccaacttcataaacagaaacagcacagcggaagccaaggtggaagagattagtggtgtggctttcatcttcaatcagaaattttttcaggaccttaaagaagaaacaggcatagatcttgagaacattgtttactacaaggactgcacccactattttgtaatgacagccaagaagcagagcctgctcgacaaaggtgtcatcattaacgactacatcgacacagagatgctgctgtgtgcggagaacgtgaaccaagacaacctgctatcctatgcccgggaagctgcagactttgccaccaactaccagctgccatccttagactttgccatgaaccactatgggcagcctgatgtggccatgtttgactttacctgcatgtatgcctcagagaacgcggccctggtgcgggagcggcaggcgcaccagctgctcgtggcccttgtgggtgacagcttgcttgagccattttggcccatgggtacaggctgtgcccgtggcttcctggcagcctttgacacggcatggatggtgaagagctggaaccagggcacccctcccctggagctgctggctgaaagggaaagtctctaccggctgttacctcagacaaccccggagaacatcaacaagaactttgagcagtacacgttggacccagggacacggtacccaaacctcaactcacactgtgtcaggccccatcaggtgaagcatttgtatatcactaaggagctggagcactaccctctcgagagactgggctcggtgaggagatctgtcaacctctccaggaaggagtcagatatccggcccagcaagctcctgacctggtgccagcagcagacagagggctaccagcatgtcaacgtcaccgacctgaccacatcctggcgcagtgggttggccctgtgtgccatcatccaccgcttccggcctgagctcatcaactttgactctttgaatgaagatgatgctgtggagaacaaccagctcgcatttgatgtggccgagcgagagtttgggatccctccagtgaccacgggcaaagagatggcatctgcccaggagcctgacaagctcagcatggtcatgtacctctccaagttctacgagctcttccggggcaccccactgaggcccgtggattcttggcgcaaaaactatggagaaaatgctgacctcagcttggccaaatcatccatttctaataactatctcaacctcacatttccaaggaagaggactccacgggtggatggtcaaaccggagagaatgacatgaacaaacggagacggaagggcttcaccaacctggacgagccttcaaacttttccagccgtagcttgggctccaatcaagagtgtgggagcagtaaggaaggtggaaatcagaacaaagtcaagtccatggcgaatcagctgctggccaagtttgaggagagcactcggaacccctcactcatgaagcaggaaaagaagtcaccttcagggttccattttcatcccagccatttgagaacagtgcatcctcaggaatctatgcgaaagtcatttccccttaacctgggaggcagcgacacgtgttacttctgtaagaaacgtgtgtacgtgatggaacggctgagcgccgagggccacttcttccaccgggagtgtttccgctgcagcatctgtgccaccaccttgcgcctggccgcctacacctttgactgcgatgaaggcaaattttactgcaagcctcacttcattcactgtaaaaccaatagcaaacaacggaagagacgggcagagttgaagcaacaaagagaggaggaggcaacatggcaagagcaggaagcccctcggagagacactcccaccgaaagttcttgcgcagtggccgccattggcaccctggaaggcagccccccaggtatctccacctccttctttaggaaggtgctgggctggcccctcaggctgccgagggacctgtgtaactggatgcagggactcctgcaagctgctggcctccatatcagggacaatgcttacaactactgctacatgtacgagctcctgagcctggggctgccactcctctgggcgttctctgaggtcctggcagccatgtacagggaatctgagggctccctcgagagcatctgcaactgggtgctcaggtgcttcccagtcaagctccgctga

SEQ ID NO: 18074 - DNA, 573 bp, Homo sapiens
  source 1..573: mol_type = unassigned DNA
ggtagatggtgtgcttccagctgataccaggagcagaagttttgagaagagactgtttgtcatgtggatagtggaaagccctgctctctggtaacgaatgaagaaaggctttaaagctgggtgtctacggagaggtgtgacgtttctccagatacttcatgctgttcacctgtgtcctcgccgcaccactgccgcacacgactcctgaaccatgggggaaaacgaggatgagaagcaggcccaggcggggcaggtttttgagaactttgtccaggcatccacgtgcaaaggtaccctccaggccttcaacattctcacacgacacctggacctagaccctctggaccacagaaacttttattccaagctcaagtccaaggtgaccacctggaaagccaaagccctgtggtacaaattggataagcgtggttcccacaaagagtataagcgagggaagtcgtgcacgaacaccaagtgtctcatagttgggggaggaccctgtggcttgcgcactgccattgaacttgcctacctgggagccaaagtggtcgtggtggagaagagggactcctt

SEQ ID NO: 18075 - DNA, 566 bp, Homo sapiens
  source 1..566: mol_type = unassigned DNA
agatggtgtgcttccagctgataccaggagcagaagttttgagaagagactgtttgtcatgtggatagtggaaagccctgctctctggtgtgacgtttctccagatacttcatgctgttcacctgtgtcctcgccgcaccactgccgcacacgactcctgaaccatgggggaaaacgaggatgagaagcaggcccaggcggggcaggtttttgagaactttgtccaggcatccacgtgcaaaggtaccctccaggccttcaacattctcacacgacacctggacctagaccctctggaccacagaaacttttattccaagctcaagtccaaggtgaccacctggaaagccaaagccctgtggtacaaattggataagcgtggttcccacaaagagtataagcgagggaagtcgtgcacgaacaccaagtgtctcatagttgggggaggaccctgtggcttgcgcactgccattgaacttgcctacctgggagccaaagtggtcgtggtggagaagagggactccttctcccggaacaacgtgctacacctctggcctttcaccatc

SEQ ID NO: 18076 - DNA, 546 bp, Homo sapiens
  source 1..546: mol_type = unassigned DNA
aatgaaggtccggccctccccagtgtaggaggcaggtaaatgatcacactgtgacaaatgctcaaacggggatgtgcttgcaaaggctagagacagcacgggaggaaggagcagtccattctgctgagagtgtagctcagttccaagaacacttattgatgcttacaccgggccaagccctgtgatgggccctgggttccagaggtgtgacgtttctccagatacttcatgctgttcacctgtgtcctcgccgcaccactgccgcacacgactcctgaaccatgggggaaaacgaggatgagaagcaggcccaggcggggcaggtttttgagaactttgtccaggcatccacgtgcaaaggtaccctccaggccttcaacattctcacacgacacctggacctagaccctctggaccacagaaacttttattccaagctcaagtccaaggtgaccacctggaaagccaaagccctgtggtacaaattggataagcgtggttcccacaaagagtataagcgagggaagtcgtgcacgaacaccaagg

SEQ ID NO: 18077 - DNA, 473 bp, Homo sapiens
  source 1..473: mol_type = unassigned DNA
gaacaaactttctttgcaggattgggtcaaccatggggtctgatttggagatgcttcccttctctgtcagctgctcatgtctcaaatgaagagccttttgtgatgaccatgtatggaatagtgtctgaagtaccactgcactgtacctgtctttgcgtctaaacatcactaccatcatcacgggacaaaccgcccatctcagtggtgtctggcagtgagctgaacatggcaacccgtgtgtgtctcatcccagaaagagaagactttaaccactgtgatgcctgagaatccaagacagagtctcactgcgttgcccaggctggtcttgaactcttggactcaagcaatcctcccaccttggcctcccaaagagcaggaattacaggtgtgacgtttctccagatacttcatgctgttcacctgtgtcctcgccgcaccactgccgcacacgactcctgaaccatgggggaaaa

SEQ ID NO: 18078 - DNA, 589 bp, Homo sapiens
  source 1..589: mol_type = unassigned DNA
accaagactaatgaaggtccggccctccccagtgtaggaggcaggtaaatgatcacactgtgacaaatgctcaaacggggatgtgcttgcaaaggctagagacagcacgggaggaaggagcagtccattctgctgagagtgtgagtaccgagaaagcatggcactgggcttgaaggatgaggagttcgccagacacagaggatgaggagagcagcacgtgtgacgtttctccagatacttcatgctgttcacctgtgtcctcgccgcaccactgccgcacacgactcctgaaccatgggggaaaacgaggatgagaagcaggcccaggcggggcaggtttttgagaactttgtccaggcatccacgtgcaaaggtaccctccaggccttcaacattctcacacgacacctggacctagaccctctggaccacagaaacttttattccaagctcaagtccaaggtgaccacctggaaagccaaagccctgtggtacaaattggataagcgtggttcccacaaagagtataagcgagggaagtcgtgcacgaacaccaagtgtctcatagttgggggaggaccctgtggct

SEQ ID NO: 18079 - DNA, 516 bp, Homo sapiens
  source 1..516: mol_type = unassigned DNA
aatgatgctgattctctcctctgcacagcctcacaatcacctgaatatccccttcaagtgcatcctgccctgggtttcctgtgtgcacattgagtttccttctctagttgaagagagagtttgcagaggctggcaaacctggagctggactgaatggcctggacaggtggagcaggtgtgacgtttctccagatacttcatgctgttcacctgtgtcctcgccgcaccactgccgcacacgactcctgaaccatgggggaaaacgaggatgagaagcaggcccaggcggggcaggtttttgagaactttgtccaggcatccacgtgcaaaggtaccctccaggccttcaacattctcacacgacacctggacctagaccctctggaccacagaaacttttattccaagctcaagtccaaggtgaccacctggaaagccaaagccctgtggtacaaattggataagcgtggttcccacaaagagtataagcgagggaagtcgtgcacgaacaccaag

SEQ ID NO: 18080 - DNA, 593 bp, Homo sapiens
  source 1..593: mol_type = unassigned DNA
ataggggaagagattacctgcaatgccacatcgacaggccaaaaggcacaattctgtatctgttataaatatttatgtttagtattgaacactaaatagtgtggttaatatttgaatgtcttaaagaaattgcatttttacttctcagcacccatcccccaccctaacctcatcgtccaaagctgacctctgcctccccctactttcacaggtgtgacgtttctccagatacttcatgctgttcacctgtgtcctcgccgcaccactgccgcacacgactcctgaaccatgggggaaaacgaggatgagaagcaggcccaggcggggcaggtttttgagaactttgtccaggcatccacgtgcaaaggtaccctccaggccttcaacattctcacacgacacctggacctagaccctctggaccacagaaacttttattccaagctcaagtccaaggtgaccacctggaaagccaaagccctgtggtacaaattggataagcgtggttcccacaaagagtataagcgagggaagtcgtgcacgaacaccaagtgtctcatagttgggggaggaccctgtggcttgcgcactgc

SEQ ID NO: 18081 - DNA, 3585 bp, Homo sapiens
  source 1..3585: mol_type = unassigned DNA
atgcactgaggtaccaagactaatgaaggtccggccctccccagtgtaggaggcaggtaaatgatcacactgtgacaaatgctcaaacggggatgtgcttgcaaaggctagagacagcacgggaggaaggagcagtccattctgctgagagtgtgagtaccgagaaagcatggcactgggcttgaaggatgaggagttcgccagacacagaggatgaggagagcagcacgaacatggcaacccgtgtgtgtctcatcccagaaagagaagactttaaccactgtgatgcctgagaatccagtgagtgtgacgtttctccagatacttcatgctgttcacctgtgtcctcgccgcaccactgccgcacacgactcctgaaccatgggggaaaacgaggatgagaagcaggcccaggcggggcaggtttttgagaactttgtccaggcatccacgtgcaaaggtaccctccaggccttcaacattctcacacgacacctggacctagaccctctggaccacagaaacttttattccaagctcaagtccaaggtgaccacctggaaagccaaagccctgtggtacaaattggataagcgtggttcccacaaagagtataagcgagggaagtcgtgcacgaacaccaagtgtctcatagttgggggaggaccctgtggcttgcgcactgccattgaacttgcctacctgggagccaaagtggtcgtggtggagaagagggactccttctcccggaacaacgtgctacacctctggcctttcaccatccatgaccttcgtggcctgggagccaagaagttctatgggaagttctgtgctggctccatcgaccatatcagtattcgccaactacagctcatcctattcaaggtggccctgatgctgggagttgaaatccatgtgaatgtggagttcgtgaaggttctagagcctcctgaagatcaagaaaatcaaaaaattggctggcgggcagaatttctccctacagaccattctctgtcggagtttgagtttgacgtcatcattggtgccgatggccgcaggaacaccctggaagggttcagaagaaaagaattccgtgggaagctggcgattgccatcaccgccaacttcataaacagaaacagcacagcggaagccaaggtggaagagattagtggtgtggctttcatcttcaatcagaaattttttcaggaccttaaagaagaaacaggcatagatcttgagaacattgtttactacaaggactgcacccactattttgtaatgacagccaagaagcagagcctgctcgacaaaggtgtcatcattaacgactacatcgacacagagatgctgctgtgtgcggagaacgtgaaccaagacaacctgctatcctatgcccgggaagctgcagactttgccaccaactaccagctgccatccttagactttgccatgaaccactatgggcagcctgatgtggccatgtttgactttacctgcatgtatgcctcagagaacgcggccctggtgcgggagcggcaggcgcaccagctgctcgtggcccttgtgggtgacagcttgcttgagccattttggcccatgggtacaggctgtgcccgtggcttcctggcagcctttgacacggcatggatggtgaagagctggaaccagggcacccctcccctggagctgctggctgaaagggaaagtctctaccggctgttacctcagacaaccccggagaacatcaacaagaactttgagcagtacacgttggacccagggacacggtacccaaacctcaactcacactgtgtcaggccccatcaggtgaagcatttgtatatcactaaggagctggagcactaccctctcgagagactgggctcggtgaggagatctgtcaacctctccaggaaggagtcagatatccggcccagcaagctcctgacctggtgccagcagcagacagagggctaccagcatgtcaacgtcaccgacctgaccacatcctggcgcagtgggttggccctgtgtgccatcatccaccgcttccggcctgagctcatcaactttgactctttgaatgaagatgatgctgtggagaacaaccagctcgcatttgatgtggccgagcgagagtttgggatccctccagtgaccacgggcaaagagatggcatctgcccaggagcctgacaagctcagcatggtcatgtacctctccaagttctacgagctcttccggggcaccccactgaggcccgtggattcttggcgcaaaaactatggagaaaatgctgacctcagcttggccaaatcatccatttctaataactatctcaacctcacatttccaaggaagaggactccacgggtggatggtcaaaccggagagaatgacatgaacaaacggagacggaagggcttcaccaacctggacgagccttcaaacttttccagccgtagcttgggctccaatcaagagtgtgggagcagtaaggaaggtggaaatcagaacaaagtcaagtccatggcgaatcagctgctggccaagtttgaggagagcactcggaacccctcactcatgaagcaggaaaagaagtcaccttcagggttccattttcatcccagccatttgagaacagtgcatcctcagctgacggtagggaaagtgtccagcggaataggggctgcagctgaagtcctggtcaatctgtacatgaatgatcacagacctaaggcccaggccacctctccagacctggaatctatgcgaaagtcatttccccttaacctgggaggcagcgacacgtgttacttctgtaagaaacgtgtgtacgtgatggaacggctgagcgccgagggccacttcttccaccgggagtgtttccgctgcagcatctgtgccaccaccttgcgcctggccgcctacacctttgactgcgatgaaggcaaattttactgcaagcctcacttcattcactgtaaaaccaatagcaaacaacggaagagacgggcagagttgaagcaacaaagagaggaggaggcaacatggcaagagcaggaagcccctcggagagacactcccaccgaaagttcttgcgcagtggccgccattggcaccctggaaggcagccccccagttcatttcagccttccagtgctacacccacttcttggctgacacacttctgctctaaggtgactggttttcttgccaattttcaaagagtggtactaacccccaacccgctttccgcaccccgtcctctccgccagcagtactggttgcactaactgtgagtgtcttgcatactgatggactcatttggtggcatggttggctaacagcatggcggggggtgttcagcttgagacccatgcctgtgttcatttcccatggagctggcagcctggtctaccccaagtgcatgccccgcctctcctctctcccttgggtctgcctgcgtgcatgcttctccagttgcgtctgcgaagctacctactttcttgggagggtcgaccttgatcatgaaacaataccatgagggggcctctgtcacctttgaaaagaacacttttt

SEQ ID NO: 18082 - DNA, 1822 bp, Homo sapiens
  source 1..1822: mol_type = unassigned DNA
aggtccggccctccccagtgtaggaggcaggtaaatgatcacactgtgacaaatgctcaaacggggatgtgcttgcaaaggctagagacagcacgggaggaaggagcagtccattctgctgagagtgtgagtaccgagaaagcatggcactgggcttgaaggatgaggagttcgccagacctcaactcacactgtgtcaggccccatcaggtgaagcatttgtatatcactaaggagctggagcactaccctctcgagagactgggctcggtgaggagatctgtcaacctctccaggaaggagtcagatatccggcccagcaagctcctgacctggtgccagcagcagacagagggctaccagcatgtcaacgtcaccgacctgaccacatcctggcgcagtgggttggccctgtgtgccatcatccaccgcttccggcctgagctcatcaactttgactctttgaatgaagatgatgctgtggagaacaaccagctcgcatttgatgtggccgagcgagagtttgggatccctccagtgaccacgggcaaagagatggcatctgcccaggagcctgacaagctcagcatggtcatgtacctctccaagttctacgagctcttccggggcaccccactgaggcccgtggattcttggcgcaaaaactatggagaaaatgctgacctcagcttggccaaatcatccatttctaataactatctcaacctcacatttccaaggaagaggactccacgggtggatggtcaaaccggagagaatgacatgaacaaacggagacggaagggcttcaccaacctggacgagccttcaaacttttccagccgtagcttgggctccaatcaagagtgtgggagcagtaaggaaggtggaaatcagaacaaagtcaagtccatggcgaatcagctgctggccaagtttgaggagagcactcggaacccctcactcatgaagcaggaaaagaagtcaccttcagggttccattttcatcccagccatttgagaacagtgcatcctcagctgacggtagggaaagtgtccagcggaataggggctgcagctgaagtcctggtcaatctgtacatgaatgatcacagacctaaggcccaggccacctctccagacctggaatctatgcgaaagtcatttccccttaacctgggaggcagcgacacgtgttacttctgtaagaaacgtgtgtacgtgatggaacggctgagcgccgagggccacttcttccaccgggagtgtttccgctgcagcatctgtgccaccaccttgcgcctggccgcctacacctttgactgcgatgaaggcaaattttactgcaagcctcacttcattcactgtaaaaccaatagcaaacaacggaagagacgggcagagttgaagcaacaaagagaggaggaggcaacatggcaagagcaggaagcccctcggagagacactcccaccgaaagttcttgcgcagtggccgccattggcaccctggaaggcagccccccaggtatctccacctccttctttaggaaggtgctgggctggcccctcaggctgccgagggacctgtgtaactggatgcagggactcctgcaagctgctggcctccatatcagggacaatgcttacaactactgctacatgtacgagctcctgagcctggggctgccactcctctgggcgttctctgaggtcctggcagccatgtacagggaatctgagggctccctcgagagcatctgcaactgggtgctcaggtgcttcccagtcaagctccgctgacatggctggctgccccaaagtg

SEQ ID NO: 18083 - DNA, 3284 bp, Homo sapiens
  source 1..3284: mol_type = unassigned DNA
cagcgcgcgctcctgcagccccggcggagtcccggcggggagcgcccgcgtaggcaggcacccggggcagccctccgtcctcgccgcgcggcctgagaacccctgggccctgggcgagggggctgggctgtgcagcccccgaggctaactgggcgggatcgcagctgcaggggttgtgcgagcagccacggcggcacctgtgccctgcgggcacccaccctgcccctgccgaggcaggcgcccaccgccggcggtgatgcggctgtgaagccctagtcgattaacgtgacagtgtcaggtggacccacagccatcccacctccccctctggggagtgctgagagtgaggcagcatggaggagaggaagcatgagaccatgaacccagctcatgtcctctttgaccggtttgtccaggccaccacctgcaagggaaccctcaaggctttccaggagctctgtgaccacctggaactaaagccaaaggactaccgctccttctatcacaagctcaagtccaagcttaactactggaaagccaaagccctctgggcaaaattggacaaacggggcagtcacaaagactacaaaaagggaaaagcgtgcactaacaccaagtgtctcatcattggggctggcccctgtggtctccgtacagccatcgacttatccttactgggggccaaggtggttgttattgagaaacgagatgccttctcccgcaacaacgtcttgcatctctggccattcaccatacatgatctacgaggtctgggtgccaagaagttctatggcaagttctgtgctggagccatcgaccatatcagtatccgtcagctccaactaatacttttgaaagtagccttgatcctaggcattgaaatccacgtcaatgtggaattccaaggacttatacagcctcctgaggaccaagagaatgaacggataggctggcgggcactggtgcaccccaagactcatcctgtgtcagagtatgaatttgaagtgatcatcggtggggatggtcggaggaacaccttggaagggtttcgtcggaaagaattccgtggcaaactggccatcgccatcacggcaaattttatcaaccgaaatacaacagcagaagctaaagtggaagagatcagtggtgtggcttttatattcaaccaaaaatttttccaggaactgagggaagccacaggtattgacttggagaacatcgtttactacaaagatgacacacactatttcgttatgacagccaaaaagcagagtttgctggacaaaggagtgatactacatgactacgccgacacagagctcctgctttcccgagaaaacgtggaccaggaggctctgctcagctatgccagggaggcggcagacttctctacccagcagcagctgccgtctctggattttgccatcaatcactatgggcagcccgatgtggccatgtttgacttcacttgtatgtatgcctccgagaacgccgccttggtgcgggagcagaacggacaccagttactagtggctctggtcggggacagcctcctagagcctttctggccaatgggaacaggaatagcccggggctttctagctgctatggactctgcctggatggtccgaagttggtctctaggaacgagccctttggaagtgctggcagagagggaaagtatttacaggttgctgcctcagaccacccctgagaatgtgagtaagaacttcagccagtacagtatcgaccctgtcactcggtatcccaatatcaacgtcaacttcctccggccaagccaggtgcgccatttatatgatactggcgaaacaaaagatattcacctggaaatggagagcctggtgaattcccgaaccacccccaaattgactcgcaatgagtctgtagctcgttcaagcaaactgctgggttggtgccagaggcagacagatggctatgcaggggtaaacgtgacagatctcaccatgtcctggaaaagtggcttggccctttgtgcaattatccatagataccgccctgacctgatagattttgattctttggatgagcaaaatgtggagaagaataaccaactggcctttgacattgctgagaaggaattgggcatttctcccatcatgacaggcaaagaaatggcctccgtgggggagcctgataagctgtccatggtgatgtacctgactcagttctacgagatgtttaaggactccctcccctctagcgacaccttggacctaaatgccgaggagaaagcagtcctgatagccagcaccagatcccctatctccttcctaagcaaacttggccagaccatctctcggaagcgttctcccaaggataaaaaggaaaaggacttggatggtgctgggaagaggagaaagaccagtcaatcagaggaggaggaagctcctcggggccacagaggagaaagaccgaccctggtgagcactctgacagacaggaggatggacgttgccgttgggaaccagaacaaagtgaagtacatggcgacccagctgctggccaaatttgaagagaatgcgcccgcacagtccatcggcatacggagacagctgacacaagagcgtggggccagccagccgtcctgctgcctgcctgggcaggttcgccctgcccccaccccccggtggaaacagggctccatgaagaaggagttcccgcagaacctgggaggcagcgacacatgctacttctgccagaagcgggtctacgtgatggagaggctgagtgccgagggcaagttcttccaccggagctgcttcaagtgcgagtactgcgccaccaccctgcgcctctcggcctacgcctacgacatcgaggatggtaaattctactgtaagccacactactgctatcgactctctggctacgcacaaaggaagagaccggcagtggctcccctgtctggaaaggaggccaaaggacccctgcaggatggcgccaccacagatgcaaacggacgggccaacgccgtggccagctccactgagagaaccccaggttcaggcgtgaacggcctggaggagcccagcatcgccaagcgactgaggggcaccccagagcggatcgagctggagaactaccgcctgtccctgaggcaggctgaggcactgcaggaggtaccggaggagactcaggccgagcacaacctgagcagcgtgctggacacgggcgccgaggaggacgtcgccagcaggtcagcacgcagggctgcagggcgcccacccgccacacggccctaa

SEQ ID NO: 18084 - DNA, 2963 bp, Homo sapiens
  source 1..2963: mol_type = unassigned DNA
tgagagtgaggcagcatggaggagaggaagcatgagaccatgaacccagctcatgtcctctttgaccggtttgtccaggccaccacctgcaagggaaccctcaaggctttccaggagctctgtgaccacctggaactaaagccaaaggactaccgctccttctatcacaagctcaagtccaagcttaactactggaaagccaaagccctctgggcaaaattggacaaacggggcagtcacaaagactacaaaaagggaaaagcgtgcactaacaccaagtgtctcatcattggggctggcccctgtggtctccgtacagccatcgacttatccttactgggggccaaggtggttgttattgagaaacgagatgccttctcccgcaacaacgtcttgcatctctggccattcaccatacatgatctacgaggtctgggtgccaagaagttctatggcaagttctgtgctggagccatcgaccatatcagtatccgtcagctccaactaatacttttgaaagtagccttgatcctaggcattgaaatccacgtcaatgtggaattccaaggacttatacagcctcctgaggaccaagagaatgaacggataggctggcgggcactggtgcaccccaagactcatcctgtgtcagagtatgaatttgaagtgatcatcggtggggatggtcggaggaacaccttggaagggtttcgtcggaaagaattccgtggcaaactggccatcgccatcacggcaaattttatcaaccgaaatacaacagcagaagctaaagtggaagagatcagtggtgtggcttttatattcaaccaaaaatttttccaggaactgagggaagccacaggtattgacttggagaacatcgtttactacaaagatgacacacactatttcgttatgacagccaaaaagcagagtttgctggacaaaggagtgatactacatgactacgccgacacagagctcctgctttcccgagaaaacgtggaccaggaggctctgctcagctatgccagggaggcggcagacttctctacccagcagcagctgccgtctctggattttgccatcaatcactatgggcagcccgatgtggccatgtttgacttcacttgtatgtatgcctccgagaacgccgccttggtgcgggagcagaacggacaccagttactagtggctctggtcggggacagcctcctagagcctttctggccaatgggaacaggaatagcccggggctttctagctgctatggactctgcctggatggtccgaagttggtctctaggaacgagccctttggaagtgctggcagagagggaaagtatttacaggttgctgcctcagaccacccctgagaatgtgagtaagaacttcagccagtacagtatcgaccctgtcactcggtatcccaatatcaacgtcaacttcctccggccaagccaggtgcgccatttatatgatactggcgaaacaaaagatattcacctggaaatggagagcctggtgaattcccgaaccacccccaaattgactcgcaatgagtctgtagctcgttcaagcaaactgctgggttggtgccagaggcagacagatggctatgcaggggtaaacgtgacagatctcaccatgtcctggaaaagtggcttggccctttgtgcaattatccatagataccgccctgacctgatagattttgattctttggatgagcaaaatgtggagaagaataaccaactggcctttgacattgctgagaaggaattgggcatttctcccatcatgacaggcaaagaaatggcctccgtgggggagcctgataagctgtccatggtgatgtacctgactcagttctacgagatgtttaaggactccctcccctctagcgacaccttggacctaaatgccgaggagaaagcagtcctgatagccagcaccagatcccctatctccttcctaagcaaacttggccagaccatctctcggaagcgttctcccaaggataaaaaggaaaaggacttggatggtgctgggaagaggagaaagaccagtcaatcagaggaggaggaagctcctcggggccacagaggagaaagaccgaccctggtgagcactctgacagacaggaggatggacgttgccgttgggaaccagaacaaagtgaagtacatggcgacccagctgctggccaaatttgaagagaatgcgcccgcacagtccatcggcatacggagacagggctccatgaagaaggagttcccgcagaacctgggaggcagcgacacatgctacttctgccagaagcgggtctacgtgatggagaggctgagtgccgagggcaagttcttccaccggagctgcttcaagtgcgagtactgcgccaccaccctgcgcctctcggcctacgcctacgacatcgaggatggtaaattctactgtaagccacactactgctatcgactctctggctacgcacaaaggaagagaccggcagtggctcccctgtctggaaaggaggccaaaggacccctgcaggatggcgccaccacagatgcaaacggacgggccaacgccgtggccagctccactgagagaaccccaggttcaggcgtgaacggcctggaggagcccagcatcgccaagcgactgaggggcaccccagagcggatcgagctggagaactaccgcctgtccctgaggcaggctgaggcactgcaggaggtaccggaggagactcaggccgagcacaacctgagcagcgtgctggacacgggcgccgaggaggacgtcgccagcaggtcagcacgcagggctgcagggcgcccacccgccacacggccctaagagcctcctcacctctgtgtgtctcggtttcttctcagtgaagggaggcctcctgtctttcctgctgcccgcagtccattctccccagtcccttttaggtt

SEQ ID NO: 18085 - DNA, 3366 bp, Homo sapiens
  source 1..3366: mol_type = unassigned DNA
cagcgcgcgctcctgcagccccggcggagtcccggcggggagcgcccgcgtaggcaggcacccggggcagccctccgtcctcgccgcgcggcctgagaacccctgggccctgggcgagggggctgggctgtgcagcccccgaggctaactgggcgggatcgcagctgcaggggttgtgcgagcagccacggcggcacctgtgccctgcgggcacccaccctgcccctgccgaggcaggcgcccaccgccggcggtgatgcggctgtgaagccctagtcgattaacgtgacagtgtcaggtggacccacagccatcccacctccccctctggggagtgctgagagtgaggcagcatggaggagaggaagcatgagaccatgaacccagctcatgtcctctttgaccggtttgtccaggccaccacctgcaagggaaccctcaaggctttccaggagctctgtgaccacctggaactaaagccaaaggactaccgctccttctatcacaagctcaagtccaagcttaactactggaaagccaaagccctctgggcaaaattggacaaacggggcagtcacaaagactacaaaaagggaaaagcgtgcactaacaccaagtgtctcatcattggggctggcccctgtggtctccgtacagccatcgacttatccttactgggggccaaggtggttgttattgagaaacgagatgccttctcccgcaacaacgtcttgcatctctggccattcaccatacatgatctacgaggtctgggtgccaagaagttctatggcaagttctgtgctggagccatcgaccatatcagtatccgtcagctccaactaatacttttgaaagtagccttgatcctaggcattgaaatccacgtcaatgtggaattccaaggacttatacagcctcctgaggaccaagagaatgaacggataggctggcgggcactggtgcaccccaagactcatcctgtgtcagagtatgaatttgaagtgatcatcggtggggatggtcggaggaacaccttggaagggtttcgtcggaaagaattccgtggcaaactggccatcgccatcacggcaaattttatcaaccgaaatacaacagcagaagctaaagtggaagagatcagtggtgtggcttttatattcaaccaaaaatttttccaggaactgagggaagccacaggtattgacttggagaacatcgtttactacaaagatgacacacactatttcgttatgacagccaaaaagcagagtttgctggacaaaggagtgatactacatgactacgccgacacagagctcctgctttcccgagaaaacgtggaccaggaggctctgctcagctatgccagggaggcggcagacttctctacccagcagcagctgccgtctctggattttgccatcaatcactatgggcagcccgatgtggccatgtttgacttcacttgtatgtatgcctccgagaacgccgccttggtgcgggagcagaacggacaccagttactagtggctctggtcggggacagcctcctagagcctttctggccaatgggaacaggaatagcccggggctttctagctgctatggactctgcctggatggtccgaagttggtctctaggaacgagccctttggaagtgctggcagagagggaaagtatttacaggttgctgcctcagaccacccctgagaatgtgagtaagaacttcagccagtacagtatcgaccctgtcactcggtatcccaatatcaacgtcaacttcctccggccaagccaggtgcgccatttatatgatactggcgaaacaaaagatattcacctggaaatggagagcctggtgaattcccgaaccacccccaaattgactcgcaatgagtctgtagctcgttcaagcaaactgctgggttggtgccagaggcagacagatggctatgcaggggtaaacgtgacagatctcaccatgtcctggaaaagtggcttggccctttgtgcaattatccatagataccgccctgacctgatagattttgattctttggatgagcaaaatgtggagaagaataaccaactggcctttgacattgctgagaaggaattgggcatttctcccatcatgacaggcaaagaaatggcctccgtgggggagcctgataagctgtccatggtgatgtacctgactcagttctacgagatgtttaaggactccctcccctctagcgacaccttggacctaaatgccgaggagaaagcagtcctgatagccagcaccagatcccctatctccttcctaagcaaacttggccagaccatctctcggaagcgttctcccaaggataaaaaggaaaaggacttggatggtgctgggaagaggagaaagaccagtcaatcagaggaggaggaagctcctcggggccacagaggagaaagaccgaccctggtgagcactctgacagacaggaggatggacgttgccgttgggaaccagaacaaagtgaagtacatggcgacccagctgctggccaaatttgaagagaatgcgcccgcacagtccatcggcatacggagacagggctccatgaagaaggagttcccgcagaacctgggaggcagcgacacatgctacttctgccagaagcgggtctacgtgatggagaggctgagtgccgagggcaagttcttccaccggagctgcttcaagtgcgagtactgcgccaccaccctgcgcctctcggcctacgcctacgacatcgaggatggtaaattctactgtaagccacactactgctatcgactctctggctacgcacaaaggaagagaccggcagtggctcccctgtctggaaaggaggccaaaggacccctgcaggatggcgccaccacagatgcaaacggacgggccaacgccgtggccagctccactgagagaaccccaggttcaggcgtgaacggcctggaggagcccagcatcgccaagcgactgaggggcaccccagagcggatcgagctggagaactaccgcctgtccctgaggcaggctgaggcactgcaggaggtaccggaggagactcaggccgagcacaacctgagcagcgtgctggacacgggcgccgaggaggacgtcgccagcagagactgggtctccccatggttgcccaggatggtctcaaactcctgggctcaaatgatccacccacctcagcctcccacagtgctgggatcacagatgtgagctactgggcccagctgagcataagagtcttttctgtgtcacctttgtgttccctacagtgtctagcaagtgcgttgtgaggggaagataattgaataaattttatccaggt

SEQ ID NO: 18086 - DNA, 4922 bp, Homo sapiens
  source 1..4922: mol_type = unassigned DNA
cttccctgccctcccctgcccgctgcggcggctgcagcctccgccccgcgcgcttgctccccgcgccgccgccgccgccgcctccgccgctgctgccgcacctgccaccatgtcgccgccgccgggtcatgtctgactctctctggaccgcgctttctaatttctcgatgccctccttccccggcggcagtatgttccgccgcaccaagagctgccgcaccagtaatcggaaaagcctcatcctgaccagcacttcacccacgctaccgagaccccactccccgctgccaggtcacctaggcagcagtcccctggacagcccccgaaacttctcccccaacacccccgcccacttctcgtttgcctcctcccgaagggcggacggacgccggtggtctctggcctcgctcccttcatctggctatggcaccaacacgcccagttccaccgtctcgtcctcctgctcctcccaggagcgccttcaccagctgccctaccagcccacggtggacgagctccacttcctctccaaacacttcgggagcaccgagagcatcacagacgaggatggtggccgtcgctccccagccgtgcggccccgctcacggagcctcagccccgggcgctccccctcctcctacgacaacgagatcgtgatgatgaatcacgtctacaaggagaggttcccgaaggccactgcgcagatggaggagaagctgcgcgactttacccgcgcctacgaacccgacagcgttctgcctctggccgatggcgtgctcagcttcatccaccaccagatcatcgagctggcccgggactgcctgaccaagtcccgtgacggcctcatcaccacggtctacttctatgaattgcaggagaacctggagaagctccttcaagacgcctatgaacgctctgagagcttggaggtggccttcgttactcagctggtgaagaagttgcttattatcatctcacgccctgcgaggctgctggagtgcctggaattcaaccccgaggagttctaccacctgctggaggcggccgaaggacacgccaaggagggccaccttgtgaagacggacatcccccgctacatcatccgccagctgggcctcacccgtgacccctttccagatgtggtgcatctggaggaacaggacagtggtggttccaacacccctgagcaagacgatctctctgagggccgcagcagcaaggccaagaaaccgccgggggagaatgacttcgataccatcaagctcataagcaacggtgcctacggcgctgtctacctggtgcggcaccgcgacacgcggcagcgctttgccatgaaaaagatcaacaagcagaacttgatcctccgcaaccagatccagcaggcctttgtggagcgcgatatcctcaccttcgccgagaacccgtttgtggtcggcatgttctgctcctttgagactcggcgccacctctgcatggtcatggaatatgtggaaggcggcgactgtgccaccctgctgaagaatattggagcgctgcccgtagagatggcccgcatgtactttgctgagacggtgctagccctggagtatttgcacaactatggcatcgtgcaccgcgacctcaagcctgacaacctccttatcacctccatgggtcacatcaagctcacagatttcggcctctccaagatggggctcatgagcctcaccaccaacttatatgaaggccacatcgagaaggacgcccgagagttcctggacaaacaggtgtgtgggaccccagagtacatcgcgcccgaggtcatcctgcgtcaaggctacggcaagccagtggactggtgggctatggggatcatcctctacgagttcctggtgggctgtgtgcccttcttcggagacacaccagaggagctatttggacaggtcatcagtgatgacatcctgtggcccgagggggatgaggccctacctacggaggcccaactcctcatatccagcctcctgcagaccaaccctctggtcaggcttggggcaggcggcgcttttgaggtgaagcagcacagtttctttcgagacctggactggacagggctgctgaggcagaaggccgagttcatcccccacctagagtcggaagatgacactagctactttgacacccgctcagacaggtatcaccacgtgaactcctatgacgaggatgacacgacggaggaggagcccgtggaaatccgccagttctcttcctgctctccgcgcttcagcaaggtgtatagcagcatggagcagctgtcgcagcacgagcccaagaccccagtagcagctgcagggagcagcaagcgggagccgagcaccaagggccccgaggagaaggtggccggcaagcgggaggggctgggcggcctgaccctgcgtgagaagacctggagagggggctctccggagatcaagcgattctccgcgtccgaggccagtttcctggagggagaggccagtccccctttgggcgcccgccgccgtttctcggcgctgctggagcccagccgcttcagcgccccccaagaggacgaggatgaggcccggctgcgcaggcctccccggcccagctccgaccccgcgggatccctggatgcacgggcccccaaagaggagactcaaggggaaggcacctccagcgccggggactccgaggccactgaccgtccacgcccaggtgacctctgcccaccctcgaaggatggggatgcatcaggcccaagggctaccaatgacttggttctgcgccgggcgcggcaccagcagatgtcaggggatgtggcagtagagaagaggccttctcgaactgggggcaaagtcatcaaatcagcctcagccactgccttatctgtcatgattcctgcagtggacccacatggaagttcaccccttgctagtcccatgtctccacgatctctgtcctccaacccatcctcacgggactcctcacccagccgggactactcaccagctgtcagtgggctccgctcccccatcaccatccagcgctcgggcaagaagtatggcttcacactgcgtgccatccgtgtctacatgggtgacacggatgtctatagtgtccaccacattgtctggcatgtggaggaaggaggcccagcccaggaggcaggactctgtgctggggacctcatcacccacgtgaatggggagcctgtgcatggcatggtgcatcctgaggtcgtggagctgatccttaagagtggcaacaaggtagcagtgaccacaacgcccttcgaaaatacctctatccgcattggtcccgcaaggcgcagcagctacaaggctaaaatggctcggaggaacaagcgaccctccgccaaggagggccaggagagcaagaagcgcagctccctcttccggaagatcacgaagcagtcgaacctgctgcatactagccgctcgctgtcgtcgctgaaccgctcgctgtcatccagcgatagtctcccgggctcgcctacgcacgggctgccggcgcgctcgcccacgcacagctaccgctccacgcctgactccgcctacctaggcgcctcatcccagagcagctccccagcctcgagcacgcccaactcgcctgcgtcgtcggcgtcgcaccacattcggcccagcacgctgcacggactgtcgccaaagctccatcgccagtaccgctctgcgcgatgcaagtcggccggcaacatccctctatcgccgctggcacacacgccgtcccccacgcaggcgtcaccgccgccactgccgggccacacggtgggcagctcgcacactactcagagcttcccggccaaactgcactcatcgcctcccgtcgtgcgcccgcgccccaagagtgccgagccccctcgctcgccgctcctcaagcgcgtgcagtcggccgagaagctgggagcctctttgagtgcggacaagaagggcgcgctgcgcaaacacagcctcgaggtgggccacccggatttccgcaaggacttccatggcgagctggcgctgcatagccttgccgagtccgacggtgagacgcccccagtcgagggccttggcgcgccccggcaggtcgccgtccgccgcctgggccgacaggagtcacctttgagcctgggcgcggacccgttgctgcccgagggtgcctccaggccaccagtgtcgagcaaggagaaggaatccccggggggcgccgaggcgtgcaccccaccccgcgcgacgacccccggtggccggaccctggagcgggacgtcggctgcacgcggcatcagagcgtgcagacggaggatggcactggcgggatggccagggctgtggccaaggcggcgctgagcccggtgcaggaacacgagacaggccggcgcagcagctctggcgaggcgggcacacccctggtacccattgtcgtagagcctgcgcggcccggggctaaggctgtggtgcctcagcctctgggcgcggactccaaggggttgcaggaacccgcacccctggcgccttccgtgcccgaggccccccggggccgggagcgctgggtgttggaggtggtggaggagcgcaccacgctgagcggtcctcgctccaagcccgcctccccaaagctctccccggagccccagacaccctccctagccccagcgaagtgcagtgcacccagcagtgcagtgaccccagtcccacccgcatccctcttgggctcaggcaccaagcctcaagtggggctgacctcccggtgccctgctgaagctgtgcccccagcaggcctgaccaaaaaaggagtgtccagtcccgcacccccgggaccatagccaagggggtcatcggccccgcgctgtacagcctccgtatacatatgtacacatataaataaagtgcgtccgtgctgcgtg

SEQ ID NO: 18087 - DNA, 2225 bp, Homo sapiens
  source 1..2225: mol_type = unassigned DNA
cgcacctgccaccatgtcgccgccgccgggtcatgtctgactctctctggaccgcgctttctaatttctcgatgccctccttccccggcggcagtatgttccgccgcaccaagagctgccgcaccagtaatcggaaaagcctcatcctgaccagcacttcacccacgctaccgagaccccactccccgctgccaggtcacctaggcagcagtcccctggacagcccccgaaacttctcccccaacacccccgcccacttctcgtttgcctcctcccgaagggcggacggacgccggtggtctctggcctcgctcccttcatctggctatggcaccaacacgcccagttccaccgtctcgtcctcctgctcctcccaggagcgccttcaccagctgccctaccagcccacggtggacgagctccacttcctctccaaacacttcgggagcaccgagagcatcacagacgaggatggtggccgtcgctccccagccgtgcggccccgctcacggagcctcagccccgggcgctccccctcctcctacgacaacgagatcgtgatgatgaatcacgtctacaaggagaggttcccgaaggccactgcgcagatggaggagaagctgcgcgactttacccgcgcctacgaacccgacagcgttctgcctctggccgatggcgtgctcagcttcatccaccaccagatcatcgagctggcccgggactgcctgaccaagtcccgtgacggcctcatcaccacggtctacttctatgaattgcaggagaacctggagaagctccttcaagacgcctatgaacgctctgagagcttggaggtggccttcgttactcagctggtgaagaagttgcttattatcatctcacgccctgcgaggctgctggagtgcctggaattcaaccccgaggagttctaccacctgctggaggcggccgaaggacacgccaaggagggccaccttgtgaagacggacatcccccgctacatcatccgccagctgggcctcacccgtgacccctttccagatgtggtgcatctggaggaacaggacagtggtggttccaacacccctgagcaagacgatctctctgagggccgcagcagcaaggccaagaaaccgccgggggagaatgacttcgataccatcaagctcataagcaacggtgcctacggcgctgtctacctggtgcggcaccgcgacacgcggcagcgctttgccatgaaaaagatcaacaagcagaacttgatcctccgcaaccagatccagcaggcctttgtggagcgcgatatcctcaccttcgccgagaacccgtttgtggtcggcatgttctgctcctttgagactcggcgccacctctgcatggtcatggaatatgtggaaggcggcgactgtgccaccctgctgaagaatattggagcgctgcccgtagagatggcccgcatgtactttgctgagacggtgctagccctggagtatttgcacaactatggcatcgtgcaccgcgacctcaagcctgacaacctccttatcacctccatgggtcacatcaagctcacagatttcggcctctccaagatggggctcatgagcctcaccaccaacttatatgaaggccacatcgagaaggacgcccgagagttcctggacaaacaggtgtgtgggaccccagagtacatcgcgcccgaggtcatcctgcgtcaaggctacggcaagccagtggactggtgggctatggggatcatcctctacgagttcctggtgggctgtgtgcccttcttcggagacacaccagaggagctatttggacaggtcatcagtgatgacatcctgtggcccgagggggatgaggccctacctacggaggcccaactcctcatatccagcctcctgcagaccaaccctctggtcaggcttggggcaggcggcgcttttgaggtgaagcagcacagtttctttcgagacctggactggacagggctgctgaggcagaaggccgagttcatcccccacctagagtcggaagatgacactagctactttgacacccgctcagacaggtatcaccacgtgaactcctatgacgaggatgacacgacggaggaggagcccgtggaaatccgccagttctcttcctgctctccgcgcttcagcaaggtgtacagcctccgtatacatatgtacacatataaataaagtgcgtccgtgctg

SEQ ID NO: 18088 - DNA, 5738 bp, Homo sapiens
  source 1..5738: mol_type = unassigned DNA
taggcaggcggctgagccggcggcgggtggcctgcccaacgtgtgctgggtgggagaaggcgaggcgtcagcgatgctgtctcttccgtgaggagcgcagaggaggtcgcggcgccggaggccccagaaggctcgaaggcgccgcgggctggggtcggtggcttagggagcccgtccggccatggtggccgcgggtggtggttggcgcggctgcgctgcggcccggggcagtgcggagccgggacagtcgcggcgctgacgcccgcgggccccagctgcagatatgaagcggagccgctgccgcgaccgaccgcagccgccgccgcccgaccgccgggaggatggagttcagcgggcagcggagctgtctcagtctttgccgccgcgccggcgagcgccgcccgggaggcagcggctggaggagcggacgggccccgcggggcccgagggcaaggagcaggatgtagtaactggagttagtcccctgctcttcaggaaactcagtaatcctgacatattttcatccactggaaaagttaaacttcagcgacaactgagtcaggatgattgtaagttatggagaggaaacctggccagctctctatcgggtaagcagctgctccctttgtccagcagtgtacatagcagtgtgggacaggtgacttggcagtcgtcaggagaagcatcaaacctggttcgaatgagaaaccagtcccttggacagtctgcaccttctcttactgctggcctgaaggagttgagccttccaagaagaggcagcttttgtcggacaagtaaccgcaagagcttgattgtgacctctagcacatcacctacactaccacggccacactcaccactccatggccacacaggtaacagtcctttggacagcccccggaatttctctccaaatgcacctgctcacttttcttttgttcctgcccgtaggactgatgggcggcgctggtctttggcctctttgccctcttcaggatatggaactaacactcctagctccactgtctcatcatcatgctcctcacaggaaaagctgcatcagttgcctttccagcctacagctgatgagctgcactttttgacgaagcatttcagcacagagagcgtaccagatgaggaaggacggcagtccccagccatgcggcctcgctcccggagcctcagtcccggacgatccccagtatcctttgacagtgaaataataatgatgaatcatgtttacaaagaaagattcccaaaggccaccgcacaaatggaagagcgactagcagagtttatttcctccaacactccagacagcgtgctgcccttggcagatggagccctgagctttattcatcatcaggtgattgagatggcccgagactgcctggataaatctcggagtggcctcattacatcacaatacttctacgaacttcaagataatttggagaaacttttacaagatgctcatgagcgctcagagagctcagaagtggcttttgtgatgcagctggtgaaaaagctgatgattatcattgcccgcccagcacgtctcctggaatgcctggagtttgaccctgaagagttctaccaccttttagaagcagctgagggccacgccaaagagggacaagggattaaatgtgacattccccgctacatcgttagccagctgggcctcacccgggatcccctagaagaaatggcccagttgagcagctgtgacagtcctgacactccagagacagatgattctattgagggccatggggcatctctgccatctaaaaagacaccctctgaagaggacttcgagaccattaagctcatcagcaatggcgcctatggggctgtatttctggtgcggcacaagtccacccggcagcgctttgccatgaagaagatcaacaagcagaacctgatcctacggaaccagatccagcaggccttcgtggagcgtgacatactgactttcgctgagaacccctttgtggtcagcatgttctgctcctttgataccaagcgccacttgtgcatggtgatggagtacgttgaagggggagactgtgccactctgctgaagaatattggggccctgcctgtggacatggtgcgtctatactttgcggaaactgtgctggccctggagtacttacacaactatggcatcgtgcaccgtgacctcaagcctgacaacctcctaattacatccatggggcacatcaagctcacggactttggactgtccaaaattggcctcatgagtctgacaacgaacttgtatgagggtcatattgaaaaggatgcccgggaattcctggacaagcaggtatgcgggaccccagaatacattgcgcctgaggtgatcctgcgccagggctatgggaagccagtggactggtgggccatgggcattatcctgtatgagttcctggtgggctgcgtccctttttttggagatactccggaggagctctttgggcaggtgatcagtgatgagattgtgtggcctgagggtgatgaggcactgcccccagacgcccaggacctcacctccaaactgctccaccagaaccctctggagagacttggcacaggcagtgcctatgaggtgaagcagcacccattctttactggtctggactggacaggacttctccgccagaaggctgaatttattcctcagttggagtcagaggatgatactagctattttgacacccgctcagagcgataccaccacatggactcggaggatgaggaagaagtgagtgaggatggctgccttgagatccgccagttctcttcctgctctccaaggttcaacaaggtgtacagcagcatggagcggctctcactgctcgaggagcgccggacaccacccccgaccaagcgcagcctgagtgaggagaaggaggaccattcagatggcctggcagggctcaaaggccgagaccggagctgggtgattggctcccctgagatattacggaagcggctgtcggtgtctgagtcatcccacacagagagtgactcaagccctccaatgacagtgcgacgccgctgctcaggcctcctggatgcgcctcggttcccggagggccctgaggaggccagcagcaccctcaggaggcaaccacaggagggtatatgggtcctgacacccccatctggagagggggtatctgggcctgtcactgaacactcaggggagcagcggccaaagctggatgaggaagctgttggccggagcagtggttccagtccagctatggagacccgaggccgtgggacctcacagctggctgagggagccacagccaaggccatcagtgacctggctgtgcgtagggcccgccaccggctgctctctggggactcaacagagaagcgcactgctcgccctgtcaacaaagtgatcaagtccgcctcagccacagccctctcactcctcattccttcggaacaccacacctgctccccgttggccagccccatgtccccacattctcagtcgtccaacccatcatcccgggactcttctccaagcagggacttcttgccagcccttggcagcatgaggcctcccatcatcatccaccgagctggcaagaagtatggcttcaccctgcgggccattcgcgtctacatgggtgactccgatgtctacaccgtgcaccatatggtgtggcacgtggaggatggaggtccggccagtgaggcagggcttcgtcaaggtgacctcatcacccatgtcaatggggaacctgtgcatggcctggtgcacacggaggtggtagagctgatcctgaagagtggaaacaaggtggccatttcaacaactcccctggagaacacatccattaaagtggggccagctcggaagggcagctacaaggccaagatggcccgaaggagcaagaggagccgcggcaaggatgggcaagaaagcagaaaaaggagctccctgttccgcaagatcaccaagcaagcatccctgctccacaccagccgcagcctttcttcccttaaccgctccttgtcatcaggggagagtgggccaggctctcccacacacagccacagcctttccccccgatctcccactcaaggctaccgggtgacccccgatgctgtgcattcagtgggagggaattcatcacagagcagctcccccagctccagcgtgcccagttccccagccggctctgggcacacacggcccagctccctccacggtctggcacccaagctccaacgccagtaccgctctccacggcgcaagtcagcaggcagcatcccactgtcaccactggcccacaccccttctcccccacccccaacagcttcacctcagcggtccccatcgcccctgtctggccatgtagcccaggcctttcccacaaagcttcacttgtcacctcccctgggcaggcaactctcacggcccaagagtgcggagccaccccgttcaccactactcaagagggtgcagtcggctgagaaactggcagcagcacttgccgcctctgagaagaagctagccacttctcgcaagcacagccttgacctgccccactctgaactaaagaaggaactgccgcccagggaagtgagccctctggaggtagttggagccaggagtgtgctgtctggcaagggggccctgccagggaagggggtgctgcagcctgctccctcacgggccctaggcaccctccggcaggaccgagccgaacgacgggagtcgctgcagaagcaagaagccattcgtgaggtggactcctcagaggacgacaccgaggaagggcctgagaacagccagggtgcacaggagctgagcttggcacctcacccagaagtgagccagagtgtggcccctaaaggagcaggagagagtggggaagaggatcctttcccgtccagagaccctaggagcctgggcccaatggtcccaagcctattgacagggatcacactggggcctcccagaatggaaagtcccagtggtccccacaggaggctcgggagcccacaagccattgaggaggctgccagctcctcctcagcaggccccaacctaggtcagtctggagccacagaccccatccctcctgaaggttgctggaaggcccagcacctccacacccaggcactaacagcactttctcccagcacttcgggactcacccccaccagcagttgctctcctcccagctccacctctgggaagctgagcatgtggtcctggaaatcccttattgagggcccagacagggcatccccaagcagaaaggcaaccatggcaggtgggctagccaacctccaggatttggaaaacacaactccagcccagcctaagaacctgtctcccagggagcaggggaagacacagccacctagtgcccccagactggcccatccatcttatgaggatcccagccagggctggctatgggagtctgagtgtgcacaagcagtgaaagaggatccagccctgagcatcacccaagtgcctgatgcctcaggtgacagaaggcaggacgttccatgccgaggctgccccctcacccagaagtctgagcccagcctcaggaggggccaagaaccagggggccatcaaaagcatcgggatttggcattggttccagatgagcttttaaagcaaacatagcagttgtttgccatttcttgcactcagacctgtgtaatatatgctcctggaaaccatc

SEQ ID NO: 18089 - DNA, 2757 bp, Homo sapiens
  source 1..2757: mol_type = unassigned DNA
attcatttgggatctggaacttgtcactgtcccactgctgcctcgtgggctcttaggtcttttgtggggggatgggaggggtgttctgaagatcatgtttttgaagaaaagtactttaatttttgccaatctctaccctttgccgaggagctgaagtaaaccagcacatgttttcacccacatctgctccagccctcttcctcactaaagtcccatttagtgctgattgtgctttggctacttctcctcttgccattttcctgaacccacgagcccacagcagtcctggcactccttgttccagccgcccactgccgtggagttgtcggacaagtaaccgcaagagcttgattgtgacctctagcacatcacctacactaccacggccacactcaccactccatggccacacaggtaacagtcctttggacagcccccggaatttctctccaaatgcacctgctcacttttcttttgttcctgcccgtaggactgatgggcggcgctggtctttggcctctttgccctcttcaggatatggaactaacactcctagctccactgtctcatcatcatgctcctcacaggaaaagctgcatcagttgcctttccagcctacagctgatgagctgcactttttgacgaagcatttcagcacagagagcgtaccagatgaggaaggacggcagtccccagccatgcggcctcgctcccggagcctcagtcccggacgatccccagtatcctttgacagtgaaataataatgatgaatcatgtttacaaagaaagattcccaaaggccaccgcacaaatggaagagcgactagcagagtttatttcctccaacactccagacagcgtgctgcccttggcagatggagccctgagctttattcatcatcaggtgattgagatggcccgagactgcctggataaatctcggagtggcctcattacatcacaatacttctacgaacttcaagataatttggagaaacttttacaagatgctcatgagcgctcagagagctcagaagtggcttttgtgatgcagctggtgaaaaagctgatgattatcattgcccgcccagcacgtctcctggaatgcctggagtttgaccctgaagagttctaccaccttttagaagcagctgagggccacgccaaagagggacaagggattaaatgtgacattccccgctacatcgttagccagctgggcctcacccgggatcccctagaagaaatggcccagttgagcagctgtgacagtcctgacactccagagacagatgattctattgagggccatggggcatctctgccatctaaaaagacaccctctgaagaggacttcgagaccattaagctcatcagcaatggcgcctatggggctgtatttctggtgcggcacaagtccacccggcagcgctttgccatgaagaagatcaacaagcagaacctgatcctacggaaccagatccagcaggccttcgtggagcgtgacatactgactttcgctgagaacccctttgtggtcagcatgttctgctcctttgataccaagcgccacttgtgcatggtgatggagtacgttgaagggggagactgtgccactctgctgaagaatattggggccctgcctgtggacatggtgcgtctatactttgcggaaactgtgctggccctggagtacttacacaactatggcatcgtgcaccgtgacctcaagcctgacaacctcctaattacatccatggggcacatcaagctcacggactttggactgtccaaaattggcctcatgagtctgacaacgaacttgtatgagggtcatattgaaaaggatgcccgggaattcctggacaagcaggtatgcgggaccccagaatacattgcgcctgaggtgatcctgcgccagggctatgggaagccagtggactggtgggccatgggcattatcctgtatgagttcctggtgggctgcgtccctttttttggagatactccggaggagctctttgggcaggtgatcagtgatgagattgtgtggcctgagggtgatgaggcactgcccccagacgcccaggacctcacctccaaactgctccaccagaaccctctggagagacttggcacaggcagtgcctatgaggtgaagcagcacccattctttactggtctggactggacaggacttctccgccagaaggctgaatttattcctcagttggagtcagaggatgatactagctattttgacacccgctcagagcgataccaccacatggactcggaggatgaggaagaagtgagtgaggatggctgccttgagatccgccagttctcttcctgctctccaaggttcaacaaggtgtacagcagcatggagcggctctcactgctcgaggagcgccggacaccacccccgaccaagcgcagcctgagtgaggagaaggaggaccattcagatggcctggcagggctcaaaggccgagaccggagctgggtgattggctcccctgagcatcacccaagtgcctgatgcctcaggtgacagaaggcaggacgttccatgccgaggctgccccctcacccagaagtctgagcccagcctcaggaggggccaagaaccagggggccatcaaaagcatcgggatttggcattggttccagatgagcttttaaagcaaacatagcagttgtttgccatttcttgcactcagacctgtgtaatatatgctcctggaaaccat

SEQ ID NO: 18090 - DNA, 5110 bp, Homo sapiens
  source 1..5110: mol_type = unassigned DNA
taggcaggcggctgagccggcggcgggtggcctgcccaacgtgtgctgggtgggagaaggcgaggcgtcagcgatgctgtctcttccgtgaggagcgcagaggaggtcgcggcgccggaggccccagaaggctcgaaggcgccgcgggctggggtcggtggcttagggagcccgtccggccatggtggccgcgggtggtggttggcgcggctgcgctgcggcccggggcagtgcggagccgggacagtcgcggcgctgacgcccgcgggccccagctgcagatatgaagcggagccgctgccgcgaccgaccgcagccgccgccgcccgaccgccgggaggatggagttcagcgggcagcggagctgtctcagtctttgccgccgcgccggcgagcgccgcccgggaggcagcggctggaggagcggacgggccccgcggggcccgagggcaaggagcaggatgtagtaactggagttagtcccctgctcttcaggaaactcagtaatcctgacatattttcatccactggaaaagttaaacttcagcgacaactgagtcaggatgattgtaagttatggagaggaaacctggccagctctctatcgggtaagcagctgctccctttgtccagcagtgtacatagcagtgtgggacaggtgacttggcagtcgtcaggagaagcatcaaacctggttcgaatgagaaaccagtcccttggacagtctgcaccttctcttactgctggcctgaaggagttgagccttccaagaagaggcagcttttgtcggacaagtaaccgcaagagcttgattgtgacctctagcacatcacctacactaccacggccacactcaccactccatggccacacaggtaacagtcctttggacagcccccggaatttctctccaaatgcacctgctcacttttcttttgttcctgcccgtaggactgatgggcggcgctggtctttggcctctttgccctcttcaggatatggaactaacactcctagctccactgtctcatcatcatgctcctcacaggaaaagctgcatcagttgcctttccagcctacagctgatgagctgcactttttgacgaagcatttcagcacagagagcgtaccagatgaggaaggacggcagtccccagccatgcggcctcgctcccggagcctcagtcccggacgatccccagtatcctttgacagtgaaataataatgatgaatcatgtttacaaagaaagattcccaaaggctcatgagcgctcagagagctcagaagtggcttttgtgatgcagctggtgaaaaagctgatgattatcattgcccgcccagcacgtctcctggaatgcctggagtttgaccctgaagagttctaccaccttttagaagcagctgagggccacgccaaagagggacaagggattaaatgtgacattccccgctacatcgttagccagctgggcctcacccgggatcccctagaagaaatggcccagttgagcagctgtgacagtcctgacactccagagacagatgattctattgagggccatggggcatctctgccatctaaaaagacaccctctgaagaggacttcgagaccattaagctcatcagcaatggcgcctatggggctgtatttctggtgcggcacaagtccacccggcagcgctttgccatgaagaagatcaacaagcagaacctgatcctacggaaccagatccagcaggccttcgtggagcgtgacatactgactttcgctgagaacccctttgtggtcagcatgttctgctcctttgataccaagcgccacttgtgcatggtgatggagtacgttgaagggggagactgtgccactctgctgaagaatattggggccctgcctgtggacatggtgcgtctatactttgcggaaactgtgctggccctggagtacttacacaactatggcatcgtgcaccgtgacctcaagcctgacaacctcctaattacatccatggggcacatcaagctcacggactttggactgtccaaaattggcctcatgagtctgacaacgaacttgtatgagggtcatattgaaaaggatgcccgggaattcctggacaagcaggtatgcgggaccccagaatacattgcgcctgaggtgatcctgcgccagggctatgggaagccagtggactggtgggccatgggcattatcctgtatgagttcctggtgggctgcgtccctttttttggagatactccggaggagctctttgggcaggtgatcagtgatgagattgtgtggcctgagggtgatgaggcactgcccccagacgcccaggacctcacctccaaactgctccaccagaaccctctggagagacttggcacaggcagtgcctatgaggtgaagcagcacccattctttactggtctggactggacaggacttctccgccagaaggctgaatttattcctcagttggagtcagaggatgatactagctattttgacacccgctcagagcgataccaccacatggactcggaggatgaggaagaagtgagtgaggatggctgccttgagatccgccagttctcttcctgctctccaaggttcaacaaggtgtacagcagcatggagcggctctcactgctcgaggagcgccggacaccacccccgaccaagcgcagcctgagtgaggagaaggaggaccattcagatggcctggcagggctcaaaggccgagaccggagctgggtgattggctcccctgagatattacggaagcggctgtcggtgtctgagtcatcccacacagagagtgactcaagccctccaatgacagtgcgacgccgctgctcaggcctcctggatgcgcctcggttcccggagggccctgaggaggccagcagcaccctcaggaggcaaccacaggagggtatatgggtcctgacacccccatctggagagggggtatctgggcctgtcactgaacactcaggggagcagcggccaaagctggatgaggaagctgttggccggagcagtggttccagtccagctatggagacccgaggccgtgggacctcacagctggctgagggagccacagccaaggccatcagtgacctggctgtgcgtagggcccgccaccggctgctctctggggactcaacagagaagcgcactgctcgccctgtcaacaaagtgatcaagtccgcctcagccacagccctctcactcctcattccttcggaacaccacacctgctccccgttggccagccccatgtccccacattctcagtcgtccaacccatcatcccgggactcttctccatatggcttcaccctgcgggccattcgcgtctacatgggtgactccgatgtctacaccgtgcaccatatggtgtggcacgtggaggatggaggtccggccagtgaggcagggcttcgtcaaggtgacctcatcacccatgtcaatggggaacctgtgcatggcctggtgcacacggaggtggtagagctgatcctgaagagtggaaacaaggtggccatttcaacaactcccctggagaacacatccattaaagtggggccagctcggaagggcagctacaaggccaagatggcccgaaggagcaagaggagccgcggcaaggatgggcaagaaagcagaaaaaggagctccctgttccgcaagatcaccaagcaagcatccctgctccacaccagccgcagcctttcttcccttaaccgctccttgtcatcaggggagagtgggccaggctctcccacacacagccacagcctttccccccgatctcccactcaaggctaccgggtgacccccgatgctgtgcattcagaactctcacggcccaagagtgcggagccaccccgttcaccactactcaagagggtgcagtcggctgagaaactggcagcagcacttgccgcctctgagaagaagctagccacttctcgcaagcacagccttgacctgccccactctgaactaaagaaggaactgccgcccagggaagtgagccctctggaggtagttggagccaggagtgtgctgtctggcaagggggccctgccagggaagggggtgctgcagcctgctccctcacgggccctaggcaccctccggcaggaccgagccgaacgacgggagtcgctgcagaagcaagaagccattcgtgaggtggactcctcagaggacgacaccgaggaagggcctgagaacagccagggtgcacaggagctgagcttggcacctcacccagaagtgagccagagtgtggcccctaaaggagcaggagagagtggggaagaggatcctttcccgtccagagaccctaggagcctgggcccaatggtcccaagcctattgacagggatcacactggggcctcccagaatggaaagtcccagtggtccccacaggaggctcgggagcccacaagccattgaggaggctgccagctcctcctcagcaggccccaacctaggtcagtctggagccacagaccccatccctcctgaaggttgctggaaggcccagcacctccacacccaggcactaacagcactttctcccagcacttcgggactcacccccaccagcagttgctctcctcccagctccacctctgggaagctgagcatgtggtcctggaaatcccttattgagggcccagacagggcatccccaagcagaaaggcaaccatggcaggtgggctagccaacctccaggatttggaaaacacaactccagcccagcctaagaacctgtctcccagggagcaggggaagacacagccacctagtgcccccagactggcccatccatcttatgaggatcccagccagggctggctatgggagtctgagtgtgcacaagcagtgaaagaggatccagccctgagcatcacccaagtgcctgatgcctcaggtgacagaaggcaggacgttccatgccgaggctgccccctcacccagaagtctgagcccagcctcaggaggggccaagaaccagggggccatcaaaagcatcgggatttggcattggttccagatgagcttttaaagcaaacatag

SEQ ID NO: 18091 - DNA, 3052 bp, Homo sapiens
  source 1..3052: mol_type = unassigned DNA
taggcaggcggctgagccggcggcgggtggcctgcccaacgtgtgctgggtgggagaaggcgaggcgtcagcgatgctgtctcttccgtgaggagcgcagaggaggtcgcggcgccggaggccccagaaggctcgaaggcgccgcgggctggggtcggtggcttagggagcccgtccggccatggtggccgcgggtggtggttggcgcggctgcgctgcggcccggggcagtgcggagccgggacagtcgcggcgctgacgcccgcgggccccagctgcagatatgaagcggagccgctgccgcgaccgaccgcagccgccgccgcccgaccgccgggaggatggagttcagcgggcagcggagctgtctcagtctttgccgccgcgccggcgagcgccgcccgggaggcagcggctggaggagcggacgggccccgcggggcccgagggcaaggagcaggatgtagtaactggagttagtcccctgctcttcaggaaactcagtaatcctgacatattttcatccactggaaaagttaaacttcagcgacaactgagtcaggatgattgtaagttatggagaggaaacctggccagctctctatcgggtaagcagctgctccctttgtccagcagtgtacatagcagtgtgggacaggtgacttggcagtcgtcaggagaagcatcaaacctggttcgaatgagaaaccagtcccttggacagtctgcaccttctcttactgctggcctgaaggagttgagccttccaagaagaggcagcttttgtcggacaagtaaccgcaagagcttgattgtgacctctagcacatcacctacactaccacggccacactcaccactccatggccacacaggtaacagtcctttggacagcccccggaatttctctccaaatgcacctgctcacttttcttttgttcctgcccgtaggactgatgggcggcgctggtctttggcctctttgccctcttcaggatatggaactaacactcctagctccactgtctcatcatcatgctcctcacaggaaaagctgcatcagttgcctttccagcctacagctgatgagctgcactttttgacgaagcatttcagcacagagagcgtaccagatgaggaaggacggcagtccccagccatgcggcctcgctcccggagcctcagtcccggacgatccccagtatcctttgacagtgaaataataatgatgaatcatgtttacaaagaaagattcccaaaggccaccgcacaaatggaagagcgactagcagagtttatttcctccaacactccagacagcgtgctgcccttggcagatggagccctgagctttattcatcatcaggtgattgagatggcccgagactgcctggataaatctcggagtggcctcattacatcacaatacttctacgaacttcaagataatttggagaaacttttacaagatgagtttgaccctgaagagttctaccaccttttagaagcagctgagggccacgccaaagagggacaagggattaaatgtgacattccccgctacatcgttagccagctgggcctcacccgggatcccctagaagaaatggcccagttgagcagctgtgacagtcctgacactccagagacagatgattctattgagggccatggggcatctctgccatctaaaaagacaccctctgaagaggacttcgagaccattaagctcatcagcaatggcgcctatggggctgtatttctggtgcggcacaagtccacccggcagcgctttgccatgaagaagatcaacaagcagaacctgatcctacggaaccagatccagcaggccttcgtggagcgtgacatactgactttcgctgagaacccctttgtggtcagcatgttctgctcctttgataccaagcgccacttgtgcatggtgatggagtacgttgaagggggagactgtgccactctgctgaagaatattggggccctgcctgtggacatggtgcgtctatactttgcggaaactgtgctggccctggagtacttacacaactatggcatcgtgcaccgtgacctcaagcctgacaacctcctaattacatccatggggcacatcaagctcacggactttggactgtccaaaattggcctcatgagtctgacaacgaacttgtatgagggtcatattgaaaaggatgcccgggaattcctggacaagcaggtatgcgggaccccagaatacattgcgcctgaggtgatcctgcgccagggctatgggaagccagtggactggtgggccatgggcattatcctgtatgagttcctggtgggctgcgtccctttttttggagatactccggaggagctctttgggcaggtgatcagtgatgagattgtgtggcctgagggtgatgaggcactgcccccagacgcccaggacctcacctccaaactgctccaccagaaccctctggagagacttggcacaggcagtgcctatgaggtgaagcagcacccattctttactggtctggactggacaggacttctccgccagaaggctgaatttattcctcagttggagtcagaggatgatactagctattttgacacccgctcagagcgataccaccacatggactcggaggatgaggaagaagtgagtgaggatggctgccttgagatccgccagttctcttcctgctctccaaggttcaacaaggtgtacagcagcatggagcggctctcactgctcgaggagcgccggacaccacccccgaccaagcgcagcctgagtgaggagaaggaggaccattcagatggcctggcagggctcaaaggccgagaccggagctgggtgattggctcccctgagatattacggaagcggctgtcggtgtctgagtcatccctcctgaaggttgctggaaggcccagcactttctcccagcacttcgggactcacccccaccagcagttgctctcctcccagctccacctctgggaagctgagcatgtggtcctggaaatcccttattga

SEQ ID NO: 18092 - DNA, 2107 bp, Homo sapiens
  source 1..2107: mol_type = unassigned DNA
aatgatctagctcctgaagaaagaggctttcgttactgtccaagaagtgaagaccagtgagtctagcgataaagaaacaaaagagcccctgacagtatcgaaagaatctgacatttgctttgtctgtacaaaggatgaaaggaattttgccgacttagtcaaaacaataactggttttatatcattttgagtctaaaatacaggcatcagaatcgtatgtttttctttgtatttctgaagaattgtcatctttttaaaaacgtatgtggagtggttttgtttctggaaaggaaaacgtgacatggattttataagcttagtagctgtaggtggagactcttgttttgtttgctaaacctttttaataagcagcaaagtcaggatatcaaagattggaatttttcccccggaaccttttgttcttttcttagtacttcaaataatttcaaccaaaggggtatgcatggaaaatgaaaacaaatatgaagtctttccgctatttggcagtgcttcagatgagatgtatctatacttctgtgaagaaagacgtgattctgatatgaggcagtgattgtatacttacgctggacagagggataactggtttagtggaacagtgggttagtggtgtgctgaaaggattgtttgcctctttatccagcagtaagtaggcactagtagttgactgtctggggagtggcttttttttgtctgatatctattatggatgattccagtattctgagaaggagagggttacagaaggagttgagccttccaagaagaggcagcttttgtcggacaagtaaccgcaagagcttgattgtgacctctagcacatcacctacactaccacggccacactcaccactccatggccacacaggtaacagtcctttggacagcccccggaatttctctccaaatgcacctgctcacttttcttttgttcctgcccgtagccatagccacagagctgacaggactgatgggcggcgctggtctttggcctctttgccctcttcaggatatggaactaacactcctagctccactgtctcatcatcatgctcctcacaggaaaagctgcatcagttgcctttccagcctacagctgatgagctgcactttttgacgaagcatttcagcacagagagcgtaccagatgaggaaggacggcagtccccagccatgcggcctgctccctcacgggccctaggcaccctccggcaggaccgagccgaacgacgggagtcgctgcagaagcaagaagccattcgtgaggtggactcctcagaggacgacaccgaggaagggcctgagaacagccagggtgcacaggagctgagcttggcacctcacccagaagtgagccagagtgtggcccctaaaggagcaggagagagtggggaagaggatcctttcccgtccagagaccctaggagcctgggcccaatggtcccaagcctattgacagggatcacactggggcctcccagaatggaaagtcccagtggtccccacaggaggctcgggagcccacaagccattgaggaggctgccagctcctcctcagcaggccccaacctaggtcagtctggagccacagaccccatccctcctgaaggttgctggaaggcccagcacctccacacccaggcactaacagcactttctcccagcacttcgggactggcccatcttatgaggatcccagccagggctggctatgggagtctgagtgtgcacaagcagtgaaagaggatccagccctgagcatcacccaagtgcctgatgcctcaggtgacagaaggcaggacgttccatgccgaggctgccccctcacccagaagtctgagcccagcctcaggaggggccaagaaccagggggccatcaaaagcatcgggatttggcattggttccagatgagcttttaaagcaaacatagcagttgtttgccatttcttgcactcagacctgtgtaatatatgctcctggaaaccatctttatgtcttttgcttgcttgttttccttcggtcaacccacatgtaactaggtcctgtgttgctgctgggaatatagtggtgaataaaacagtttccacc

SEQ ID NO: 18093 - DNA, 5893 bp, Homo sapiens
  source 1..5893: mol_type = unassigned DNA
atggacgagtcgagcctcctgcggcgccgcgggctccagaaggagctgagcctgccacgccgaggacgtggctgccgcagcgggaaccgcaagagcttggtggtaggaacgccctccccgaccctctcccggcccctgtcgccattgtcggtcccaacggcaggcagcagccccttggatagtcctcggaatttctcggctgcctctgccctaaatttcccctttgcccggagggcagacggcagaagatggtccctcgcgtctctcccatcttccggctatggaaccaacacacccagctccaccctctcgtcaagctcatcctcccgggaacgtctccaccagcttcccttccagccgacgccggacgagctgcacttcctgtccaagcacttccgcagctcagagaatgtgcttgatgaggaaggcggccggtcaccccgcctccgaccccgctctcgcagtctcagcccgggccgtgcaacggggaccttcgacaatgagattgtcatgatgaatcacgtgtaccgggagaggttccccaaggccacagcacagatggagggccgtctgcaggagttcctgacggcctacgcgcccggcgcccggctggcgctggctgatggcgtcttgggcttcatccaccaccagatcgtcgagctggcccgagactgcttggccaagtctggcgagaacctcgtcacctcccgctacttcctagagatgcaggagaagctggagcggcttctgcaggatgcccatgagcgttcggacagtgaggaggtcagcttcatcgtccagcttgtccggaaactgctgatcatcatctcacggccagctcggctgctggagtgtctggagtttgaccctgaggaattttaccacctgctggaggcggctgagggccatgcgcgggagggccaaggcattaagactgaccttccacagtacatcattgggcagctgggcctggccaaggaccccctggaggagatggtgccactgagtcacctcgaagaagaacagcccccagcacctgagtccccagagagccgcgccctggtcggccagtcacggaggaagccatgcgaaagcgactttgagaccatcaaactcattagcaacggagcctatggggccgtctacctggtgcggcaccgtgacacacggcagcgctttgccatcaagaagatcaacaaacagaacttgatcctgcgtaaccagatccagcaggtctttgtggagcgtgacattctcacctttgccgagaacccctttgtggtcagcatgttctgctcctttgagacccggcgccacctatgtatggtcatggaatacgtggaaggcggcgactgcgccacgctcctgaagaacatgggcccgctgcccgtggacatggcccgcctgtacttcgccgagacggtgttggcgctggagtacctgcataactatggcatcgtgcaccgtgacctcaaaccagacaatctgctcatcacctcgcttggccacatcaagctcacggacttcggcctgtccaagatcggcctcatgagcatggccaccaacctctatgagggccacatcgagaaggacgcccgagagttcatcgacaagcaggtgtgtgggacgccggagtacatagcccccgaggtgatcttccgccagggctatgggaagccagtggactggtgggccatgggcgtcgtcctctatgagtttctggtgggctgcgtgcctttctttggagatacccccgaggaactcttcggtcaggtggtcagcgatgagatcatgtggccagagggagatgaggcccttccagcagacgcccaggacctcatcaccaggttgctccggcagagcccgctggaccgtctgggcactggtggcacccacgaagtgaagcagcacccctttttcctggccctggactgggcagggcttctccgacacaaagccgagttcgtgccccagctcgaagctgaggatgataccagctactttgacacacgttcggaacgttaccgccatctgggctccgaggacgacgagaccaatgatgaagaatcgtccacagagatcccccagttctcctcctgctcccaccggttcagcaaggtctacagcagctctgagttcctggccgtccagcccactcctaccttcgctgaaaggagcttcagtgaagaccgggaggaggggtgggagcgcagcgaagtggactatggccgccggctgagtgctgacatccggctgaggtcctggacatcctctggatcctcctgtcagtcatcttcgtcccagcccgagcggggtcccagcccatctctcctgaataccatcagcctggacacaatgcccaagtttgccttctcatcagaggatgagggggtaggcccaggccctgcaggccccaagaggcccgtcttcattctaggggagcctgaccccccaccagcggccaccccagtgatgcccaagccctcgagcctttctgccgacacagctgctctcagccacgcccgcctacggagcaatagcatcggcgcccgacactccacaccaaggcctctggatgccggccggggccgccgccttgggggcccaagagacccagcccctgagaagtccagagcctcctccagcggtggcagtggtggcggcagtgggggccgcgtgcccaagtcagcctctgtctctgccctgtccctcatcatcacggcagatgatggcagcggcggccccctcatgagccccctttccccgcgctctctgtcctcgaacccgtcgtcccgtgactcttcgccgagccgagacccgtcccccgtgtgtggcagcctgcggccccccatcgttatccacagctctggcaagaagtacggcttcagcctgcgggcgatccgcgtctacatgggtgatagcgacgtctacactgtgcaccacgtcgtctggagtgtggaggacggaagccccgcccaggaggcgggcctgcgggctggggacctcatcacccacatcaacggggagtcagtgctggggctggtgcacatggacgtcgtggagctgctgctgaagagcggcaacaagatatccctgcggaccacagccctggagaacacctccatcaaggtgggccccgcccggaagaatgtggccaagggccgcatggcacgcaggagcaagaggagccgtcggcgggagacccaggatcggcggaagtcacttttcaagaagatctccaagcagacctccgtgctgcacaccagccgcagcttctcctccggactccaccactcactgtcatccagtgagagcctccccggctcgcccacccacagcctctcccccagccccaccactccctgccgaagcccagcccctgatgtcccagcagataccactgcatccccacccagcgcatccccgagctccagcagccccgcctccccagctgctgctggccacacccgccccagctccctgcacggcctggctgccaagcttgggccaccccgccccaagactggccgccgcaagtccaccagcagcatcccgccctccccgctggcctgcccgcccatctccgcgcccccaccccgctcgccctcgcccctgcccgggcacccgcccgcacctgcccgatccccgcggctgcgccggggccagtcagctgacaagctgggcacaggggagcggctggatggggaggcggggcggcgcactcgtgggccagaggccgagctcgtggtcatgcggcggctgcacctgtccgagcgccgagactccttcaagaagcaggaggccgtgcaggaggttagcttcgatgagccgcaggaggaggccactgggctgcccacctcagtgccacagatcgccgtggagggcgaggaagccgtgccagtagctctcgggcccaccggaagagactgatcccctgccaggtctctccctggcatcaaagttacgcgttttcttgtgcaatgttttttccgtaaagtcatgcctggatggggactgagccaccagcctgacacccagaaggcgagaagccatctcggtccttgctggaaggtggagacatcgcttgtgttctggtgtcaatcggggctggatggggcaagaatgggggacaagggtggctttgtaaatagcagcaaatccctgcaactaatttattactttttttttctttttttttttttttttttgagacagagtctcactctgttgcccgggctggagtgcagcggcgtgatctcagctcactgcaacctccgcctcccaagttcaagcgattgtcctgcctcagcttcccaagtggctgggattacaggcgcccaccactatgcccagctaattttttgtatttttagtacagacggggtttcaccatgttggtcaggctggtctcgaactcctgacctcatgatttgcctgcctttgcctcccaaagtgctgggattacaggcgtgagccactgggcccagcctaatttattactttttataagcgatagccgtactgagccgccccctgaaggcggctgccaggtcttgccccaggcacctgggactctgtttgcaggccctgccctctgggctgagaaggatgcactttggacaagtcatctgtgtttgtgttttccagtttttctgtactttttaagtgttttgtgttacctggtctcattcccctccccacacctacccatttgaggggatggagttgaagtcacctggtcacctgtaccggcccagttcggctacaacctggagtgtccgtaaacaattcctctcacccacaaaacaatgtaatcccagcgatggactggattctgaaggccacttcccaccatcatagctgccatgcccaggcagtgcctgctctatatatagagtctgcctccaatcctgctggcttcagcctggagaagggatatgggagctggagctttgatggatgaataggtgttcaccggatctgggcagaggggtcatccgctccccaggtgggcactgataaaggaaggtacaggcctcacctggaactgccaaggcagcctccagaaatgctcggctgtctcggggcacgctccagtatgccagtcctgcgggattacgtccagctacttccagaaacactcagtgtcccctcccctcaggctctgccttggcctggccttgtccagtctaccctggacaagatgccgtgtgtttgaggcccagcagagtaagcccttggccgtgatgtgtctgaaacacctgttaggggttccctccatatgtcagagcctctctgggatgaagttcaagccagaaaacccagtcgaggctcaagtttgaatttcagcttcactgtgtggctctgggaaaatggctttcccactctgtgcctcagtttccttgtgtttacaagactaatcccattgactgtttattaagcacctactgtgtgccaagcgcttttacgtggcttctccctcagccagccttgagaaggctggaggtggtgtcatcacctccattttacagacaaagcagctgagaccccagcgaggggcggagacctgtcccacgatcacccagcaggagtcgtggcagaacggagcatcagccagaccctgttgtgggcgttgtcatcaagggagcttgaatggagggtctggtgtcagatacagccgactccagccccagctcatcccccatgatgctgtgtgacccactgggcactctggtgagggagctttccagacatcaacagcccactctgcttccctttctgagtcccctgtccagcactgcctagtgttggagggtagaccaaggctgtgcatgattcaccccctccttccatcctggagctggcagtgaataaaagcccgtatttacaaaga

SEQ ID NO: 18094 - DNA, 2963 bp, Homo sapiens
  source 1..2963: mol_type = unassigned DNA
gggagtggctgctcgcggaggggcagtgtctgcggggccgctgtatgctgtccagcgatggatcccaccgcgggaagcaagaaggagcctggaggaggcgcggcgactgaggagggcgtgaataggatcgcagtgccaaaaccgccctccattgaggaattcagcatagtgaagcccattagccggggcgccttcgggaaagtgtatctggggcagaaaggcggcaaattgtatgcagtaaaggttgttaaaaaagcagacatgatcaacaaaaatatgactcatcaggtccaagctgagagagatgcactggcactaagcaaaagcccattcattgtccatttgtattattcactgcagtctgcaaacaatgtctacttggtaatggaatatcttattgggggagatgtcaagtctctcctacatatatatggttattttgatgaagagatggctgtgaaatatatttctgaagtagcactggctctagactaccttcacagacatggaatcatccacagggacttgaaaccggacaatatgcttatttctaatgagggtcatattaaactgacggattttggcctttcaaaagttactttgaatagagatattaatatgatggatatccttacaacaccatcaatggcaaaacctagacaagattattcaagaaccccaggacaagtgttatcgcttatcagctcgttgggatttaacacaccaattgcagaaaaaaatcaagaccctgcaaacatcctttcagcctgtctgtctgaaacatcacagctttctcaaggactcgtatgccctatgtctgtagatcaaaaggacactacgccttattctagcaaattactaaaatcatgtcttgaaacagttgcctccaacccaggaatgcctgtgaagtgtctaacttctaatttactccagtctaggaaaaggctggccacatccagtgccagtagtcaatcccacaccttcatatccagtgtggaatcagaatgccacagcagtcccaaatgggaaaaagattgccaggaaagtgatgaagcattgggcccaacaatgatgagttggaatgcagttgaaaagttatgcgcaaaatctgcaaatgccattgagacgaaaggtttcaataaaaaggatctggagttagctctttctcccattcataacagcagtgcccttcccaccactggacgctcttgtgtaaaccttgctaaaaaatgcttctctggggaagtttcttgggaagcagtagaactggatgtaaataatataaatatggacactgacacaagtcagttaggtttccatcagtcaaatcagtgggctgtggattctggtgggatatctgaagagcaccttgggaaaagaagtttaaaaagaaattttgagttggttgactccagtccttgtaaaaaaattatacagaataaaaaaacttgtgtagagtataagcataacgaaatgacaaattgttatacaaatcaaaatacaggcttaacagttgaagtgcaggaccttaagctatcagtgcacaaaagtcaacaaaatgactgtgctaataaggagaacattgtcaattcttttactgataaacaacaaacaccagaaaaattacctataccaatgatagcaaaaaaccttatgtgtgaactcgatgaagactgtgaaaagaatagtaagagggactacttaagttctagttttctatgttctgatgatgatagagcttctaaaaatatttctatgaactctgattcatcttttcctggaatttctataatggaaagtccattagaaagtcagcccttagattcagatagaagcatcaaagaatcctcttttgaagaatcaaatattgaagatccacttattgtaacaccagattgccaagaaaagacctcaccaaaaggtgtcgagaaccctgctgtacaagagagtaaccaaaaaatgttaggtcctcctttggaggtgctgaaaacgttagcctctaaaagaaatgctgttgcttttcgaagttttaacagtcatattaatgcatccaataactcagaaccatccagaatgaacatgacttctttagatgcaatggatatttcgtgtgcctacagtggttcatatcccatggctataacccctactcaaaaaagaagatcctgtatgccacatcagaccccaaatcagatcaagtcgggaactccataccgaactccgaagagtgtgagaagaggggtggcccccgttgatgatgggcgaattctaggaaccccagactaccttgcacctgagctgttactaggcagggcccatgatatcccttggccagaaggtgaagaaaagttatctgataatgctcaaagtgcagtagaaatacttttaaccattgatgatacaaagagagctggaatgaaagagctaaaacgtcatcctctcttcagtgatgtggactgggaaaatctgcagcatcagactatgcctttcatcccccagccagatgatgaaacagatacctcctattttgaagccaggaatactgctcagcacctgactgtatctggatttagtctgtagcacaaaaattttccttttagtctagccttgtgttatagaatgaacttgcataattatatactccttaatactagattgatctaagggggaaagatcattatttaacctagttcaatgtgcttttaatgtacgttacagctttcacagagttaaaaggctgaaaggaatatagtcagtaatttatcttaacctcaaaactgtatataaatcttcaaagcttttttcatttatttattttgtttattgcactttatgaaaactgaagcatcaataaaattagaggacactattgagagtgagccactagcttgattttctttctcctctgatttcagttcactgttcagtttagcattaaaataataaaataatcatacagttcc

SEQ ID NO: 18095 - DNA, 3080 bp, Homo sapiens
  source 1..3080: mol_type = unassigned DNA
gggagtggctgctcgcggaggggcagtgtctgcggggccgctgtatgctgtccagcgatggatcccaccgcgggaagcaagaaggagcctggaggaggcgcggcgactgaggagggcgtgaataggatcgcagtgccaaaaccgccctccattgaggaattcagcatagtgaagcccattagccggggcgccttcgggaaagtgtatctggggcagaaaggcggcaaattgtatgcagtaaaggttgttaaaaaagcagacatgatcaacaaaaatatgactcatcaggtccaagctgagagagatgcactggcactaagcaaaagcccattcattgtccatttgtattattcactgcagtctgcaaacaatgtctacttggtaatggaatatcttattgggggagatgtcaagtctctcctacatatatatggttattttgatgaagagatggctgtgaaatatatttctgaagtagcactggctctagactaccttcacagacatggaatcatccacagggacttgaaaccggacaatatgcttatttctaatgagggtcatattaaactgacggattttggcctttcaaaagttactttgaatagagatattaatatgatggatatccttacaacaccatcaatggcaaaacctagacaagattattcaagaaccccaggacaagtgttatcgcttatcagctcgttgggatttaacacaccaattgcagaaaaaaatcaagaccctgcaaacatcctttcagcctgtctgtctgaaacatcacagctttctcaaggactcgtatgccctatgtctgtagatcaaaaggacactacgccttattctagcaaattactaaaatcatgtcttgaaacagttgcctccaacccaggaatgcctgtgaagtgtctaacttctaatttactccagtctaggaaaaggctggccacatccagtgccagtagtcaatcccacaccttcatatccagtgtggaatcagaatgccacagcagtcccaaatgggaaaaagattgccaggaaagtgatgaagcattgggcccaacaatgatgagttggaatgcagttgaaaagttatgcgcaaaatctgcaaatgccattgagacgaaaggtttcaataaaaaggatctggagttagctctttctcccattcataacagcagtgcccttcccaccactggacgctcttgtgtaaaccttgctaaaaaatgcttctctggggaagtttcttgggaagcagtagaactggatgtaaataatataaatatggacactgacacaagtcagttaggtttccatcagtcaaatcagtgggctgtggattctggtgggatatctgaagagcaccttgggaaaagaagtttaaaaagaaattttgagttggttgactccagtccttgtaaaaaaattatacagaataaaaaaacttgtgtagagtataagcataacgaaatgacaaattgttatacaaatcaaaatacaggcttaacagttgaagtgcaggaccttaagctatcagtgcacaaaagtcaacaaaatgactgtgctaataaggagaacattgtcaattcttttactgataaacaacaaacaccagaaaaattacctataccaatgatagcaaaaaaccttatgtgtgaactcgatgaagactgtgaaaagaatagtaagagggactacttaagttctagttttctatgttctgatgatgatagagcttctaaaaatatttctatgaactctgattcatcttttcctggaatttctataatggaaagtccattagaaagtcagcccttagattcagatagaagcatcaaagaatcctcttttgaagaatcaaatattgaagatccacttattgtaacaccagattgccaagaaaagacctcaccaaaaggtgtcgagaaccctgctgtacaagagagtaaccaaaaaatgttaggtcctcctttggaggtgctgaaaacgttagcctctaaaagaaatgctgttgcttttcgaagttttaacagtcatattaatgcatccaataactcagaaccatccagaatgaacatgacttctttagatgcaatggatatttcgtgtgcctacagtggttcatatcccatggctataacccctactcaaaaaagaagatcctgtatgccacatcagcagaccccaaatcagatcaagtcgggaactccataccgaactccgaagagtgtgagaagaggggtggcccccgttgatgatgggcgaattctaggaaccccagactaccttgcacctgagctgttactaggcagggcccatggtcctgcggtagactggtgggcacttggagtttgcttgtttgaatttctaacaggaattccccctttcaatgatgaaacaccacaacaagtattccagaatattctgaaaagagatatcccttggccagaaggtgaagaaaagttatctgataatgctcaaagtgcagtagaaatacttttaaccattgatgatacaaagagagctggaatgaaagagctaaaacgtcatcctctcttcagtgatgtggactgggaaaatctgcagcatcagactatgcctttcatcccccagccagatgatgaaacagatacctcctattttgaagccaggaatactgctcagcacctgactgtatctggatttagtctgtagcacaaaaattttccttttagtctagccttgtgttatagaatgaacttgcataattatatactccttaatactagattgatctaagggggaaagatcattatttaacctagttcaatgtgcttttaatgtacgttacagctttcacagagttaaaaggctgaaaggaatatagtcagtaatttatcttaacctcaaaactgtatataaatcttcaaagcttttttcatttatttattttgtttattgcactttatgaaaactgaagcatcaataaaattagaggacactattgagagtgagccactagcttgattttctttctcctctgatttcagttcactgttcagtttagcattaaaataataaaataatcatacagttcc

SEQ ID NO: 18096 - DNA, 3623 bp, Homo sapiens
  source 1..3623: mol_type = unassigned DNA
ttttcctcacactaaatcgaaaactctccctgttggtcctgatctgtttcagtcaggcaaattacatcctgggaaaacgtcagatgacaggggaggccactcgcttcctgctcatccagtttcgacactttctgtgctttcattagcttccagacctcagccctggccctcgctttactgtacagtcagaactggtttctacgcctcgcgagggtgggaggtcgtgtatgggaggaggaccgcttcccaccagcctcgttgggaagccaggagaaatctcttcaaatcctgcgattcagagtcaagtcccagtcgtcctttttctggtcggcccagaactgtttgtgcctcctccctcatgaggaatgatgtcagtggggccgcggtcgccgcccacgaagagtgtaaggctgcgaagtcggggctttcccgacgccccctccgtccgcgtctgcgtaggggaggtgacgagggcggggcgcggcggcggggtgacgtcacggccgcgcgcggcgtgggcggagcctcactttgaacccagttggcgggagtggctgctcgcggaggggcagtgtctgcggggccgctgtatgctgtccagcgatggatcccaccgcgggaagcaagaaggagcctggaggaggcgcggcgactgaggagggcgtgaataggatcgcagtgccaaaaccgccctccattgaggaattcagcatagtgaagcccattagccggggcgccttcgggaaagtgtatctggggcagaaaggcggcaaattgtatgcagtaaaggttgttaaaaaagcagacatgatcaacaaaaatatgactcatcaggtccaagctgagagagatgcactggcactaagcaaaagcccattcattgtccatttgtattattcactgcagtctgcaaacaatgtctacttggtaatggaatatcttattgggggagatgtcaagtctctcctacatatatatggttattttgatgaagagatggctgtgaaatatatttctgaagtagcactggctctagactaccttcacagacatggaatcatccacagggacttgaaaccggacaatatgcttatttctaatgagggtcatattaaactgacggattttggcctttcaaaagttactttgaatagagatattaatatgatggatatccttacaacaccatcaatggcaaaacctagacaagattattcaagaaccccaggacaagtgttatcgcttatcagctcgttgggatttaacacaccaattgcagaaaaaaatcaagaccctgcaaacatcctttcagcctgtctgtctgaaacatcacagctttctcaaggactcgtatgccctatgtctgtagatcaaaaggacactacgccttattctagcaaattactaaaatcatgtcttgaaacagttgcctccaacccaggaatgcctgtgaagtgtctaacttctaatttactccagtctaggaaaaggctggccacatccagtgccagtagtcaatcccacaccttcatatccagtgtggaatcagaatgccacagcagtcccaaatgggaaaaagattgccaggaaagtgatgaagcattgggcccaacaatgatgagttggaatgcagttgaaaagttatgcgcaaaatctgcaaatgccattgagacgaaaggtttcaataaaaaggatctggagttagctctttctcccattcataacagcagtgcccttcccaccactggacgctcttgtgtaaaccttgctaaaaaatgcttctctggggaagtttcttgggaagcagtagaactggatgtaaataatataaatatggacactgacacaagtcagttaggtttccatcagtcaaatcagtgggctgtggattctggtgggatatctgaagagcaccttgggaaaagaagtttaaaaagaaattttgagttggttgactccagtccttgtaaaaaaattatacagaataaaaaaacttgtgtagagtataagcataacgaaatgacaaattgttatacaaatcaaaatacaggcttaacagttgaagtgcaggaccttaagctatcagtgcacaaaagtcaacaaaatgactgtgctaataaggagaacattgtcaattcttttactgataaacaacaaacaccagaaaaattacctataccaatgatagcaaaaaaccttatgtgtgaactcgatgaagactgtgaaaagaatagtaagagggactacttaagttctagttttctatgttctgatgatgatagagcttctaaaaatatttctatgaactctgattcatcttttcctggaatttctataatggaaagtccattagaaagtcagcccttagattcagatagaagcatcaaagaatcctcttttgaagaatcaaatattgaagatccacttattgtaacaccagattgccaagaaaagacctcaccaaaaggtgtcgagaaccctgctgtacaagagagtaaccaaaaaatgttaggtcctcctttggaggtgctgaaaacgttagcctctaaaagaaatgctgttgcttttcgaagttttaacagtcatattaatgcatccaataactcagaaccatccagaatgaacatgacttctttagatgcaatggatatttcgtgtgcctacagtggttcatatcccatggctataacccctactcaaaaaagaagatcctgtatgccacatcagaccccaaatcagatcaagtcgggaactccataccgaactccgaagagtgtgagaagaggggtggcccccgttgatgatgggcgaattctaggaaccccagactaccttgcacctgagctgttactaggcagggcccatggtcctgcggtagactggtgggcacttggagtttgcttgtttgaatttctaacaggaattccccctttcaatgatgaaacaccacaacaagtattccagaatattctgaaaagagatatcccttggccagaaggtgaagaaaagttatctgataatgctcaaagtgcagtagaaatacttttaaccattgatgatacaaagagagctggaatgaaagagctaaaacgtcatcctctcttcagtgatgtggactgggaaaatctgcagcatcagactatgcctttcatcccccagccagatgatgaaacagatacctcctattttgaagccaggaatactgctcagcacctgactgtatctggatttagtctgtagcacaaaaattttccttttagtctagccttgtgttatagaatgaacttgcataattatatactccttaatactagattgatctaagggggaaagatcattatttaacctagttcaatgtgcttttaatgtacgttacagctttcacagagttaaaaggctgaaaggaatatagtcagtaatttatcttaacctcaaaactgtatataaatcttcaaagcttttttcatttatttattttgtttattgcactttatgaaaactgaagcatcaataaaattagaggacactattgagagtgagccactagcttgattttctttctcctctgatttcagttcactgttcagtttagcattaaaataataaaataatcatacagttcc

SEQ ID NO: 18097 - DNA, 19141 bp, Homo sapiens
  source 1..19141: mol_type = unassigned DNA
ggctctgattcagttttctttttcttctcttttccttttttttttttttttttttttttttttaggaatgcagagcagttgctggggtgattgacctaggcacagtggagatatttcccatcttcaaagccatgcaaaagggcctccttgaccaagacacaggcctagtgcttctggaatctcaggttatcatgtctggcctcattgcccctgagacgggtgaaaacctctctttggaggagggcatagccagaaacctcattaatccccagatgtaccagcagctccgggagctacaggatgccctggccttaataagcaggcttactgagagcagaggccctctttctgtggtggaagcaattgaaaagagaataatcagtgagacagttggactgaaaatcttagaagctcacctggcaactggaggtttcagtctttcccctagtgagaactgtattaacctggaagaggcttttcatcaaggcctcatttctgcatggcttcattcagtattagagtcttatcttagaacatccaagaatttgatagaccctaacacagctgagaaaattggtttgctggatctgatgcagcgatgtattgtccaccaggaatcaggattcaaattactgcctgtcaaacaattggcaggggggatggtgagcttgaaatcaggccggaaggttagcattttccgtgcagttcaggaagggctaatagataggcaggtcactgtccggttgctggaagctcagctttttgctggtggcatagtagatccaagaacaggacacagacttacagtggaagaggctgtaagacataatctgattgaccaagatatggcctgtgctatcctcataaggcagcttcagacaggaggcatcatagacactgtcacggggcaaaggctaacaatagatgaagcagtgagcaatgatctagtagctgctaagatcgcccttgtgattctggagtccctctggtcattcatggggttgctgtggcctgaatctggagagatcctcccaattacagatgccctagaacaaggtattgtgtctactgaactagcacataaaatccttagtaaccgacagcatattaaggctctgtttctaccagcaaccacagagattttgtcctggaagaaagcaatagaaagtggtatcctggatagagatcttgccaataacttaaaatcgatttgtatacctgatgtgatgccccacatgcaactagcagactctgcagaacaaaatattaatcctggagcagcagttctaccgtgcagcaagagccaccctaaggccacagcaagccagagtgagaatctgttgttccagctgatgactcacagctatattaatgtgcaaaatggacagaggctgcttctgttagataaagagctgatggagacactaacatccagagatgagtatcaaacaagtcctccaaaagtggttgaaattgggcatcaaaggcaaaaaactcctgagggattgcaagaatcagctaatgtgaaaatctcaggaactttcagcagtgggtggactgtgaggctgcctgagttccagttttcttctcagaacaaagaatatcccgatcgggaagattgcactacagaaaaaggcaaaaagaccactgtagaaacagaagattcttctgtagagaaccctgaacaggatctgtttgtagaacaaaaagagagaaatccaaacattgatgctttgaaggtaataaataaagtcaaattagaggtacaaaggcagttgataggtacccaaagggaagaccaaacagcagtgtctgtcagagaaaatgccagcaggggacacctcctgaccatacctcctgctgaggcggaaggtgtgccgttggtggttgacaaagatgttttttctgttgaaacaccaaagaaagaacatcaacctctaagaaacacttcctttacatgtcagaatgaacaagcacacactcttgagactgaatatattcatgatgaaactggaggatctcacataaaaccccaaagcaaaaagttacaagttcaggtaaagaaaactctaggtataaagttagaactaaagtctgaaactgatgggaatgttcatcctctggacaaaaaggaaatgttaaagaaaacatttctggctaaggatgaccataaagaaagtcaagaagcacagaacatcgcaggtggtagtatgatgatgtcagaaaagaccgatgaggaagatagtggcagggaaatttttctgtcatgcagtcatccattagaattgcttgaagaagctaccttaaatgtattatctgcacagttactagatggtggtatctttcatgaacaaacaggtcaaaagctcttactaaatgaagcaatatcccgaggcattgtgccaagtcacactgccgtgaagcttatggagaagctgaacatgtttcaggggttctttgactctcagacttgtgagtctttgacaactgaagaagtcattaatgaaggtctgatggatgagaaattattacataatgtcctcatggcagacaaagctataagtggtgtcttagacccccgtacccagacactgtgctctgtaaaggatgcagttacagttggacttcttgacaaggaaacagccaccagaattttagagaggcaggtggtgactggtggaattattgatctgaaacgaggcaaaaaagtttcagtaactttggcctcaactcttggcttggtggacgttgctgaccagccagaacttataaatctggagaaagcttccaaaggtagagatgctgaaaaaacagttagggagagattaattagtttacaaatggaaacaacaggacttatagaccctgatagtaaagcacctttaacagttgtgcagtccattgacagaggtcttttggagagagaggaggccgttcgtttgttgactaagcaagtggtagatggaggtatcattcaccatatatctgggatgagactttctgttgataatgccttcagacatggcttaattggtgaagatttagccgagaaactcaaaagagttgagaacttaaacatccatcagatttttaatcctgaaacgaaggaaaatatttccctccctaaagccataaaattagatcttattacctcagacctgaaaagagaaatccaggaggttcaggcctttactggaaactttgtggatctcatttctggtcagagattgaccttggcagaagctaaaaaagaaggactgttaactaatgaagcagtattgtctccaggaatgatgcatggcattgtagatcccgagaactgcagaattgtcccctactcagaattagtcaagaaatgtaagattgatattgaatctggacagagatatctagaagtaattcccttctcagacattaaagatggggtgagcgacaaagtgcttacattgtctcaagcaattcagcttggaaaagtagactttgcatctacgctgaaggttctagaagcccaggcaaatactggtggaatcatagatactgctactggaaaaagactgacattggcatcagctttggaagagaaactggtggatgaaaacatggtcagaattattgcatctcatcaggtgttaaatggaggaattgttgacatatttagtgatcagagagtgactttagtagaagctattgagaaaagactgatcagccctgaactggcaaatatgatccaaatagatagttcagagttcagcgatcacagggctcagattgaaaagcaagaagggattgaagtgtgtgcattacaaaatgaatttctaggaaaggatatgttaattgcttgtaatcagactgctgaaatgagttgtaataaagtagaagagagtgagagattatttcaagttgaaaatcagtctgcacaagaaaaggttaaagtgagagtttctgatggggagcaggcaaaaaagagcagggaaatttccttaaaggaatttgggtgcaaggatcaacgtaagccaagaatgtcttcagatgctaaagaatttatcagtatcataaatcctcataatcttaaaggtaaatccttgggccaagtgtcattgacacacccttactctgaatgtgattttaaacttaaagaagtggctagaaataacatgggaaatgatacaaatgaagagcaggaaaaagcagtgacaaaaatagaaattatttctcatatgaagcagtctacctcatgtctagattctgaagaaataagagaaaatcaaggggaagtgattttggaagtacaagaaacatattgtgaaacgtcaggcaaattgccgagtgagcaggttttgcagcaaccaatgaatgctcgggtgaaaagtaagagagagaagagggaggtgattgtagaagaaagtatcagaacatgcaaaccagcatttctttctgaagaaaagttgtatcaggaaactgccattagagatgagcatgactcccatataaagagccaacctagggaaatgacctcaagtgaaaaagggaaagaagctgatacagaaatgggattttctattacttttaaaattgaagagtcctcttcccaagtggtacctcaaggaatttctgtaaaacatttagatgctttaacactcttcagctctaaacaggccaatgaaggaaaagtaaacaatttaagtctctgcttgactttaaaaccagaagaaaacttatctcgagaaattgcctgtggggcccagagtgaaccattcccttgtatgaccccaagacctgaaggattgcactaccaggaatcagatggaaaagcccaagtgacaggcccatcccaaatttccaaaacagacaagtctttccaaggaaccaccagacaggagaccaactatcaagattcctgggttacttcgaaaactaaggaaaccaaacatcaaatttcctcatctaatgaatgtaaagaaaagtcataccaagaagtatcttttgacccagcaagaggtcttaaattggaagaaatcacagtttctagaccagattcaaaagaagtcaggtatctagaattctcagacagaaaagaccttcatcatcagggcagcaaaagtgatgataaactttgtggaactctcaaatctgaaatagcaacacaggaactaactggagagaaatttctagaaatggcaaaccctaatgttgcaggtctagaagcaggatccattgaggacatagtgactcagagaggttccagagtcttgggatcctttcttccagagaaactgttcaaaggagtgtctcaaaaagagaatacagggcaacagaatgccatcattagtcctactgttctagagaccagtgaagaaaagacagtgtccctaacagtatgctctgcagtgaagacagagaagacaccacaggaaaagctcagagaaagccctggcagtgaacaaactcccttcatgactgcacctgaaggaaagggaaatggaggtgtaaacccagagcccttcagagcaactcagaatgtatttacccggcaactctgtttagaacatgatgaaaagctagtatcctatctgtctctgttacggaacattgaaatgaggaccaaacagattcaacctttggagctaaacctggcagaactacaggatctgctgtgtcaggccaaggtattagaaagggagttaaaggatctgaccaccttggtcagtcaggagctggagtgtgtgaatcagattatcatcagccagcctcaagaagttcctgctcaactgttgaaggctctagagaaagatgccaagaatcttcagaagtctctcagctctgtgagtgacacttggaattccaggctactccacttccagaatgctgtggaaatagaaaagactaaagtgttaaatcagcacacacagctagaaggccgacttcaagatctgagagcctgggttggcaataaaaatcttattctgaacagcaagggatctaacagtgaaatagatgttgacagcctgaacctctgcctccaacagtatgaggatttgaaacagcccatggctgaaaggaaagctcagctggatgctcttgcttttgatattcagttctttatctcagaacatgcccaggacttgtcccctcagcagaatcgacagatgctgaggcttctgaatgaactgcagaggtccttccaggacattttggaacagactgccgctcaggtggatgccttgcagggccatcttcaacaaatggagcaggaagccctggtgaagaccctgcagaaacaacaaaatacctgtcaccagcaactggaggatctttgcagttgggtaggacaggcagaaagagcactggcaggccaccaaggcagaaccacccagcaggatctctctgctttgcagaagaaccaaagtgacttgaaggatttacaggatgacattcagaatcgtgccacctcatttgccactgttgtcaaggacattgaggggttcatggaagagaatcagaccaagctgagcccacgtgagttgacagctcttcgggaaaagcttcatcaggctaaggagcaatatgaggcgctccaggaagagacacgtgtggcccagaaggaactggaggaagcagtgacctccgccttacagcaggagactgaaaagagtaaagcagcaaaggaactggcagagaacaagaagaagatcgatgctctcctggattgggtaacttcagtaggatcatctggtggacagctgctgaccaaccttccaggaatggagcagctctcgggagctagcttggagaaaggagccttggacaccactgatggttacatgggggtgaatcaagccccagagaaactggacaagcaatgtgagatgatgaaggcccgtcaccaagaattgctgtcccagcagcaaaatttcattctggccacccagtcagctcaggccttcttggatcagcatggccacaatctcacacctgaggagcaacagatgctgcaacagaagctgggagagctaaaggaacaatactctacttccctggcccaatcagaggcagaactgaagcaggtgcagacacttcaggatgagttgcagaaatttctgcaggatcataaagagtttgaaagctggttggaacgatccgagaaagagctggagaacatgcataagggaggcagcagccccgagacccttccctccctgctaaagcggcaaggaagcttctcagaggatgtcatttcccacaaaggagacttgagatttgtgactatctcaggacagaaagtcttggacatggaaaacagttttaaggaaggcaaagaaccatcagaaattggaaacttagtaaaggacaagttgaaggatgcaacagaaagatacactgctctccactcaaagtgtacacgattaggatctcacctgaatatgctgttaggccagtatcatcaattccaaaacagtgctgacagcctgcaggcctggatgcaggcttgtgaggccaacgtggagaagctcctctcagatactgttgcctctgaccctggagttctccaggagcagcttgcaacaacaaagcagttgcaggaggaattggctgagcaccaagtacctgtggaaaaactccaaaaagtagctcgtgacataatggaaattgaaggggagccagccccagaccacaggcatgttcaagaaactacagattccatactcagccacttccaaagcctctcctatagcctggctgagcgatcttctctgctgcagaaagcaattgcccaatctcagagtgtccaggaaagcctggagagcctgttgcagtctattggggaagttgaacaaaacctggaagggaagcaggtgtcatcactctcatcaggagtcatccaggaagccttagccacaaatatgaaattgaagcaggacattgctcggcaaaagagcagcttggaggccacccgtgagatggtgacccgattcatggagacagcagacagtactacagcagcagtgctgcagggcaaactggcagaggtgagccagcggttcgaacagctctgtctacagcagcaagaaaaggagagctccctaaagaagcttctaccccaggcagagatgtttgaacacctctctggtaagctgcagcagttcatggaaaacaaaagtcggatgctggcctctggaaatcagccagatcaagatattacacatttcttccaacagatccaggagctcaatttggaaatggaagaccaacaggagaacctagatactcttgagcacctggtcactgaactgagctcttgtggctttgcgctggacttgtgccagcatcaggacagggtacagaatctaagaaaagacttcacagagctacagaagacagttaaagagagagagaaagatgcatcatcttgccaggaacagttggatgaattccggaagctggtcaggaccttccagaaatggttgaaagaaactgaagggagtattccacctacggaaacttctatgagtgctaaagagttagaaaagcagattgaacacctgaagagtctactagatgactgggcaagtaagggaactctggtggaagaaatcaattgcaaaggtacttctttagaaaatctcatcatggaaatcacagcacctgattcccaaggcaagacaggttccatactgccctctgtaggaagctctgtaggcagtgtaaacggataccacacctgcaaagatctgacggagatccagtgtgacatgtcagatgtaaacttgaagtatgagaaactagggggagtacttcatgaacgccaggaaagccttcaggctatcctcaacagaatggaggaggttcacaaggaggcaaactctgtgctgcagtggctggaatcaaaagaggaagtcctgaaatccatggatgccatgtcatctccaaccaagacagaaacagtgaaagcccaagctgaatctaacaaggccttcctggctgagttggaacagaattctccaaaaattcaaaaagtaaaggaagccctggctggattactggtgacatatcccaactcacaggaagcagaaaattggaagaaaattcaggaagaactcaattcccgatgggaaagggccactgaggttactgtggctcggcaaaggcagctagaggaatctgcaagtcatctggcctgcttccaggctgcagaatcccagctccggccgtggctgatggagaaagaactgatgatgggagtgctggggcccctgtctattgaccccaacatgttgaatgcacaaaagcaacaggtccagtttatgctaaaggaatttgaagcacgcaggcaacagcatgagcaactgaatgaggcagctcagggcatcctaacaggccctggagatgtctctctgtccaccagccaagtacagaaagaactccagagcatcaatcagaaatgggttgagctgactgacaaactcaactcccgttccagccaaattgaccaagctattgttaagagcacccagtaccaggaactgctccaggacttatcagagaaggtgagggcagttggacaacggctgagtgtccagtcagctatcagcacccaaccagaggctgtaaagcagcaattggaagagaccagtgaaattcgatctgacttggagcagttagaccacgaggttaaggaggctcagacactgtgcgatgaactctcagtgctcattggtgagcagtacctcaaggatgaactgaagaagcgtttggagacagttgccctgcctctccaaggtttagaagaccttgcagccgatcgcattaacagactccaggcagctcttgccagcacccagcagttccagcaaatgtttgatgagttgaggacctggttggatgataaacaaagccagcaagcaaaaaactgcccaatttctgcaaaattggagcggctacagtctcagctacaggagaatgaagagtttcagaaaagtcttaatcaacacagtggctcctatgaggtgattgtggctgaaggggaatctctacttctttctgtacctcctggagaagagaaaaggactctacaaaaccagttggttgagctcaaaaaccattgggaagagcttagtaaaaaaactgcagacagacaatccaggctcaaggattgtatgcagaaagctcagaaatatcagtggcatgtggaagaccttgtgccatggatagaagattgtaaagctaagatgtctgagttgcgagtcactctggatccagtgcagctagagtccagtctcctaagatcaaaggctatgctgaatgaggtggagaagcgccgctccctgctggaaatattgaatagtgctgctgacattctgatcaattcttcagaagcagatgaggatggaatccgggatgagaaggctgggatcaaccagaacatggatgctgttacagaagagctgcaggccaaaacagggtcactcgaagaaatgactcagaggctcagggagttccaggaaagctttaagaatattgaaaagaaggttgaaggagccaaacaccaacttgagatctttgatgctctgggttctcaagcctgtagcaacaagaacctggagaagctaagagctcaacaggaagtgctgcaggccctagagcctcaggtagactatctgaggaactttactcagggtctggtagaagatgccccagatggatctgatgcttctcaacttctccaccaagctgaggtcgcccagcaagagttcctcgaagttaagcaaagagtgaacagtggttgtgtgatgatggaaaacaagctggaggggattggccagtttcactgccgggtccgagagatgttctctcaattggcagacctggatgatgagctagatggcatgggtgctattggcagagacactgatagcctccagtcccaaatcgaggatgtccggctattccttaacaaaattcacgtcctcaaattagacatagaggcctctgaagcagagtgtcgacatatgctagaagaagaggggactctggatttgttaggtctcaaaagggagctagaagccctgaacaaacagtgtggcaaactgacagagagggggaaagctcgtcaggaacagctggaactgacactaggccgtgtagaggacttctacaggaaattgaaaggactcaatgacgcgaccacagcagcagaggaggcagaggccctccagtgggtagtggggaccgaagtggaaatcatcaaccaacaattagcagattttaaaatgtttcagaaagaacaagtggatcctcttcagatgaaattgcagcaggtgaatggacttggccagggattaattcagagtgcaggaaaagactgtgatgtacagggtttagaacatgacatggaagagatcaatgctcgatggaatacattgaataaaaaggtcgcacaaagaattgcacagctacaggaagctttgttgcattgtgggaagtttcaagatgccttggagccattgctcagctggttggcagataccgaggagctcatagccaatcagaaacctccatctgctgagtataaagtggtgaaagcacagatccaagaacagaagttgctccagcggctcctagatgatcgaaaggccacagtagacatgcttcaagcagaaggaggcagaatagcccagtcagcagagctggctgatagagagaaaatcactggacagctggagagtcttgaaagtagatggactgaactactcagtaaggcagcagccaggcaaaaacagctggaagacatcctggttctggccaaacagttccatgagacagctgagcctatttctgacttcttatctgtcacagagaaaaagcttgctaactcagaacctgttggcactcagactgccaaaatacagcagcagatcattcggcacaaggctctggaagaagacatagaaaaccatgcaacagatgtgcaccaggcagtcaaaattgggcagtccctctcctccctgacatctcctgcagaacagggtgtgctgtcagaaaagatagactcattgcaggcccgatacagtgaaattcaagaccgctgttgtcggaaggcagccctacttgaccaagctctgtctaatgctaggctgtttggggaggatgaggtggaggtgctcaactggctggctgaggttgaggacaagctcagttcagtgttcgtaaaggatttcaaacaggatgtcctgcacaggcagcatgctgaccacctggctttaaatgaagaaattgttaatagaaagaagaatgtagatcaagctattaaaaatggtcaggctcttctaaaacaaaccacaggtgaggaggtgttacttatccaggaaaaactagatggtataaagactcgttacgcagacatcacagttactagctccaaggccctcagaactttagagcaagcccggcagctggccaccaagttccagtctacttatgaggaactgaccgggtggctgagggaggtggaggaggagctggcaaccagtggaggacagtctcccacaggggaacagataccccagtttcagcagagacagaaggaattaaagaaggaggtcatggagcacaggctggtgttggacacagtgaatgaggtgagccgtgctctcttagagctggtgccctggagagccagagaagggctggataaacttgtgtccgatgctaacgagcagtacaaactagtcagtgacactattggacaaagggtggatgaaattgatgctgctattcagagatcacaacagtatgagcaagctgccgatgcagaactagcttgggttgctgaaacaaaacggaaactgatggctctgggtccaattcgcctggaacaggaccagaccacagctcagcttcaggtacagaaggctttctccattgacattattcgacacaaagattcaatggatgaactcttcagtcaccgtagtgaaatctttggcacatgtggggaggagcaaaaaactgtattacaggaaaagacagagtctctaatacagcaatatgaagccattagcctactcaattcagagcgttatgcccgcctagagcgggcccaggtcttagtaaaccagttttgggaaacttatgaagagctcagcccctggattgaggaaactcgggcactaatagcacagttaccctctccagccattgatcatgagcagctcaggcagcaacaagaggaaatgaggcaattaagggaatctattgctgaacacaaacctcatattgacaaactactaaagataggcccacaactaaaggaattaaaccctgaggaaggggaaatggtggaagaaaaataccagaaagcagaaaacatgtatgcccaaataaaggaggaggtgcgccagcgagccctggctctggatgaagccgtgtcccagtccacacagattacagagtttcatgataaaattgagcctatgttggagacactggagaatctttcctctcgcctgcgtatgccaccactgatccctgctgaagtagacaagatcagagagtgcatcagtgacaataagagtgccaccgtggagctagaaaaactgcagccatcctttgaggccttgaagcgccgtggagaggagcttattggacgatctcagggagcagacaaggatctggctgcaaaagaaatccaggataaattggatcaaatggtattcttctgggaggacatcaaagctcgggctgaagaacgagaaatcaaatttcttgatgtccttgaattagcagagaagttctggtatgacatggcagctctcctgaccaccatcaaagacacccaggatattgtccatgacttggaaagcccaggcattgatccttccatcatcaaacaacaggttgaagctgctgagactattaaggaagagacagatggtctgcatgaagagctggagtttattcggatccttggagcagatttgatttttgcctgtggagaaactgagaagcctgaagtgaggaagagcattgatgagatgaataatgcttgggagaacttaaacaaaacatggaaagagaggctagaaaaacttgaggatgctatgcaagctgctgtgcagtatcaggacactcttcaggctatgtttgactggctagataacactgtgattaaactctgcaccatgccccctgttggcactgacctcaatactgttaaagatcagttaaatgaaatgaaggagttcaaagtagaagtttaccaacagcaaattgagatggagaagcttaatcaccagggtgaactgatgttaaagaaagctactgatgagacggacagagacattatacgagaaccactgacagaactcaaacacctctgggagaacctgggtgagaaaattgcccaccgacagcacaaactagaaggggctctgttggcccttggtcagttccagcatgccttagaggaactaatgagttggctgactcataccgaagagttgttagatgctcagagaccaataagtggagacccaaaagtcattgaagttgagctcgcaaagcaccatgtcctaaaaaatgatgttttggctcatcaagccacagtggaaacagtcaacaaagctggcaatgagcttcttgaatccagtgctggagatgatgccagcagcttaaggagccgtttggaagccatgaaccaatgctgggagtcagtgttacagaaaacagaggagagggagcagcagcttcagtcaactctgcagcaggcccagggcttccacagtgaaattgaagatttcctcttggaacttactagaatggagagccagctttctgcatctaagcccacaggaggacttcctgaaactgctagggaacagcttgatacacatatggaactctattcccagctgaaagccaaggaagagacttataatcaactacttgacaagggcagactcatgcttctaagccgtgacgactctgggtctggctccaagacagaacagagtgtagcacttttggagcagaagtggcatgtggtcagcagtaagatggaagaaagaaagtcaaagctggaagaggccctcaacttggcaacagaattccagaattccctacaagaatttatcaactggctcactctagcagagcagagtttaaacatcgcttctccaccaagcctgattctaaatactgtcctttcccagatagaagagcacaaggtttttgctaatgaagtaaatgctcatcgagaccagatcattgagctggatcaaactgggaatcaattaaagttccttagccaaaagcaggatgttgttctgatcaagaatttgttggtgagcgtgcagtctcgatgggagaaggttgtccagcgatctattgaaagagggcgatcactagatgatgccaggaagcgggcaaaacaattccatgaagcttggaaaaaactgattgactggctagaagatgcagagagtcacctggactcagaactagagatatccaatgacccagacaaaattaaacttcagctttctaagcataaggagtttcagaagactcttggtggcaagcagcctgtgtatgataccacaattagaactggcagagcactgaaagaaaagactttgcttcccgaagatagtcagaaacttgacaatttcctaggagaagtcagagacaaatgggatactgtttgtggcaagtctgtggagcggcagcacaagttggaggaagccctgctcttttcgggtcagttcatggatgctttgcaggcattggttgactggttatacaaggtggagccacagctggctgaggaccagcccgtgcacggggaccttgacctcgtcatgaacctcatggatgcacacaaggttttccagaaggaactgggaaagcgaacaggaaccgttcaggtcctgaagcggtcaggccgagagctgattgagaatagtcgagatgacaccacttgggtaaaaggacagctccaggaactgagcactcgctgggacactgtctgtaaactctctgtttccaaacaaagccggcttgagcaggccttaaaacaagcggaagtgtttcgagacacagtccacatgctgttggagtggctttctgaagcagagcaaacgcttcgctttcggggagcacttcctgatgacacagaggccctgcagtctctcattgacacccataaggaattcatgaagaaagtagaagaaaagcgagtggacgttaactcagcagtagccatgggagaagtcatcctggctgtctgccaccccgattgcatcacaaccatcaaacactggatcaccatcatccgagctcgcttcgaggaggtcctgacatgggctaagcagcaccagcagcgtcttgaaacggccttgtcagaactggtggctaatgctgagctcctggaagaacttctggcatggatccagtgggctgagaccaccctcattcagcgggatcaggagccaatcccgcagaacattgaccgagttaaagcccttatcgctgagcatcagacatttatggaggagatgactcgcaaacagcctgacgtggaccgggtcaccaagacatacaaaaggaaaaacatagagcctactcacgcgcctttcatagagaaatcccgcagcggaggcaggaaatccctaagtcagccaacccctcctcccatgccaatcctttcacagtctgaagcaaaaaacccacggatcaaccagctttctgcccgctggcagcaggtgtggctgttagcactggagcggcaaaggaaactgaatgatgccttggatcggctggaggagttgaaagaatttgccaactttgactttgatgtctggaggaaaaagtatatgcgttggatgaatcacaaaaagtctcgagtgatggatttcttccggcgcattgataaggaccaggatgggaagataacacgtcaggagtttatcgatggcattttagcatccaagttccccaccaccaagttagagatgactgctgtggctgacattttcgaccgagatggggatggttacattgattattatgaatttgtggctgctcttcatcccaacaaggatgcgtatcgaccaacaaccgatgcagataaaatcgaagatgaggttacaagacaagtggctcagtgcaaatgtgcaaaaaggtttcaggtggagcagatcggagagaataaataccggttcttcctcggcaatcagtttggggattctcagcagttgcggctggtccgtattctgcgcagcaccgtgatggttcgcgttggtggaggatggatggccttggatgaatttttagtgaaaaatgatccctgccgagcacgaggtagaactaacattgaacttagagagaaattcatcctaccagagggagcatcccagggaatgacccccttccgctcacggggtcgaaggtccaaaccatcttcccgggcagcttcccctactcgttccagctccagtgctagtcagagtaaccacagctgtacatccatgccatcttctccagccaccccagccagtggaaccaaggttatcccatcatcaggtagcaagttgaaacgaccaacaccaacttttcattctagtcggacatcccttgctggtgataccagcaatagttcttccccggcctccacaggtgccaaaactaatcgggcagaccctaaaaagtctgccagtcgccctgggagtcgggctgggagtcgagccgggagtcgagccagcagccggcgaggaagtgacgcttctgactttgacctcttagagacgcagtctgcttgttccgacacttcagaaagcagcgctgcagggggccaaggcaactccaggagagggctaaacaaaccttccaaaatcccaaccatgtctaagaagaccaccactgcctcccccaggactccaggtcccaagcgataacactgtctaagcacccccaagccactatccactttgaatcctgctccatacattgggtgtatatttattctgaacgggagaagttatattgttaaaagtgtaaaagaataattgtgttatgaagctgccttattttttttctttttgtaagttactattttcatgtgaatatttatgtagataaaatttgcctcctggtaaccctgtaatggatggggcccagaaatgaaatatttgagaaaaacaagtgaaaaggtcaagatacaaatgtgtattaaaaaaaaaaaagcctattaatagggtttctgcgcggtgcagggttgtaaacctgctttatcttttaggattattcctaaatgcatcttctttataaacttgacttgctatctcagcaagataaattatattaaaaaaataagaatcctgcagtgtttaaggaactctttttttgtaaatcacggacacctcaattagcaagaactgaggggagggctttttccattgtttaatgttttgtgatttttagctaaagagagggaacctcatctaagtaacatttgcacatgatacagcaaaaggagttcattgcaatactgtctttggatattgtttcagtactgggtgtttaaaggacaaatagctgctagaattcaggggtaaatgtaagtgttcagaaaacgtcagaacatttggggttttaaactgatttgttgctccctatccagcctagacaccagtaactcttgtgttcaccaggacccagacccttggcaagggataggctcgttggtgacattgtgaatttcagatttgttttatccactttttttgctatttatttaaatggtcgatcaacttcccacaaactgaggaatgaattccacgagcctgttctgaaaatgtggacgtaagacaaacacgtgctcgtcctttaatggagttcaccagcacacttgttaaccagtcctgtttgctttcgtctttttttgtgcgtaataaagtcaactgaccaagtgaccatgaaaaggggctgtctggggctcctgttttttagctgctgttcttcagctccgaccatgttgctgtgtgattatctcaattggttttaattgaggcagaaactgaagctctaccaatgaactgtttagaaacaagacacacttttgtattaaaattgcttgcagtaacaaata

SEQ ID NO: 18098 - DNA, 17668 bp, Homo sapiens
  source 1..17668: mol_type = unassigned DNA
atcacttctccctgggctcccaggccctcctgcagcagcccccgcctgggccatgtcttcctcagatgaagagacgctcagtgagcggtcatgtcggagtgagcggtcttgtcggagtgagcgatcttacaggagcgagcggtcggggagcctgtctccctgtcccccaggggacaccttgccctggaacctgccactgcatgagcagaaaaagcggaaaagccaggattcggtgctggaccctgcagagcgtgctgtggtcagagtcgctgatgaacgggaccgggttcagaagaaaacgttcaccaagtgggtcaacaagcacttaatgaaggtccgcaagcacatcaatgatctttatgaagatctgcgggatggccataacctgatctctctgttggaggtcctctcaggcatcaaactgccccgggagaagggcaggatgcgttttcataggctgcagaatgtgcagattgccctggacttcctaaagcagcgacaggtgaaactagtgaatattcgcaatgatgacatcacagatggcaaccccaagttgaccctgggtctgatctggaccattattttgcatttccagatctctgacatctacattagtggagaatcaggggatatgtcagccaaggagaaactactcctgtggacccagaaggtgacagctggttacacaggaatcaaatgcaccaacttttcctcctgctggagtgatgggaagatgttcaatgcactcattcaccgataccgacccgatctagtagacatggagagggtgcaaatccaaagtaaccgagagaatctggaacaggcttttgaagtggcagaaagactgggggtcactcgcctgctggatgcagaagatgtggatgtgccatctccagatgaaaagtctgtaatcacttatgtgtcttcgatttatgatgccttccctaaagttcctgagggtggagaagggatcagtgctacggaagtggactccaggtggcaagaataccaaagccgagtggactccctcattccctggatcaaacagcatacaatactgatgtcagataaaacttttccccaaaaccctgttgaactaaaggcactttataaccaatatatacacttcaaagaaacagaaattctggccaaggagagagaaaaaggaagaattgaggaattatataaattactagaggtgtggattgaatttggccgaattaaactgcctcaaggttatcaccctaatgatgtggaagaagagtggggaaagctcatcatagagatgctggaacgagagaaatcacttcggccggctgtggagaggctggaattgctgctacagattgcaaacaaaatccagaatggtgctttgaactgtgaagaaaaactgacactagctaagaatacactgcaggctgatgctgctcacctggaatcaggacaaccggtacaatgtgagtcagatgtcattatgtacattcaggagtgtgaaggtctcatcaggcagctgcaggtggatctccagatcctgcgggatgagaattactaccagctagaagagctggcttttagggtcatgcgtcttcaggatgagctggtcaccttgcgtctagagtgtacaaacctgtaccggaagggtcatttcacttcacttgaattggttccaccctctactttaaccaccactcatctgaaagcagaacccttaaccaaggcaacccattcttcttctacctcctggttccgaaagcctatgactcgggctgaacttgtggccatcagctcctctgaagatgaaggcaatctccgatttgtgtatgaactactgtcttgggtagaagagatgcagatgaaactggagcgagcagagtggggcaatgacctgcctagtgtggagttgcagctagaaacacagcagcacatccatacgagtgtagaagagctgggctcaagtgtcaaggaggccaggttgtatgagggaaagatgtcccagaatttccataccagctatgctgaaactcttggaaagctggagacacagtattgtaaattgaaggaaacttctagcttccggatgaggcaccttcagagcctgcataaatttgtttccagagctacagctgagttgatctggttgaatgagaaggaggaggaggaactagcatatgactggagtgacaacaattccaatatctcagccaagagaaattacttctctgagttgacaatggaactggaggagaaacaggatgtgtttcgttctctacaagatacagcagaactactttcacttgagaaccacccagccaagcagacagtggaggcttacagtgctgctgtccagtcccagttgcagtggatgaagcagctgtgcctgtgtgttgagcagcatgtgaaagagaatactgcttattttcagttcttcagtgatgcacgagagctggagtcattcttgaggaacctccaagattccattaaacgaaaatattcctgtgaccacaacaccagcttatcccgccttgaagacctgctccaggactccatggatgaaaaggagcagcttatacagtccaagagttccgttgccagtctcgttgggagatcaaaaaccatcgttcagctaaaaccacgcagtccagaccatgtgttaaagaacaccatttctgtcaaggctgtctgtgactacaggcagatcgagattactatttgcaaaaatgatgaatgtgtgctagaagataattctcagcggaccaaatggaaagtgatcagccccacagggaacgaggcaatggtgccgtcagtctgcttcctcatccccccacccaataaggatgccattgagatggccagcagggtcgaacaatcttatcagaaggttatggccctttggcatcagctgcatgttaacaccaaaagccttatctcttggaactatctgcgtaaagaccttgaccttgtacagacctggaacctagaaaagcttcgatcctcagcaccaggggagtgccatcagattatgaagaaccttcaggcccactatgaagactttctgcaggatagtcgtgactctgtgctgttctcagtggctgatcgcttgcgcttggaagaggaggtggaagcttgtaaagcccgcttccagcacctgatgaagtccatggagaatgaggacaaagaggagactgtggccaagatgtacatttcagagttgaagaacatccggctacgcctggaggagtatgaacagagggtggtcaaacgaattcagtctctagccagctctaggactgacagagatgcctggcaggacaatgcattaaggattgcagagcaagagcacacccaggaggatttacagcaattgaggtcagacttggatgcagtttctatgaaatgtgacagctttctccatcagtctccatctagttcaagtgtcccaactctgcgctcagaactgaatctgctggtggagaagatggaccatgtctatggtctctctactgtatatctgaataagttaaagacagttgatgttatagtacgtagcatacaggatgctgaactcttggtcaaaggttatgagattaagctgagtcaagaagaagtagtactggcagatctctcagctctggaggcccattggtcgacattacggcactggcttagtgatgtgaaggacaagaattcagtgttttcagtcctggatgaggaaattgccaaggccaaggtagtggcagagcagatgagtcgtctgacaccagagcgaaatctggatttggagcgctatcaggaaaaaggctcccagctgcaggagcgttggcaccgagtcattgcccagctcgagattcgccaatctgagctagaaagtatccaggaagttctgggagattaccgagcctgccatggaactctcatcaagtggattgaggaaaccactgcccagcaggaaatgatgaagccaggccaggcagaggatagcagagtgctttcggagcagctcagccagcagacggccctatttgcagaaattgagagaaatcagacaaaactggatcaatgtcaaaaattttcccagcagtactctactattgtaaaggactatgaattgcaactgatgacatacaaggcctttgtggaatcgcagcagaaatcccctggcaagcgccgtcgcatgctttcctcttcagatgccatcactcaagagttcatggacttaaggactcgctacacggcattggtgactttaacaactcagcacgtgaaatacatcagtgatgcactccggcgtctggaggaggaggagaaagtggtagaagaggagaaacaagaacatgtggagaaggttaaagaacttttgggctgggtgtctaccctagcgaggaatacacaaggaaaagctacctcatccgagaccaaagaatcaacagacattgaaaaagctattttggaacagcaggttctgtcagaagagctgacaacaaagaaagaacaagtctctgaagctattaaaacatcacagatcttcttggccaagcatggtcataagctctcagaaaaagagaagaaacaaatatctgagcaattgaatgccctaaacaaggcttaccatgacctttgtgatggttctgcaaatcagcttcagcagcttcagagccagttggctcaccagacagaacaaaagaccctgcagaaacaacaaaatacctgtcaccagcaactggaggatctttgcagttgggtaggacaggcagaaagagcactggcaggccaccaaggcagaaccacccagcaggatctctctgctttgcagaagaaccaaagtgacttgaaggatttacaggatgacattcagaatcgtgccacctcatttgccactgttgtcaaggacattgaggggttcatggaagagaatcagaccaagctgagcccacgtgagttgacagctcttcgggaaaagcttcatcaggctaaggagcaatatgaggcgctccaggaagagacacgtgtggcccagaaggaactggaggaagcagtgacctccgccttacagcaggagactgaaaagagtaaagcagcaaaggaactggcagagaacaagaagaagatcgatgctctcctggattgggtaacttcagtaggatcatctggtggacagctgctgaccaaccttccaggaatggagcagctctcgggagctagcttggagaaaggagccttggacaccactgatggttacatgggggtgaatcaagccccagagaaactggacaagcaatgtgagatgatgaaggcccgtcaccaagaattgctgtcccagcagcaaaatttcattctggccacccagtcagctcaggccttcttggatcagcatggccacaatctcacacctgaggagcaacagatgctgcaacagaagctgggagagctaaaggaacaatactctacttccctggcccaatcagaggcagaactgaagcaggtgcagacacttcaggatgagttgcagaaatttctgcaggatcataaagagtttgaaagctggttggaacgatccgagaaagagctggagaacatgcataagggaggcagcagccccgagacccttccctccctgctaaagcggcaaggaagcttctcagaggatgtcatttcccacaaaggagacttgagatttgtgactatctcaggacagaaagtcttggacatggaaaacagttttaaggaaggcaaagaaccatcagaaattggaaacttagtaaaggacaagttgaaggatgcaacagaaagatacactgctctccactcaaagtgtacacgattaggatctcacctgaatatgctgttaggccagtatcatcaattccaaaacagtgctgacagcctgcaggcctggatgcaggcttgtgaggccaacgtggagaagctcctctcagatactgttgcctctgaccctggagttctccaggagcagcttgcaacaacaaagcagttgcaggaggaattggctgagcaccaagtacctgtggaaaaactccaaaaagtagctcgtgacataatggaaattgaaggggagccagccccagaccacaggcatgttcaagaaactacagattccatactcagccacttccaaagcctctcctatagcctggctgagcgatcttctctgctgcagaaagcaattgcccaatctcagagtgtccaggaaagcctggagagcctgttgcagtctattggggaagttgaacaaaacctggaagggaagcaggtgtcatcactctcatcaggagtcatccaggaagccttagccacaaatatgaaattgaagcaggacattgctcggcaaaagagcagcttggaggccacccgtgagatggtgacccgattcatggagacagcagacagtactacagcagcagtgctgcagggcaaactggcagaggtgagccagcggttcgaacagctctgtctacagcagcaagaaaaggagagctccctaaagaagcttctaccccaggcagagatgtttgaacacctctctggtaagctgcagcagttcatggaaaacaaaagtcggatgctggcctctggaaatcagccagatcaagatattacacatttcttccaacagatccaggagctcaatttggaaatggaagaccaacaggagaacctagatactcttgagcacctggtcactgaactgagctcttgtggctttgcgctggacttgtgccagcatcaggacagggtacagaatctaagaaaagacttcacagagctacagaagacagttaaagagagagagaaagatgcatcatcttgccaggaacagttggatgaattccggaagctggtcaggaccttccagaaatggttgaaagaaactgaagggagtattccacctacggaaacttctatgagtgctaaagagttagaaaagcagattgaacacctgaagagtctactagatgactgggcaagtaagggaactctggtggaagaaatcaattgcaaaggtacttctttagaaaatctcatcatggaaatcacagcacctgattcccaaggcaagacaggttccatactgccctctgtaggaagctctgtaggcagtgtaaacggataccacacctgcaaagatctgacggagatccagtgtgacatgtcagatgtaaacttgaagtatgagaaactagggggagtacttcatgaacgccaggaaagccttcaggctatcctcaacagaatggaggaggttcacaaggaggcaaactctgtgctgcagtggctggaatcaaaagaggaagtcctgaaatccatggatgccatgtcatctccaaccaagacagaaacagtgaaagcccaagctgaatctaacaaggccttcctggctgagttggaacagaattctccaaaaattcaaaaagtaaaggaagccctggctggattactggtgacatatcccaactcacaggaagcagaaaattggaagaaaattcaggaagaactcaattcccgatgggaaagggccactgaggttactgtggctcggcaaaggcagctagaggaatctgcaagtcatctggcctgcttccaggctgcagaatcccagctccggccgtggctgatggagaaagaactgatgatgggagtgctggggcccctgtctattgaccccaacatgttgaatgcacaaaagcaacaggtccagtttatgctaaaggaatttgaagcacgcaggcaacagcatgagcaactgaatgaggcagctcagggcatcctaacaggccctggagatgtctctctgtccaccagccaagtacagaaagaactccagagcatcaatcagaaatgggttgagctgactgacaaactcaactcccgttccagccaaattgaccaagctattgttaagagcacccagtaccaggaactgctccaggacttatcagagaaggtgagggcagttggacaacggctgagtgtccagtcagctatcagcacccaaccagaggctgtaaagcagcaattggaagagaccagtgaaattcgatctgacttggagcagttagaccacgaggttaaggaggctcagacactgtgcgatgaactctcagtgctcattggtgagcagtacctcaaggatgaactgaagaagcgtttggagacagttgccctgcctctccaaggtttagaagaccttgcagccgatcgcattaacagactccaggcagctcttgccagcacccagcagttccagcaaatgtttgatgagttgaggacctggttggatgataaacaaagccagcaagcaaaaaactgcccaatttctgcaaaattggagcggctacagtctcagctacaggagaatgaagagtttcagaaaagtcttaatcaacacagtggctcctatgaggtgattgtggctgaaggggaatctctacttctttctgtacctcctggagaagagaaaaggactctacaaaaccagttggttgagctcaaaaaccattgggaagagcttagtaaaaaaactgcagacagacaatccaggctcaaggattgtatgcagaaagctcagaaatatcagtggcatgtggaagaccttgtgccatggatagaagattgtaaagctaagatgtctgagttgcgagtcactctggatccagtgcagctagagtccagtctcctaagatcaaaggctatgctgaatgaggtggagaagcgccgctccctgctggaaatattgaatagtgctgctgacattctgatcaattcttcagaagcagatgaggatggaatccgggatgagaaggctgggatcaaccagaacatggatgctgttacagaagagctgcaggccaaaacagggtcactcgaagaaatgactcagaggctcagggagttccaggaaagctttaagaatattgaaaagaaggttgaaggagccaaacaccaacttgagatctttgatgctctgggttctcaagcctgtagcaacaagaacctggagaagctaagagctcaacaggaagtgctgcaggccctagagcctcaggtagactatctgaggaactttactcagggtctggtagaagatgccccagatggatctgatgcttctcaacttctccaccaagctgaggtcgcccagcaagagttcctcgaagttaagcaaagagtgaacagtggttgtgtgatgatggaaaacaagctggaggggattggccagtttcactgccgggtccgagagatgttctctcaattggcagacctggatgatgagctagatggcatgggtgctattggcagagacactgatagcctccagtcccaaatcgaggatgtccggctattccttaacaaaattcacgtcctcaaattagacatagaggcctctgaagcagagtgtcgacatatgctagaagaagaggggactctggatttgttaggtctcaaaagggagctagaagccctgaacaaacagtgtggcaaactgacagagagggggaaagctcgtcaggaacagctggaactgacactaggccgtgtagaggacttctacaggaaattgaaaggactcaatgacgcgaccacagcagcagaggaggcagaggccctccagtgggtagtggggaccgaagtggaaatcatcaaccaacaattagcagattttaaaatgtttcagaaagaacaagtggatcctcttcagatgaaattgcagcaggtgaatggacttggccagggattaattcagagtgcaggaaaagactgtgatgtacagggtttagaacatgacatggaagagatcaatgctcgatggaatacattgaataaaaaggtcgcacaaagaattgcacagctacaggaagctttgttgcattgtgggaagtttcaagatgccttggagccattgctcagctggttggcagataccgaggagctcatagccaatcagaaacctccatctgctgagtataaagtggtgaaagcacagatccaagaacagaagttgctccagcggctcctagatgatcgaaaggccacagtagacatgcttcaagcagaaggaggcagaatagcccagtcagcagagctggctgatagagagaaaatcactggacagctggagagtcttgaaagtagatggactgaactactcagtaaggcagcagccaggcaaaaacagctggaagacatcctggttctggccaaacagttccatgagacagctgagcctatttctgacttcttatctgtcacagagaaaaagcttgctaactcagaacctgttggcactcagactgccaaaatacagcagcagatcattcggcacaaggctctggaagaagacatagaaaaccatgcaacagatgtgcaccaggcagtcaaaattgggcagtccctctcctccctgacatctcctgcagaacagggtgtgctgtcagaaaagatagactcattgcaggcccgatacagtgaaattcaagaccgctgttgtcggaaggcagccctacttgaccaagctctgtctaatgctaggctgtttggggaggatgaggtggaggtgctcaactggctggctgaggttgaggacaagctcagttcagtgttcgtaaaggatttcaaacaggatgtcctgcacaggcagcatgctgaccacctggctttaaatgaagaaattgttaatagaaagaagaatgtagatcaagctattaaaaatggtcaggctcttctaaaacaaaccacaggtgaggaggtgttacttatccaggaaaaactagatggtataaagactcgttacgcagacatcacagttactagctccaaggccctcagaactttagagcaagcccggcagctggccaccaagttccagtctacttatgaggaactgaccgggtggctgagggaggtggaggaggagctggcaaccagtggaggacagtctcccacaggggaacagataccccagtttcagcagagacagaaggaattaaagaaggaggtcatggagcacaggctggtgttggacacagtgaatgaggtgagccgtgctctcttagagctggtgccctggagagccagagaagggctggataaacttgtgtccgatgctaacgagcagtacaaactagtcagtgacactattggacaaagggtggatgaaattgatgctgctattcagagatcacaacagtatgagcaagctgccgatgcagaactagcttgggttgctgaaacaaaacggaaactgatggctctgggtccaattcgcctggaacaggaccagaccacagctcagcttcaggtacagaaggctttctccattgacattattcgacacaaagattcaatggatgaactcttcagtcaccgtagtgaaatctttggcacatgtggggaggagcaaaaaactgtattacaggaaaagacagagtctctaatacagcaatatgaagccattagcctactcaattcagagcgttatgcccgcctagagcgggcccaggtcttagtaaaccagttttgggaaacttatgaagagctcagcccctggattgaggaaactcgggcactaatagcacagttaccctctccagccattgatcatgagcagctcaggcagcaacaagaggaaatgaggcaattaagggaatctattgctgaacacaaacctcatattgacaaactactaaagataggcccacaactaaaggaattaaaccctgaggaaggggaaatggtggaagaaaaataccagaaagcagaaaacatgtatgcccaaataaaggaggaggtgcgccagcgagccctggctctggatgaagccgtgtcccagtccacacaggtatcacagtttcatgataaaattgagcctatgttggagacactggagaatctttcctctcgcctgcgtatgccaccactgatccctgctgaagtagacaagatcagagagtgcatcagtgacaataagagtgccaccgtggagctagaaaaactgcagccatcctttgaggccttgaagcgccgtggagaggagcttattggacgatctcagggagcagacaaggatctggctgcaaaagaaatccaggataaattggatcaaatggtattcttctgggaggacatcaaagctcgggctgaagaacgagaaatcaaatttcttgatgtccttgaattagcagagaagttctggtatgacatggcagctctcctgaccaccatcaaagacacccaggatattgtccatgacttggaaagcccaggcattgatccttccatcatcaaacaacaggttgaagctgctgagactattaaggaagagacagatggtctgcatgaagagctggagtttattcggatccttggagcagatttgatttttgcctgtggagaaactgagaagcctgaagtgaggaagagcattgatgagatgaataatgcttgggagaacttaaacaaaacatggaaagagaggctagaaaaacttgaggatgctatgcaagctgctgtgcagtatcaggacactcttcaggctatgtttgactggctagataacactgtgattaaactctgcaccatgccccctgttggcactgacctcaatactgttaaagatcagttaaatgaaatgaaggagttcaaagtagaagtttaccaacagcaaattgagatggagaagcttaatcaccagggtgaactgatgttaaagaaagctactgatgagacggacagagacattatacgagaaccactgacagaactcaaacacctctgggagaacctgggtgagaaaattgcccaccgacagcacaaactagaaggggctctgttggcccttggtcagttccagcatgccttagaggaactaatgagttggctgactcataccgaagagttgttagatgctcagagaccaataagtggagacccaaaagtcattgaagttgagctcgcaaagcaccatgtcctaaaaaatgatgttttggctcatcaagccacagtggaaacagtcaacaaagctggcaatgagcttcttgaatccagtgctggagatgatgccagcagcttaaggagccgtttggaagccatgaaccaatgctgggagtcagtgttacagaaaacagaggagagggagcagcagcttcagtcaactctgcagcaggcccagggcttccacagtgaaattgaagatttcctcttggaacttactagaatggagagccagctttctgcatctaagcccacaggaggacttcctgaaactgctagggaacagcttgatacacatatggaactctattcccagctgaaagccaaggaagagacttataatcaactacttgacaagggcagactcatgcttctaagccgtgacgactctgggtctggctccaagacagaacagagtgtagcacttttggagcagaagtggcatgtggtcagcagtaagatggaagaaagaaagtcaaagctggaagaggccctcaacttggcaacagaattccagaattccctacaagaatttatcaactggctcactctagcagagcagagtttaaacatcgcttctccaccaagcctgattctaaatactgtcctttcccagatagaagagcacaaggtttttgctaatgaagtaaatgctcatcgagaccagatcattgagctggatcaaactgggaatcaattaaagttccttagccaaaagcaggatgttgttctgatcaagaatttgttggtgagcgtgcagtctcgatgggagaaggttgtccagcgatctattgaaagagggcgatcactagatgatgccaggaagcgggcaaaacaattccatgaagcttggaaaaaactgattgactggctagaagatgcagagagtcacctggactcagaactagagatatccaatgacccagacaaaattaaacttcagctttctaagcataaggagtttcagaagactcttggtggcaagcagcctgtgtatgataccacaattagaactggcagagcactgaaagaaaagactttgcttcccgaagatagtcagaaacttgacaatttcctaggagaagtcagagacaaatgggatactgtttgtggcaagtctgtggagcggcagcacaagttggaggaagccctgctcttttcgggtcagttcatggatgctttgcaggcattggttgactggttatacaaggtggagccacagctggctgaggaccagcccgtgcacggggaccttgacctcgtcatgaacctcatggatgcacacaaggttttccagaaggaactgggaaagcgaacaggaaccgttcaggtcctgaagcggtcaggccgagagctgattgagaatagtcgagatgacaccacttgggtaaaaggacagctccaggaactgagcactcgctgggacactgtctgtaaactctctgtttccaaacaaagccggcttgagcaggccttaaaacaagcggaagtgtttcgagacacagtccacatgctgttggagtggctttctgaagcagagcaaacgcttcgctttcggggagcacttcctgatgacacagaggccctgcagtctctcattgacacccataaggaattcatgaagaaagtagaagaaaagcgagtggacgttaactcagcagtagccatgggagaagtcatcctggctgtctgccaccccgattgcatcacaaccatcaaacactggatcaccatcatccgagctcgcttcgaggaggtcctgacatgggctaagcagcaccagcagcgtcttgaaacggccttgtcagaactggtggctaatgctgagctcctggaagaacttctggcatggatccagtgggctgagaccaccctcattcagcgggatcaggagccaatcccgcagaacattgaccgagttaaagcccttatcgctgagcatcagacatttatggaggagatgactcgcaaacagcctgacgtggaccgggtcaccaagacatacaaaaggaaaaacatagagcctactcacgcgcctttcatagagaaatcccgcagcggaggcaggaaatccctaagtcagccaacccctcctcccatgccaatcctttcacagtctgaagcaaaaaacccacggatcaaccagctttctgcccgctggcagcaggtgtggctgttagcactggagcggcaaaggaaactgaatgatgccttggatcggctggaggagttgaaagaatttgccaactttgactttgatgtctggaggaaaaagtatatgcgttggatgaatcacaaaaagtctcgagtgatggatttcttccggcgcattgataaggaccaggatgggaagataacacgtcaggagtttatcgatggcattttagcatccaagttccccaccaccaagttagagatgactgctgtggctgacattttcgaccgagatggggatggttacattgattattatgaatttgtggctgctcttcatcccaacaaggatgcgtatcgaccaacaaccgatgcagataaaatcgaagatgaggttacaagacaagtggctcagtgcaaatgtgcaaaaaggtttcaggtggagcagatcggagagaataaataccggtttggggattctcagcagttgcggctggtccgtattctgcgcagcaccgtgatggttcgcgttggtggaggatggatggccttggatgaatttttagtgaaaaatgatccctgccgagcacgaggtagaactaacattgaacttagagagaaattcatcctaccagagggagcatcccagggaatgacccccttccgctcacggggtcgaaggtccaaaccatcttcccgggcagcttcccctactcgttccagctccagtgctagtcagagtaaccacagctgtacatccatgccatcttctccagccaccccagccagtggaaccaaggttatcccatcatcaggtagcaagttgaaacgaccaacaccaacttttcattctagtcggacatcccttgctggtgataccagcaatagttcttccccggcctccacaggtgccaaaactaatcgggcagaccctaaaaagtctgccagtcgccctgggagtcgggctgggagtcgagccgggagtcgagccagcagccggcgaggaagtgacgcttctgactttgacctcttagagacgcagtctgcttgttccgacacttcagaaagcagcgctgcagggggccaaggcaactccaggagagggctaaacaaaccttccaaaatcccaaccatgtctaagaagaccaccactgcctcccccaggactccaggtcccaagcgataacactgtctaagcacccccaagccactatccactttgaatcctgctccatacattgggtgtatatttattctgaacgggagaagttatattgttaaaagtgtaaaagaataattgtgttatgaagctgccttattttttttctttttgtaagttactattttcatgtgaatatttatgtagataaaatttgcctcctggtaaccctgtaatggatggggcccagaaatgaaatatttgagaaaaacaagtgaaaaggtcaagatacaaatgtgtattaaaaaaaaaaaagcctattaatagggtttctgcgcggtgcagggttgtaaacctgctttatcttttaggattattcctaaatgcatcttctttataaacttgacttgctatctcagcaagataaattatattaaaaaaataagaatcctgcagtgtttaaggaactctttttttgtaaatcacggacacctcaattagcaagaactgaggggagggctttttccattgtttaatgttttgtgatttttagctaaagagagggaacctcatctaagtaacatttgcacatgatacagcaaaaggagttcattgcaatactgtctttggatattgtttcagtactgggtgtttaaaggacaaatagctgctagaattcaggggtaaatgtaagtgttcagaaaacgtcagaacatttggggttttaaactgatttgttgctccctatccagcctagacaccagtaactcttgtgttcaccaggacccagacccttggcaagggataggctcgttggtgacattgtgaatttcagatttgttttatccactttttttgctatttatttaaatggtcgatcaacttcccacaaactgaggaatgaattccacgagcctgttctgaaaatgtggacgtaagacaaacacgtgctcgtcctttaatggagttcaccagcacacttgttaaccagtcctgtttgctttcgtctttttttgtgcgtaataaagtcaactgaccaagtgaccatgaaaaggggctgtctggggctcctgttttttagctgctgttcttcagctccgaccatgttgctgtgtgattatctcaattggttttaattgaggcagaaactgaagctctaccaatgaactgtttagaaacaagacacacttttgtattaaaattgcttgcagtaacaaatattttgtatttcctgattttcttttcaactattaccttatctataaatgttaccctggggtataatcatgttgtaggtacttaaatgcattccgcaaatcaaaatatcttgatggataaattatagagctt

SEQ ID NO: 18099 - DNA, 17538 bp, Homo sapiens
  source 1..17538: mol_type = unassigned DNA
atcacttctccctgggctcccaggccctcctgcagcagcccccgcctgggccatgtcttcctcagatgaagagacgctcagtgagcggtcatgtcggagtgagcggtcttgtcggagtgagcgatcttacaggagcgagcggtcggggagcctgtctccctgtcccccaggggacaccttgccctggaacctgccactgcatgagcagaaaaagcggaaaagccaggattcggtgctggaccctgcagagcgtgctgtggtcagagtcgctgatgaacgggaccgggttcagaagaaaacgttcaccaagtgggtcaacaagcacttaatgaaggtccgcaagcacatcaatgatctttatgaagatctgcgggatggccataacctgatctctctgttggaggtcctctcaggcatcaaactgccccgggagaagggcaggatgcgttttcataggctgcagaatgtgcagattgccctggacttcctaaagcagcgacaggtgaaactagtgaatattcgcaatgatgacatcacagatggcaaccccaagttgaccctgggtctgatctggaccattattttgcatttccagatctctgacatctacattagtggagaatcaggggatatgtcagccaaggagaaactactcctgtggacccagaaggtgacagctggttacacaggaatcaaatgcaccaacttttcctcctgctggagtgatgggaagatgttcaatgcactcattcaccgataccgacccgatctagtagacatggagagggtgcaaatccaaagtaaccgagagaatctggaacaggcttttgaagtggcagaaagactgggggtcactcgcctgctggatgcagaagatgtggatgtgccatctccagatgaaaagtctgtaatcacttatgtgtcttcgatttatgatgccttccctaaagttcctgagggtggagaagggatcagtgctacggaagtggactccaggtggcaagaataccaaagccgagtggactccctcattccctggatcaaacagcatacaatactgatgtcagataaaacttttccccaaaaccctgttgaactaaaggcactttataaccaatatatacacttcaaagaaacagaaattctggccaaggagagagaaaaaggaagaattgaggaattatataaattactagaggtgtggattgaatttggccgaattaaactgcctcaaggttatcaccctaatgatgtggaagaagagtggggaaagctcatcatagagatgctggaacgagagaaatcacttcggccggctgtggagaggctggaattgctgctacagattgcaaacaaaatccagaatggtgctttgaactgtgaagaaaaactgacactagctaagaatacactgcaggctgatgctgctcacctggaatcaggacaaccggtacaatgtgagtcagatgtcattatgtacattcaggagtgtgaaggtctcatcaggcagctgcaggtggatctccagatcctgcgggatgagaattactaccagctagaagagctggcttttagggtcatgcgtcttcaggatgagctggtcaccttgcgtctagagtgtacaaacctgtaccggaagggtcatttcacttcacttgaattggttccaccctctactttaaccaccactcatctgaaagcagaacccttaaccaaggcaacccattcttcttctacctcctggttccgaaagcctatgactcgggctgaacttgtggccatcagctcctctgaagatgaaggcaatctccgatttgtgtatgaactactgtcttgggtagaagagatgcagatgaaactggagcgagcagagtggggcaatgacctgcctagtgtggagttgcagctagaaacacagcagcacatccatacgagtgtagaagagctgggctcaagtgtcaaggaggccaggttgtatgagggaaagatgtcccagaatttccataccagctatgctgaaactcttggaaagctggagacacagtattgtaaattgaaggaaacttctagcttccggatgaggcaccttcagagcctgcataaatttgtttccagagctacagctgagttgatctggttgaatgagaaggaggaggaggaactagcatatgactggagtgacaacaattccaatatctcagccaagagaaattacttctctgagttgacaatggaactggaggagaaacaggatgtgtttcgttctctacaagatacagcagaactactttcacttgagaaccacccagccaagcagacagtggaggcttacagtgctgctgtccagtcccagttgcagtggatgaagcagctgtgcctgtgtgttgagcagcatgtgaaagagaatactgcttattttcagttcttcagtgatgcacgagagctggagtcattcttgaggaacctccaagattccattaaacgaaaatattcctgtgaccacaacaccagcttatcccgccttgaagacctgctccaggactccatggatgaaaaggagcagcttatacagtccaagagttccgttgccagtctcgttgggagatcaaaaaccatcgttcagctaaaaccacgcagtccagaccatgtgttaaagaacaccatttctgtcaaggctgtctgtgactacaggcagatcgagattactatttgcaaaaatgatgaatgtgtgctagaagataattctcagcggaccaaatggaaagtgatcagccccacagggaacgaggcaatggtgccgtcagtctgcttcctcatccccccacccaataaggatgccattgagatggccagcagggtcgaacaatcttatcagaaggttatggccctttggcatcagctgcatgttaacaccaaaagccttatctcttggaactatctgcgtaaagaccttgaccttgtacagacctggaacctagaaaagcttcgatcctcagcaccaggggagtgccatcagattatgaagaaccttcaggcccactatgaagactttctgcaggatagtcgtgactctgtgctgttctcagtggctgatcgcttgcgcttggaagaggaggtggaagcttgtaaagcccgcttccagcacctgatgaagtccatggagaatgaggacaaagaggagactgtggccaagatgtacatttcagagttgaagaacatccggctacgcctggaggagtatgaacagagggtggtcaaacgaattcagtctctagccagctctaggactgacagagatgcctggcaggacaatgcattaaggattgcagagcaagagcacacccaggaggatttacagcaattgaggtcagacttggatgcagtttctatgaaatgtgacagctttctccatcagtctccatctagttcaagtgtcccaactctgcgctcagaactgaatctgctggtggagaagatggaccatgtctatggtctctctactgtatatctgaataagttaaagacagttgatgttatagtacgtagcatacaggatgctgaactcttggtcaaaggttatgagattaagctgagtcaagaagaagtagtactggcagatctctcagctctggaggcccattggtcgacattacggcactggcttagtgatgtgaaggacaagaattcagtgttttcagtcctggatgaggaaattgccaaggccaaggtagtggcagagcagatgagtcgtctgacaccagagcgaaatctggatttggagcgctatcaggaaaaaggctcccagctgcaggagcgttggcaccgagtcattgcccagctcgagattcgccaatctgagctagaaagtatccaggaagttctgggagattaccgagcctgccatggaactctcatcaagtggattgaggaaaccactgcccagcaggaaatgatgaagccaggccaggcagaggatagcagagtgctttcggagcagctcagccagcagacggccctatttgcagaaattgagagaaatcagacaaaactggatcaatgtcaaaaattttcccagcagtactctactattgtaaaggactatgaattgcaactgatgacatacaaggcctttgtggaatcgcagcagaaatcccctggcaagcgccgtcgcatgctttcctcttcagatgccatcactcaagagttcatggacttaaggactcgctacacggcattggtgactttaacaactcagcacgtgaaatacatcagtgatgcactccggcgtctggaggaggaggagaaagtggtagaagaggagaaacaagaacatgtggagaaggttaaagaacttttgggctgggtgtctaccctagcgaggaatacacaaggaaaagctacctcatccgagaccaaagaatcaacagacattgaaaaagctattttggaacagcaggttctgtcagaagagctgacaacaaagaaagaacaagtctctgaagctattaaaacatcacagatcttcttggccaagcatggtcataagctctcagaaaaagagaagaaacaaatatctgagcaattgaatgccctaaacaaggcttaccatgacctttgtgatggttctgcaaatcagcttcagcagcttcagagccagttggctcaccagacagaacaaaagaccctgcagaaacaacaaaatacctgtcaccagcaactggaggatctttgcagttgggtaggacaggcagaaagagcactggcaggccaccaaggcagaaccacccagcaggatctctctgctttgcagaagaaccaaagtgacttgaaggatttacaggatgacattcagaatcgtgccacctcatttgccactgttgtcaaggacattgaggggttcatggaagagaatcagaccaagctgagcccacgtgagttgacagctcttcgggaaaagcttcatcaggctaaggagcaatatgaggcgctccaggaagagacacgtgtggcccagaaggaactggaggaagcagtgacctccgccttacagcaggagactgaaaagagtaaagcagcaaaggaactggcagagaacaagaagaagatcgatgctctcctggattgggtaacttcagtaggatcatctggtggacagctgctgaccaaccttccaggaatggagcagctctcgggagctagcttggagaaaggagccttggacaccactgatggttacatgggggtgaatcaagccccagagaaactggacaagcaatgtgagatgatgaaggcccgtcaccaagaattgctgtcccagcagcaaaatttcattctggccacccagtcagctcaggccttcttggatcagcatggccacaatctcacacctgaggagcaacagatgctgcaacagaagctgggagagctaaaggaacaatactctacttccctggcccaatcagaggcagaactgaagcaggtgcagacacttcaggatgagttgcagaaatttctgcaggatcataaagagtttgaaagctggttggaacgatccgagaaagagctggagaacatgcataagggaggcagcagccccgagacccttccctccctgctaaagcggcaaggaagcttctcagaggatgtcatttcccacaaaggagacttgagatttgtgactatctcaggacagaaagtcttggacatggaaaacagttttaaggaaggcaaagaaccatcagaaattggaaacttagtaaaggacaagttgaaggatgcaacagaaagatacactgctctccactcaaagtgtacacgattaggatctcacctgaatatgctgttaggccagtatcatcaattccaaaacagtgctgacagcctgcaggcctggatgcaggcttgtgaggccaacgtggagaagctcctctcagatactgttgcctctgaccctggagttctccaggagcagcttgcaacaacaaagcagttgcaggaggaattggctgagcaccaagtacctgtggaaaaactccaaaaagtagctcgtgacataatggaaattgaaggggagccagccccagaccacaggcatgttcaagaaactacagattccatactcagccacttccaaagcctctcctatagcctggctgagcgatcttctctgctgcagaaagcaattgcccaatctcagagtgtccaggaaagcctggagagcctgttgcagtctattggggaagttgaacaaaacctggaagggaagcaggtgtcatcactctcatcaggagtcatccaggaagccttagccacaaatatgaaattgaagcaggacattgctcggcaaaagagcagcttggaggccacccgtgagatggtgacccgattcatggagacagcagacagtactacagcagcagtgctgcagggcaaactggcagaggtgagccagcggttcgaacagctctgtctacagcagcaagaaaaggagagctccctaaagaagcttctaccccaggcagagatgtttgaacacctctctggtaagctgcagcagttcatggaaaacaaaagtcggatgctggcctctggaaatcagccagatcaagatattacacatttcttccaacagatccaggagctcaatttggaaatggaagaccaacaggagaacctagatactcttgagcacctggtcactgaactgagctcttgtggctttgcgctggacttgtgccagcatcaggacagggtacagaatctaagaaaagacttcacagagctacagaagacagttaaagagagagagaaagatgcatcatcttgccaggaacagttggatgaattccggaagctggtcaggaccttccagaaatggttgaaagaaactgaagggagtattccacctacggaaacttctatgagtgctaaagagttagaaaagcagattgaacacctgaagagtctactagatgactgggcaagtaagggaactctggtggaagaaatcaattgcaaaggtacttctttagaaaatctcatcatggaaatcacagcacctgattcccaaggcaagacaggttccatactgccctctgtaggaagctctgtaggcagtgtaaacggataccacacctgcaaagatctgacggagatccagtgtgacatgtcagatgtaaacttgaagtatgagaaactagggggagtacttcatgaacgccaggaaagccttcaggctatcctcaacagaatggaggaggttcacaaggaggcaaactctgtgctgcagtggctggaatcaaaagaggaagtcctgaaatccatggatgccatgtcatctccaaccaagacagaaacagtgaaagcccaagctgaatctaacaaggccttcctggctgagttggaacagaattctccaaaaattcaaaaagtaaaggaagccctggctggattactggtgacatatcccaactcacaggaagcagaaaattggaagaaaattcaggaagaactcaattcccgatgggaaagggccactgaggttactgtggctcggcaaaggcagctagaggaatctgcaagtcatctggcctgcttccaggctgcagaatcccagctccggccgtggctgatggagaaagaactgatgatgggagtgctggggcccctgtctattgaccccaacatgttgaatgcacaaaagcaacaggtccagtttatgctaaaggaatttgaagcacgcaggcaacagcatgagcaactgaatgaggcagctcagggcatcctaacaggccctggagatgtctctctgtccaccagccaagtacagaaagaactccagagcatcaatcagaaatgggttgagctgactgacaaactcaactcccgttccagccaaattgaccaagctattgttaagagcacccagtaccaggaactgctccaggacttatcagagaaggtgagggcagttggacaacggctgagtgtccagtcagctatcagcacccaaccagaggctgtaaagcagcaattggaagagaccagtgaaattcgatctgacttggagcagttagaccacgaggttaaggaggctcagacactgtgcgatgaactctcagtgctcattggtgagcagtacctcaaggatgaactgaagaagcgtttggagacagttgccctgcctctccaaggtttagaagaccttgcagccgatcgcattaacagactccaggcagctcttgccagcacccagcagttccagcaaatgtttgatgagttgaggacctggttggatgataaacaaagccagcaagcaaaaaactgcccaatttctgcaaaattggagcggctacagtctcagctacaggagaatgaagagtttcagaaaagtcttaatcaacacagtggctcctatgaggtgattgtggctgaaggggaatctctacttctttctgtacctcctggagaagagaaaaggactctacaaaaccagttggttgagctcaaaaaccattgggaagagcttagtaaaaaaactgcagacagacaatccaggctcaaggattgtatgcagaaagctcagaaatatcagtggcatgtggaagaccttgtgccatggatagaagattgtaaagctaagatgtctgagttgcgagtcactctggatccagtgcagctagagtccagtctcctaagatcaaaggctatgctgaatgaggtggagaagcgccgctccctgctggaaatattgaatagtgctgctgacattctgatcaattcttcagaagcagatgaggatggaatccgggatgagaaggctgggatcaaccagaacatggatgctgttacagaagagctgcaggccaaaacagggtcactcgaagaaatgactcagaggctcagggagttccaggaaagctttaagaatattgaaaagaaggttgaaggagccaaacaccaacttgagatctttgatgctctgggttctcaagcctgtagcaacaagaacctggagaagctaagagctcaacaggaagtgctgcaggccctagagcctcaggtagactatctgaggaactttactcagggtctggtagaagatgccccagatggatctgatgcttctcaacttctccaccaagctgaggtcgcccagcaagagttcctcgaagttaagcaaagagtgaacagtggttgtgtgatgatggaaaacaagctggaggggattggccagtttcactgccgggtccgagagatgttctctcaattggcagacctggatgatgagctagatggcatgggtgctattggcagagacactgatagcctccagtcccaaatcgaggatgtccggctattccttaacaaaattcacgtcctcaaattagacatagaggcctctgaagcagagtgtcgacatatgctagaagaagaggggactctggatttgttaggtctcaaaagggagctagaagccctgaacaaacagtgtggcaaactgacagagagggggaaagctcgtcaggaacagctggaactgacactaggccgtgtagaggacttctacaggaaattgaaaggactcaatgacgcgaccacagcagcagaggaggcagaggccctccagtgggtagtggggaccgaagtggaaatcatcaaccaacaattagcagattttaaaatgtttcagaaagaacaagtggatcctcttcagatgaaattgcagcaggtgaatggacttggccagggattaattcagagtgcaggaaaagactgtgatgtacagggtttagaacatgacatggaagagatcaatgctcgatggaatacattgaataaaaaggtcgcacaaagaattgcacagctacaggaagctttgttgcattgtgggaagtttcaagatgccttggagccattgctcagctggttggcagataccgaggagctcatagccaatcagaaacctccatctgctgagtataaagtggtgaaagcacagatccaagaacagaagttgctccagcggctcctagatgatcgaaaggccacagtagacatgcttcaagcagaaggaggcagaatagcccagtcagcagagctggctgatagagagaaaatcactggacagctggagagtcttgaaagtagatggactgaactactcagtaaggcagcagccaggcaaaaacagctggaagacatcctggttctggccaaacagttccatgagacagctgagcctatttctgacttcttatctgtcacagagaaaaagcttgctaactcagaacctgttggcactcagactgccaaaatacagcagcagatcattcggcacaaggctctggaagaagacatagaaaaccatgcaacagatgtgcaccaggcagtcaaaattgggcagtccctctcctccctgacatctcctgcagaacagggtgtgctgtcagaaaagatagactcattgcaggcccgatacagtgaaattcaagaccgctgttgtcggaaggcagccctacttgaccaagctctgtctaatgctaggctgtttggggaggatgaggtggaggtgctcaactggctggctgaggttgaggacaagctcagttcagtgttcgtaaaggatttcaaacaggatgtcctgcacaggcagcatgctgaccacctggctttaaatgaagaaattgttaatagaaagaagaatgtagatcaagctattaaaaatggtcaggctcttctaaaacaaaccacaggtgaggaggtgttacttatccaggaaaaactagatggtataaagactcgttacgcagacatcacagttactagctccaaggccctcagaactttagagcaagcccggcagctggccaccaagttccagtctacttatgaggaactgaccgggtggctgagggaggtggaggaggagctggcaaccagtggaggacagtctcccacaggggaacagataccccagtttcagcagagacagaaggaattaaagaaggaggtcatggagcacaggctggtgttggacacagtgaatgaggtgagccgtgctctcttagagctggtgccctggagagccagagaagggctggataaacttgtgtccgatgctaacgagcagtacaaactagtcagtgacactattggacaaagggtggatgaaattgatgctgctattcagagatcacaacagtatgagcaagctgccgatgcagaactagcttgggttgctgaaacaaaacggaaactgatggctctgggtccaattcgcctggaacaggaccagaccacagctcagcttcaggtacagaaggctttctccattgacattattcgacacaaagattcaatggatgaactcttcagtcaccgtagtgaaatctttggcacatgtggggaggagcaaaaaactgtattacaggaaaagacagagtctctaatacagcaatatgaagccattagcctactcaattcagagcgttatgcccgcctagagcgggcccaggtcttagtaaaccagttttgggaaacttatgaagagctcagcccctggattgaggaaactcgggcactaatagcacagttaccctctccagccattgatcatgagcagctcaggcagcaacaagaggaaatgaggcaattaagggaatctattgctgaacacaaacctcatattgacaaactactaaagataggcccacaactaaaggaattaaaccctgaggaaggggaaatggtggaagaaaaataccagaaagcagaaaacatgtatgcccaaataaaggaggaggtgcgccagcgagccctggctctggatgaagccgtgtcccagtccacacagattacagagtttcatgataaaattgagcctatgttggagacactggagaatctttcctctcgcctgcgtatgccaccactgatccctgctgaagtagacaagatcagagagtgcatcagtgacaataagagtgccaccgtggagctagaaaaactgcagccatcctttgaggccttgaagcgccgtggagaggagcttattggacgatctcagggagcagacaaggatctggctgcaaaagaaatccaggataaattggatcaaatggtattcttctgggaggacatcaaagctcgggctgaagaacgagaaatcaaatttcttgatgtccttgaattagcagagaagttctggtatgacatggcagctctcctgaccaccatcaaagacacccaggatattgtccatgacttggaaagcccaggcattgatccttccatcatcaaacaacaggttgaagctgctgagactattaaggaagagacagatggtctgcatgaagagctggagtttattcggatccttggagcagatttgatttttgcctgtggagaaactgagaagcctgaagtgaggaagagcattgatgagatgaataatgcttgggagaacttaaacaaaacatggaaagagaggctagaaaaacttgaggatgctatgcaagctgctgtgcagtatcaggacactcttcaggctatgtttgactggctagataacactgtgattaaactctgcaccatgccccctgttggcactgacctcaatactgttaaagatcagttaaatgaaatgaaggagttcaaagtagaagtttaccaacagcaaattgagatggagaagcttaatcaccagggtgaactgatgttaaagaaagctactgatgagacggacagagacattatacgagaaccactgacagaactcaaacacctctgggagaacctgggtgagaaaattgcccaccgacagcacaaactagaaggggctctgttggcccttggtcagttccagcatgccttagaggaactaatgagttggctgactcataccgaagagttgttagatgctcagagaccaataagtggagacccaaaagtcattgaagttgagctcgcaaagcaccatgtcctaaaaaatgatgttttggctcatcaagccacagtggaaacagtcaacaaagctggcaatgagcttcttgaatccagtgctggagatgatgccagcagcttaaggagccgtttggaagccatgaaccaatgctgggagtcagtgttacagaaaacagaggagagggagcagcagcttcagtcaactctgcagcaggcccagggcttccacagtgaaattgaagatttcctcttggaacttactagaatggagagccagctttctgcatctaagcccacaggaggacttcctgaaactgctagggaacagcttgatacacatatggaactctattcccagctgaaagccaaggaagagacttataatcaactacttgacaagggcagactcatgcttctaagccgtgacgactctgggtctggctccaagacagaacagagtgtagcacttttggagcagaagtggcatgtggtcagcagtaagatggaagaaagaaagtcaaagctggaagaggccctcaacttggcaacagaattccagaattccctacaagaatttatcaactggctcactctagcagagcagagtttaaacatcgcttctccaccaagcctgattctaaatactgtcctttcccagatagaagagcacaaggtttttgctaatgaagtaaatgctcatcgagaccagatcattgagctggatcaaactgggaatcaattaaagttccttagccaaaagcaggatgttgttctgatcaagaatttgttggtgagcgtgcagtctcgatgggagaaggttgtccagcgatctattgaaagagggcgatcactagatgatgccaggaagcgggcaaaacaattccatgaagcttggaaaaaactgattgactggctagaagatgcagagagtcacctggactcagaactagagatatccaatgacccagacaaaattaaacttcagctttctaagcataaggagtttcagaagactcttggtggcaagcagcctgtgtatgataccacaattagaactggcagagcactgaaagaaaagactttgcttcccgaagatagtcagaaacttgacaatttcctaggagaagtcagagacaaatgggatactgtttgtggcaagtctgtggagcggcagcacaagttggaggaagccctgctcttttcgggtcagttcatggatgctttgcaggcattggttgactggttatacaaggtggagccacagctggctgaggaccagcccgtgcacggggaccttgacctcgtcatgaacctcatggatgcacacaaggttttccagaaggaactgggaaagcgaacaggaaccgttcaggtcctgaagcggtcaggccgagagctgattgagaatagtcgagatgacaccacttgggtaaaaggacagctccaggaactgagcactcgctgggacactgtctgtaaactctctgtttccaaacaaagccggcttgagcaggccttaaaacaagcggaagtgtttcgagacacagtccacatgctgttggagtggctttctgaagcagagcaaacgcttcgctttcggggagcacttcctgatgacacagaggccctgcagtctctcattgacacccataaggaattcatgaagaaagtagaagaaaagcgagtggacgttaactcagcagtagccatgggagaagtcatcctggctgtctgccaccccgattgcatcacaaccatcaaacactggatcaccatcatccgagctcgcttcgaggaggtcctgacatgggctaagcagcaccagcagcgtcttgaaacggccttgtcagaactggtggctaatgctgagctcctggaagaacttctggcatggatccagtgggctgagaccaccctcattcagcgggatcaggagccaatcccgcagaacattgaccgagttaaagcccttatcgctgagcatcagacatttatggaggagatgactcgcaaacagcctgacgtggaccgggtcaccaagacatacaaaaggaaaaacatagagcctactcacgcgcctttcatagagaaatcccgcagcggaggcaggaaatccctaagtcagccaacccctcctcccatgccaatcctttcacagtctgaagcaaaaaacccacggatcaaccagctttctgcccgctggcagcaggtgtggctgttagcactggagcggcaaaggaaactgaatgatgccttggatcggctggaggagttgaaagaatttgccaactttgactttgatgtctggaggaaaaagtatatgcgttggatgaatcacaaaaagtctcgagtgatggatttcttccggcgcattgataaggaccaggatgggaagataacacgtcaggagtttatcgatggcattttagcatccaagttccccaccaccaagttagagatgactgctgtggctgacattttcgaccgagatggggatggttacattgattattatgaatttgtggctgctcttcatcccaacaaggatgcgtatcgaccaacaaccgatgcagataaaatcgaagatgaggttacaagacaagtggctcagtgcaaatgtgcaaaaaggtttcaggtggagcagatcggagagaataaataccggtttggggattctcagcagttgcggctggtccgtattctgcgcagcaccgtgatggttcgcgttggtggaggatggatggccttggatgaatttttagtgaaaaatgatccctgccgagcacgaggtagaactaacattgaacttagagagaaattcatcctaccagagggagcatcccagggaatgacccccttccgctcacggggtcgaaggtccaaaccatcttcccgggcagcttcccctactcgttccagctccagtgctagtcagagtaaccacagctgtacatccatgccatcttctccagccaccccagccagtggaaccaaggttatcccatcatcaggtagcaagttgaaacgaccaacaccaacttttcattctagtcggacatcccttgctggtgataccagcaatagttcttccccggcctccacaggtgccaaaactaatcgggcagaccctaaaaagtctgccagtcgccctgggagtcgggctgggagtcgagccgggagtcgagccagcagccggcgaggaagtgacgcttctgactttgacctcttagagacgcagtctgcttgttccgacacttcagaaagcagcgctgcagggggccaaggcaactccaggagagggctaaacaaaccttccaaaatcccaaccatgtctaagaagaccaccactgcctcccccaggactccaggtcccaagcgataacactgtctaagcacccccaagccactatccactttgaatcctgctccatacattgggtgtatatttattctgaacgggagaagttatattgttaaaagtgtaaaagaataattgtgttatgaagctgccttattttttttctttttgtaagttactattttcatgtgaatatttatgtagataaaatttgcctcctggtaaccctgtaatggatggggcccagaaatgaaatatttgagaaaaacaagtgaaaaggtcaagatacaaatgtgtattaaaaaaaaaaaagcctattaatagggtttctgcgcggtgcagggttgtaaacctgctttatcttttaggattattcctaaatgcatcttctttataaacttgacttgctatctcagcaagataaattatattaaaaaaataagaatcctgcagtgtttaaggaactctttttttgtaaatcacggacacctcaattagcaagaactgaggggagggctttttccattgtttaatgttttgtgatttttagctaaagagagggaacctcatctaagtaacatttgcacatgatacagcaaaaggagttcattgcaatactgtctttggatattgtttcagtactgggtgtttaaaggacaaatagctgctagaattcaggggtaaatgtaagtgttcagaaaacgtcagaacatttggggttttaaactgatttgttgctccctatccagcctagacaccagtaactcttgtgttcaccaggacccagacccttggcaagggataggctcgttggtgacattgtgaatttcagatttgttttatccactttttttgctatttatttaaatggtcgatcaacttcccacaaactgaggaatgaattccacgagcctgttctgaaaatgtggacgtaagacaaacacgtgctcgtcctttaatggagttcaccagcacacttgttaaccagtcctgtttgctttcgtctttttttgtgcgtaataaagtcaactgaccaagtgaccatgaaaaggggctgtctggggctcctgttttttagctgctgttcttcagctccgaccatgttgctgtgtgattatctcaattggttttaattgaggcagaaactgaagctctaccaatgaactgtttagaaacaagacacacttttgtattaaaattgcttgcagtaacaaata

SEQ ID NO: 18100 - DNA, 17948 bp, Homo sapiens
  source 1..17948: mol_type = unassigned DNA
atgggaaattcactgggctgttttaaggagccgaaagagtcaatagctattcctgagaaggctcccatatctcctaagaaaagggttcggttcaaaaggaggtggagagggaagaaaatccctactccagaggcatctcaccaggaagaaacctcagaaggaactggagtcattgaagagactgaaaccctaacgaagttaacagagagtctccaaaaggaagacggagtgggaggggtagagcatacccccccagatattttgctgcctggggactcagcccccaactcacgggtagtcgatcgggggatgatagtacaggtaaaggagagattccaaggggaggtccagaccgcccaccttttgttagagaatgagtcatcagttgctggaggggtctgggattccctggaagaggggatgactgtcattgctcacctgcttgataacccagcagaaaggaactgcgagaagtcagtgagccaactggtggaatttcctaggacagcatcctgcagcagcagggctgtgttgctgcctttgcaaggagagactgcagtggagaaaggaaatattcagcgtgggtttcggagctgtgctttgcctaggacagactaccccactgataaaggaaatcaagaacaattttcagagggctggagtgtggaggaaggaaccaagagtgtttcaggtgcccctcagacagcttcctggattatagaatgttctgtttcttcattactactggaccagcctggaggccaaagacgcacggagccttcccatgtgggtcaagtgcccccccaggattccagactgcctacttctcagagtgatttgtccatcagtggtgtgactgtgagcattttgccctcctcctctggctatggcagtgatgggccacacatacatgggatccagcctaaagatacagaacctgaaaagagctctacttccttctcagaagaggatggcactctttctctggaggcaagccacaccccatcatggggtctggaagagatctctgacatctacattagtggagaatcaggggatatgtcagccaaggagaaactactcctgtggacccagaaggtgacagctggttacacaggaatcaaatgcaccaacttttcctcctgctggagtgatgggaagatgttcaatgcactcattcaccgataccgacccgatctagtagacatggagagggtgcaaatccaaagtaaccgagagaatctggaacaggcttttgaagtggcagaaagactgggggtcactcgcctgctggatgcagaagatgtggatgtgccatctccagatgaaaagtctgtaatcacttatgtgtcttcgatttatgatgccttccctaaagttcctgagggtggagaagggatcagtgctacggaagtggactccaggtggcaagaataccaaagccgagtggactccctcattccctggatcaaacagcatacaatactgatgtcagataaaacttttccccaaaaccctgttgaactaaaggcactttataaccaatatatacacttcaaagaaacagaaattctggccaaggagagagaaaaaggaagaattgaggaattatataaattactagaggtgtggattgaatttggccgaattaaactgcctcaaggttatcaccctaatgatgtggaagaagagtggggaaagctcatcatagagatgctggaacgagagaaatcacttcggccggctgtggagaggctggaattgctgctacagattgcaaacaaaatccagaatggtgctttgaactgtgaagaaaaactgacactagctaagaatacactgcaggctgatgctgctcacctggaatcaggacaaccggtacaatgtgagtcagatgtcattatgtacattcaggagtgtgaaggtctcatcaggcagctgcaggtggatctccagatcctgcgggatgagaattactaccagctagaagagctggcttttagggtcatgcgtcttcaggatgagctggtcaccttgcgtctagagtgtacaaacctgtaccggaagggtcatttcacttcacttgaattggttccaccctctactttaaccaccactcatctgaaagcagaacccttaaccaaggcaacccattcttcttctacctcctggttccgaaagcctatgactcgggctgaacttgtggccatcagctcctctgaagatgaaggcaatctccgatttgtgtatgaactactgtcttgggtagaagagatgcagatgaaactggagcgagcagagtggggcaatgacctgcctagtgtggagttgcagctagaaacacagcagcacatccatacgagtgtagaagagctgggctcaagtgtcaaggaggccaggttgtatgagggaaagatgtcccagaatttccataccagctatgctgaaactcttggaaagctggagacacagtattgtaaattgaaggaaacttctagcttccggatgaggcaccttcagagcctgcataaatttgtttccagagctacagctgagttgatctggttgaatgagaaggaggaggaggaactagcatatgactggagtgacaacaattccaatatctcagccaagagaaattacttctctgagttgacaatggaactggaggagaaacaggatgtgtttcgttctctacaagatacagcagaactactttcacttgagaaccacccagccaagcagacagtggaggcttacagtgctgctgtccagtcccagttgcagtggatgaagcagctgtgcctgtgtgttgagcagcatgtgaaagagaatactgcttattttcagttcttcagtgatgcacgagagctggagtcattcttgaggaacctccaagattccattaaacgaaaatattcctgtgaccacaacaccagcttatcccgccttgaagacctgctccaggactccatgtttcaggatgaaaaggagcagcttatacagtccaagagttccgttgccagtctcgttgggagatcaaaaaccatcgttcagctaaaaccacgcagtccagaccatgtgttaaagaacaccatttctgtcaaggctgtctgtgactacaggcagatcgagggtcgaacaatcttatcagaaggttatggccctttggcatcagctgcatgttaacaccaaaagccttatctcttggaactatctgcgtaaagaccttgaccttgtacagacctggaacctagaaaagcttcgatcctcagcaccaggggagtgccatcagattatgaagaaccttcaggcccactatgaagactttctgcaggatagtcgtgactctgtgctgttctcagtggctgatcgcttgcgcttggaagaggaggtggaagcttgtaaagcccgcttccagcacctgatgaagtccatggagaatgaggacaaagaggagactgtggccaagatgtacatttcagagttgaagaacatccggctacgcctggaggagtatgaacagagggtggtcaaacgaattcagtctctagccagctctaggactgacagagatgcctggcaggacaatgcattaaggattgcagagcaagagcacacccaggaggatttacagcaattgaggtcagacttggatgcagtttctatgaaatgtgacagctttctccatcagtctccatctagttcaagtgtcccaactctgcgctcagaactgaatctgctggtggagaagatggaccatgtctatggtctctctactgtatatctgaataagttaaagacagttgatgttatagtacgtagcatacaggatgctgaactcttggtcaaaggttatgagattaagctgagtcaagaagaagtagtactggcagatctctcagctctggaggcccattggtcgacattacggcactggcttagtgatgtgaaggacaagaattcagtgttttcagtcctggatgaggaaattgccaaggccaaggtagtggcagagcagatgagtcgtctgacaccagagcgaaatctggatttggagcgctatcaggaaaaaggctcccagctgcaggagcgttggcaccgagtcattgcccagctcgagattcgccaatctgagctagaaagtatccaggaagttctgggagattaccgagcctgccatggaactctcatcaagtggattgaggaaaccactgcccagcaggaaatgatgaagccaggccaggcagaggatagcagagtgctttcggagcagctcagccagcagacggccctatttgcagaaattgagagaaatcagacaaaactggatcaatgtcaaaaattttcccagcagtactctactattgtaaaggactatgaattgcaactgatgacatacaaggcctttgtggaatcgcagcagaaatcccctggcaagcgccgtcgcatgctttcctcttcagatgccatcactcaagagttcatggacttaaggactcgctacacggcattggtgactttaacaactcagcacgtgaaatacatcagtgatgcactccggcgtctggaggaggaggagaaagtggtagaagaggagaaacaagaacatgtggagaaggttaaagaacttttgggctgggtgtctaccctagcgaggaatacacaaggaaaagctacctcatccgagaccaaagaatcaacagacattgaaaaagctattttggaacagcaggttctgtcagaagagctgacaacaaagaaagaacaagtctctgaagctattaaaacatcacagatcttcttggccaagcatggtcataagctctcagaaaaagagaagaaacaaatatctgagcaattgaatgccctaaacaaggcttaccatgacctttgtgatggttctgcaaatcagcttcagcagcttcagagccagttggctcaccagacagaacaaaagaccctgcagaaacaacaaaatacctgtcaccagcaactggaggatctttgcagttgggtaggacaggcagaaagagcactggcaggccaccaaggcagaaccacccagcaggatctctctgctttgcagaagaaccaaagtgacttgaaggatttacaggatgacattcagaatcgtgccacctcatttgccactgttgtcaaggacattgaggggttcatggaagagaatcagaccaagctgagcccacgtgagttgacagctcttcgggaaaagcttcatcaggctaaggagcaatatgaggcgctccaggaagagacacgtgtggcccagaaggaactggaggaagcagtgacctccgccttacagcaggagactgaaaagagtaaagcagcaaaggaactggcagagaacaagaagaagatcgatgctctcctggattgggtaacttcagtaggatcatctggtggacagctgctgaccaaccttccaggaatggagcagctctcgggagctagcttggagaaaggagccttggacaccactgatggttacatgggggtgaatcaagccccagagaaactggacaagcaatgtgagatgatgaaggcccgtcaccaagaattgctgtcccagcagcaaaatttcattctggccacccagtcagctcaggccttcttggatcagcatggccacaatctcacacctgaggagcaacagatgctgcaacagaagctgggagagctaaaggaacaatactctacttccctggcccaatcagaggcagaactgaagcaggtgcagacacttcaggatgagttgcagaaatttctgcaggatcataaagagtttgaaagctggttggaacgatccgagaaagagctggagaacatgcataagggaggcagcagccccgagacccttccctccctgctaaagcggcaaggaagcttctcagaggatgtcatttcccacaaaggagacttgagatttgtgactatctcaggacagaaagtcttggacatggaaaacagttttaaggaaggcaaagaaccatcagaaattggaaacttagtaaaggacaagttgaaggatgcaacagaaagatacactgctctccactcaaagtgtacacgattaggatctcacctgaatatgctgttaggccagtatcatcaattccaaaacagtgctgacagcctgcaggcctggatgcaggcttgtgaggccaacgtggagaagctcctctcagatactgttgcctctgaccctggagttctccaggagcagcttgcaacaacaaagcagttgcaggaggaattggctgagcaccaagtacctgtggaaaaactccaaaaagtagctcgtgacataatggaaattgaaggggagccagccccagaccacaggcatgttcaagaaactacagattccatactcagccacttccaaagcctctcctatagcctggctgagcgatcttctctgctgcagaaagcaattgcccaatctcagagtgtccaggaaagcctggagagcctgttgcagtctattggggaagttgaacaaaacctggaagggaagcaggtgtcatcactctcatcaggagtcatccaggaagccttagccacaaatatgaaattgaagcaggacattgctcggcaaaagagcagcttggaggccacccgtgagatggtgacccgattcatggagacagcagacagtactacagcagcagtgctgcagggcaaactggcagaggtgagccagcggttcgaacagctctgtctacagcagcaagaaaaggagagctccctaaagaagcttctaccccaggcagagatgtttgaacacctctctggtaagctgcagcagttcatggaaaacaaaagtcggatgctggcctctggaaatcagccagatcaagatattacacatttcttccaacagatccaggagctcaatttggaaatggaagaccaacaggagaacctagatactcttgagcacctggtcactgaactgagctcttgtggctttgcgctggacttgtgccagcatcaggacagggtacagaatctaagaaaagacttcacagagctacagaagacagttaaagagagagagaaagatgcatcatcttgccaggaacagttggatgaattccggaagctggtcaggaccttccagaaatggttgaaagaaactgaagggagtattccacctacggaaacttctatgagtgctaaagagttagaaaagcagattgaacacctgaagagtctactagatgactgggcaagtaagggaactctggtggaagaaatcaattgcaaaggtacttctttagaaaatctcatcatggaaatcacagcacctgattcccaaggcaagacaggttccatactgccctctgtaggaagctctgtaggcagtgtaaacggataccacacctgcaaagatctgacggagatccagtgtgacatgtcagatgtaaacttgaagtatgagaaactagggggagtacttcatgaacgccaggaaagccttcaggctatcctcaacagaatggaggaggttcacaaggaggcaaactctgtgctgcagtggctggaatcaaaagaggaagtcctgaaatccatggatgccatgtcatctccaaccaagacagaaacagtgaaagcccaagctgaatctaacaaggccttcctggctgagttggaacagaattctccaaaaattcaaaaagtaaaggaagccctggctggattactggtgacatatcccaactcacaggaagcagaaaattggaagaaaattcaggaagaactcaattcccgatgggaaagggccactgaggttactgtggctcggcaaaggcagctagaggaatctgcaagtcatctggcctgcttccaggctgcagaatcccagctccggccgtggctgatggagaaagaactgatgatgggagtgctggggcccctgtctattgaccccaacatgttgaatgcacaaaagcaacaggtccagtttatgctaaaggaatttgaagcacgcaggcaacagcatgagcaactgaatgaggcagctcagggcatcctaacaggccctggagatgtctctctgtccaccagccaagtacagaaagaactccagagcatcaatcagaaatgggttgagctgactgacaaactcaactcccgttccagccaaattgaccaagctattgttaagagcacccagtaccaggaactgctccaggacttatcagagaaggtgagggcagttggacaacggctgagtgtccagtcagctatcagcacccaaccagaggctgtaaagcagcaattggaagagaccagtgaaattcgatctgacttggagcagttagaccacgaggttaaggaggctcagacactgtgcgatgaactctcagtgctcattggtgagcagtacctcaaggatgaactgaagaagcgtttggagacagttgccctgcctctccaaggtttagaagaccttgcagccgatcgcattaacagactccaggcagctcttgccagcacccagcagttccagcaaatgtttgatgagttgaggacctggttggatgataaacaaagccagcaagcaaaaaactgcccaatttctgcaaaattggagcggctacagtctcagctacaggagaatgaagagtttcagaaaagtcttaatcaacacagtggctcctatgaggtgattgtggctgaaggggaatctctacttctttctgtacctcctggagaagagaaaaggactctacaaaaccagttggttgagctcaaaaaccattgggaagagcttagtaaaaaaactgcagacagacaatccaggctcaaggattgtatgcagaaagctcagaaatatcagtggcatgtggaagaccttgtgccatggatagaagattgtaaagctaagatgtctgagttgcgagtcactctggatccagtgcagctagagtccagtctcctaagatcaaaggctatgctgaatgaggtggagaagcgccgctccctgctggaaatattgaatagtgctgctgacattctgatcaattcttcagaagcagatgaggatggaatccgggatgagaaggctgggatcaaccagaacatggatgctgttacagaagagctgcaggccaaaacagggtcactcgaagaaatgactcagaggctcagggagttccaggaaagctttaagaatattgaaaagaaggttgaaggagccaaacaccaacttgagatctttgatgctctgggttctcaagcctgtagcaacaagaacctggagaagctaagagctcaacaggaagtgctgcaggccctagagcctcaggtagactatctgaggaactttactcagggtctggtagaagatgccccagatggatctgatgcttctcaacttctccaccaagctgaggtcgcccagcaagagttcctcgaagttaagcaaagagtgaacagtggttgtgtgatgatggaaaacaagctggaggggattggccagtttcactgccgggtccgagagatgttctctcaattggcagacctggatgatgagctagatggcatgggtgctattggcagagacactgatagcctccagtcccaaatcgaggatgtccggctattccttaacaaaattcacgtcctcaaattagacatagaggcctctgaagcagagtgtcgacatatgctagaagaagaggggactctggatttgttaggtctcaaaagggagctagaagccctgaacaaacagtgtggcaaactgacagagagggggaaagctcgtcaggaacagctggaactgacactaggccgtgtagaggacttctacaggaaattgaaaggactcaatgacgcgaccacagcagcagaggaggcagaggccctccagtgggtagtggggaccgaagtggaaatcatcaaccaacaattagcagattttaaaatgtttcagaaagaacaagtggatcctcttcagatgaaattgcagcaggtgaatggacttggccagggattaattcagagtgcaggaaaagactgtgatgtacagggtttagaacatgacatggaagagatcaatgctcgatggaatacattgaataaaaaggtcgcacaaagaattgcacagctacaggaagctttgttgcattgtgggaagtttcaagatgccttggagccattgctcagctggttggcagataccgaggagctcatagccaatcagaaacctccatctgctgagtataaagtggtgaaagcacagatccaagaacagaagttgctccagcggctcctagatgatcgaaaggccacagtagacatgcttcaagcagaaggaggcagaatagcccagtcagcagagctggctgatagagagaaaatcactggacagctggagagtcttgaaagtagatggactgaactactcagtaaggcagcagccaggcaaaaacagctggaagacatcctggttctggccaaacagttccatgagacagctgagcctatttctgacttcttatctgtcacagagaaaaagcttgctaactcagaacctgttggcactcagactgccaaaatacagcagcagatcattcggcacaaggctctggaagaagacatagaaaaccatgcaacagatgtgcaccaggcagtcaaaattgggcagtccctctcctccctgacatctcctgcagaacagggtgtgctgtcagaaaagatagactcattgcaggcccgatacagtgaaattcaagaccgctgttgtcggaaggcagccctacttgaccaagctctgtctaatgctaggctgtttggggaggatgaggtggaggtgctcaactggctggctgaggttgaggacaagctcagttcagtgttcgtaaaggatttcaaacaggatgtcctgcacaggcagcatgctgaccacctggctttaaatgaagaaattgttaatagaaagaagaatgtagatcaagctattaaaaatggtcaggctcttctaaaacaaaccacaggtgaggaggtgttacttatccaggaaaaactagatggtataaagactcgttacgcagacatcacagttactagctccaaggccctcagaactttagagcaagcccggcagctggccaccaagttccagtctacttatgaggaactgaccgggtggctgagggaggtggaggaggagctggcaaccagtggaggacagtctcccacaggggaacagataccccagtttcagcagagacagaaggaattaaagaaggaggtcatggagcacaggctggtgttggacacagtgaatgaggtgagccgtgctctcttagagctggtgccctggagagccagagaagggctggataaacttgtgtccgatgctaacgagcagtacaaactagtcagtgacactattggacaaagggtggatgaaattgatgctgctattcagagatcacaacagtatgagcaagctgccgatgcagaactagcttgggttgctgaaacaaaacggaaactgatggctctgggtccaattcgcctggaacaggaccagaccacagctcagcttcaggtacagaaggctttctccattgacattattcgacacaaagattcaatggatgaactcttcagtcaccgtagtgaaatctttggcacatgtggggaggagcaaaaaactgtattacaggaaaagacagagtctctaatacagcaatatgaagccattagcctactcaattcagagcgttatgcccgcctagagcgggcccaggtcttagtaaaccagttttgggaaacttatgaagagctcagcccctggattgaggaaactcgggcactaatagcacagttaccctctccagccattgatcatgagcagctcaggcagcaacaagaggaaatgaggcaattaagggaatctattgctgaacacaaacctcatattgacaaactactaaagataggcccacaactaaaggaattaaaccctgaggaaggggaaatggtggaagaaaaataccagaaagcagaaaacatgtatgcccaaataaaggaggaggtgcgccagcgagccctggctctggatgaagccgtgtcccagtccacacagatttgtttagtttcatgataaaattgagcctatgttggagacactggagaatctttcctctcgcctgcgtatgccaccactgatccctgctgaagtagacaagatcagagagtgcatcagtgacaataagagtgccaccgtggagctagaaaaactgcagccatcctttgaggccttgaagcgccgtggagaggagcttattggacgatctcagggagcagacaaggatctggctgcaaaagaaatccaggataaattggatcaaatggtattcttctgggaggacatcaaagctcgggctgaagaacgagaaatcaaatttcttgatgtccttgaattagcagagaagttctggtatgacatggcagctctcctgaccaccatcaaagacacccaggatattgtccatgacttggaaagcccaggcattgatccttccatcatcaaacaacaggttgaagctgctgagactattaaggaagagacagatggtctgcatgaagagctggagtttattcggatccttggagcagatttgatttttgcctgtggagaaactgagaagcctgaagtgaggaagagcattgatgagatgaataatgcttgggagaacttaaacaaaacatggaaagagaggctagaaaaacttgaggatgctatgcaagctgctgtgcagtatcaggacactcttcaggctatgtttgactggctagataacactgtgattaaactctgcaccatgccccctgttggcactgacctcaatactgttaaagatcagttaaatgaaatgaaggagttcaaagtagaagtttaccaacagcaaattgagatggagaagcttaatcaccagggtgaactgatgttaaagaaagctactgatgagacggacagagacattatacgagaaccactgacagaactcaaacacctctgggagaacctgggtgagaaaattgcccaccgacagcacaaactagaaggggctctgttggcccttggtcagttccagcatgccttagaggaactaatgagttggctgactcataccgaagagttgttagatgctcagagaccaataagtggagacccaaaagtcattgaagttgagctcgcaaagcaccatgtcctaaaaaatgatgttttggctcatcaagccacagtggaaacagtcaacaaagctggcaatgagcttcttgaatccagtgctggagatgatgccagcagcttaaggagccgtttggaagccatgaaccaatgctgggagtcagtgttacagaaaacagaggagagggagcagcagcttcagtcaactctgcagcaggcccagggcttccacagtgaaattgaagatttcctcttggaacttactagaatggagagccagctttctgcatctaagcccacaggaggacttcctgaaactgctagggaacagcttgatacacatatggaactctattcccagctgaaagccaaggaagagacttataatcaactacttgacaagggcagactcatgcttctaagccgtgacgactctgggtctggctccaagacagaacagagtgtagcacttttggagcagaagtggcatgtggtcagcagtaagatggaagaaagaaagtcaaagctggaagaggccctcaacttggcaacagaattccagaattccctacaagaatttatcaactggctcactctagcagagcagagtttaaacatcgcttctccaccaagcctgattctaaatactgtcctttcccagatagaagagcacaaggtttttgctaatgaagtaaatgctcatcgagaccagatcattgagctggatcaaactgggaatcaattaaagttccttagccaaaagcaggatgttgttctgatcaagaatttgttggtgagcgtgcagtctcgatgggagaaggttgtccagcgatctattgaaagagggcgatcactagatgatgccaggaagcgggcaaaacaattccatgaagcttggaaaaaactgattgactggctagaagatgcagagagtcacctggactcagaactagagatatccaatgacccagacaaaattaaacttcagctttctaagcataaggagtttcagaagactcttggtggcaagcagcctgtgtatgataccacaattagaactggcagagcactgaaagaaaagactttgcttcccgaagatagtcagaaacttgacaatttcctaggagaagtcagagacaaatgggatactgtttgtggcaagtctgtggagcggcagcacaagttggaggaagccctgctcttttcgggtcagttcatggatgctttgcaggcattggttgactggttatacaaggtggagccacagctggctgaggaccagcccgtgcacggggaccttgacctcgtcatgaacctcatggatgcacacaaggttttccagaaggaactgggaaagcgaacaggaaccgttcaggtcctgaagcggtcaggccgagagctgattgagaatagtcgagatgacaccacttgggtaaaaggacagctccaggaactgagcactcgctgggacactgtctgtaaactctctgtttccaaacaaagccggcttgagcaggccttaaaacaagcggaagtgtttcgagacacagtccacatgctgttggagtggctttctgaagcagagcaaacgcttcgctttcggggagcacttcctgatgacacagaggccctgcagtctctcattgacacccataaggaattcatgaagaaagtagaagaaaagcgagtggacgttaactcagcagtagccatgggagaagtcatcctggctgtctgccaccccgattgcatcacaaccatcaaacactggatcaccatcatccgagctcgcttcgaggaggtcctgacatgggctaagcagcaccagcagcgtcttgaaacggccttgtcagaactggtggctaatgctgagctcctggaagaacttctggcatggatccagtgggctgagaccaccctcattcagcgggatcaggagccaatcccgcagaacattgaccgagttaaagcccttatcgctgagcatcagacatttatggaggagatgactcgcaaacagcctgacgtggaccgggtcaccaagacatacaaaaggaaaaacatagagcctactcacgcgcctttcatagagaaatcccgcagcggaggcaggaaatccctaagtcagccaacccctcctcccatgccaatcctttcacagtctgaagcaaaaaacccacggatcaaccagctttctgcccgctggcagcaggtgtggctgttagcactggagcggcaaaggaaactgaatgatgccttggatcggctggaggagttgaaagaatttgccaactttgactttgatgtctggaggaaaaagtatatgcgttggatgaatcacaaaaagtctcgagtgatggatttcttccggcgcattgataaggaccaggatgggaagataacacgtcaggagtttatcgatggcattttagcatccaagttccccaccaccaagttagagatgactgctgtggctgacattttcgaccgagatggggatggttacattgattattatgaatttgtggctgctcttcatcccaacaaggatgcgtatcgaccaacaaccgatgcagataaaatcgaagatgaggttacaagacaagtggctcagtgcaaatgtgcaaaaaggtttcaggtggagcagatcggagagaataaataccggtttggggattctcagcagttgcggctggtccgtattctgcgcagcaccgtgatggttcgcgttggtggaggatggatggccttggatgaatttttagtgaaaaatgatccctgccgagcacgaggtagaactaacattgaacttagagagaaattcatcctaccagagggagcatcccagggaatgacccccttccgctcacggggtcgaaggtccaaaccatcttcccgggcagcttcccctactcgttccagctccagtgctagtcagagtaaccacagctgtacatccatgccatcttctccagccaccccagccagtggaaccaaggttatcccatcatcaggtagcaagttgaaacgaccaacaccaacttttcattctagtcggacatcccttgctggtgataccagcaatagttcttccccggcctccacaggtgccaaaactaatcgggcagaccctaaaaagtctgccagtcgccctgggagtcgggctgggagtcgagccgggagtcgagccagcagccggcgaggaagtgacgcttctgactttgacctcttagagacgcagtctgcttgttccgacacttcagaaagcagcgctgcagggggccaaggcaactccaggagagggctaaacaaaccttccaaaatcccaaccatgtctaagaagaccaccactgcctcccccaggactccaggtcccaagcgataacactgtctaagcacccccaagccactatccactttgaatcctgctccatacattgggtgtatatttattctgaacgggagaagttatattgttaaaagtgtaaaagaataattgtgttatgaagctgccttattttttttctttttgtaagttactattttcatgtgaatatttatgtagataaaatttgcctcctggtaaccctgtaatggatggggcccagaaatgaaatatttgagaaaaacaagtgaaaaggtcaagatacaaatgtgtattaaaaaaaaaaaagcctattaatagggtttctgcgcggtgcagggttgtaaacctgctttatcttttaggattattcctaaatgcatcttctttataaacttgacttgctatctcagcaagataaattatattaaaaaaataagaatcctgcagtgtttaaggaactctttttttgtaaatcacggacacctcaattagcaagaactgaggggagggctttttccattgtttaatgttttgtgatttttagctaaagagagggaacctcatctaagtaacatttgcacatgatacagcaaaaggagttcattgcaatactgtctttggatattgtttcagtactgggtgtttaaaggacaaatagctgctagaattcaggggtaaatgtaagtgttcagaaaacgtcagaacatttggggttttaaactgatttgttgctccctatccagcctagacaccagtaactcttgtgttcaccaggacccagacccttggcaagggataggctcgttggtgacattgtgaatttcagatttgttttatccactttttttgctatttatttaaatggtcgatcaacttcccacaaactgaggaatgaattccacgagcctgttctgaaaatgtggacgtaagacaaacacgtgctcgtcctttaatggagttcaccagcacacttgttaaccagtcctgtttgctttcgtctttttttgtgcgtaataaagtcaactgaccaagtgaccatgaaaaggggctgtctggggctcctgttttttagctgctgttcttcagctccgaccatgttgctgtgtgattatctcaattggttttaattgaggcagaaactgaagctctaccaatgaactgtttagaaacaagacacacttttgtattaaaattgcttgcagtaacaaatattttgtatttcctgattttcttttcaactattaccttatctataaatgttaccctggggtataatcatgttgtaggtacttaaatgcattccgcaaatcaaaatatcttgatggataaattatagagctt

SEQ ID NO: 18101 - DNA, 23440 bp, Homo sapiens
  source 1..23440: mol_type = unassigned DNA
ttttgtctgctcacattcacccctttctccttcagatcacttctccctgggctcccaggccctcctgcagcagcccccgcctgggccatgtcttcctcagatgaagagacgctcagtgagcggtcatgtcggagtgagcggtcttgtcggagtgagcgatcttacaggagcgagcggtcggggagcctgtctccctgtcccccaggggacaccttgccctggaacctgccactgcatgagcagaaaaagcggaaaagccaggattcggtgctggaccctgcagagcgtgctgtggtcagagtcgctgatgaacgggaccgggttcagaagaaaacgttcaccaagtgggtcaacaagcacttaatgaaggtccgcaagcacatcaatgatctttatgaagatctgcgggatggccataacctgatctctctgttggaggtcctctcaggcatcaaactgccccgggagaagggcaggatgcgttttcataggctgcagaatgtgcagattgccctggacttcctaaagcagcgacaggtgaaactagtgaatattcgcaatgatgacatcacagatggcaaccccaagttgaccctgggtctgatctggaccattattttgcatttccagatctctgacatctacattagtggagaatcaggggatatgtcagccaaggagaaactactcctgtggacccagaaggtgacagctggttacacaggaatcaaatgcaccaacttttcctcctgctggagtgatgggaagatgttcaatgcactcattcaccgataccgacccgatctagtagacatggagagggtgcaaatccaaagtaaccgagagaatctggaacaggcttttgaagtggcagaaagactgggggtcactcgcctgctggatgcagaagatgtggatgtgccatctccagatgaaaagtctgtaatcacttatgtgtcttcgatttatgatgccttccctaaagttcctgagggtggagaagggatcagtgctacggaagtggactccaggtggcaagaataccaaagccgagtggactccctcattccctggatcaaacagcatacaatactgatgtcagataaaacttttccccaaaaccctgttgaactaaaggcactttataaccaatatatacacttcaaagaaacagaaattctggccaaggagagagaaaaaggaagaattgaggaattatataaattactagaggtgtggattgaatttggccgaattaaactgcctcaaggttatcaccctaatgatgtggaagaagagtggggaaagctcatcatagagatgctggaacgagagaaatcacttcggccggctgtggagaggctggaattgctgctacagattgcaaacaaaatccagaatggtgctttgaactgtgaagaaaaactgacactagctaagaatacactgcaggctgatgctgctcacctggaatcaggacaaccggtacaatgtgagtcagatgtcattatgtacattcaggagtgtgaaggtctcatcaggcagctgcaggtggatctccagatcctgcgggatgagaattactaccagctagaagagctggcttttagggtcatgcgtcttcaggatgagctggtcaccttgcgtctagagtgtacaaacctgtaccggaagggtcatttcacttcacttgaattggttccaccctctactttaaccaccactcatctgaaagcagaacccttaaccaaggcaacccattcttcttctacctcctggttccgaaagcctatgactcgggctgaacttgtggccatcagctcctctgaagatgaaggcaatctccgatttgtgtatgaactactgtcttgggtagaagagatgcagatgaaactggagcgagcagagtggggcaatgacctgcctagtgtggagttgcagctagaaacacagcagcacatccatacgagtgtagaagagctgggctcaagtgtcaaggaggccaggttgtatgagggaaagatgtcccagaatttccataccagctatgctgaaactcttggaaagctggagacacagtattgtaaattgaaggaaacttctagcttccggatgaggcaccttcagagcctgcataaatttgtttccagagctacagctgagttgatctggttgaatgagaaggaggaggaggaactagcatatgactggagtgacaacaattccaatatctcagccaagagaaattacttctctgagttgacaatggaactggaggagaaacaggatgtgtttcgttctctacaagatacagcagaactactttcacttgagaaccacccagccaagcagacagtggaggcttacagtgctgctgtccagtcccagttgcagtggatgaagcagctgtgcctgtgtgttgagcagcatgtgaaagagaatactgcttattttcagttcttcagtgatgcacgagagctggagtcattcttgaggaacctccaagattccattaaacgaaaatattcctgtgaccacaacaccagcttatcccgccttgaagacctgctccaggactccatggatgaaaaggagcagcttatacagtccaagagttccgttgccagtctcgttgggagatcaaaaaccatcgttcagctaaaaccacgcagtccagaccatgtgttaaagaacaccatttctgtcaaggctgtctgtgactacaggcagatcgagattactatttgcaaaaatgatgaatgtgtgctagaagataattctcagcggaccaaatggaaagtgatcagccccacagggaacgaggcaatggtgccgtcagtctgcttcctcatccccccacccaataaggatgccattgagatggccagcagggtcgaacaatcttatcagaaggttatggccctttggcatcagctgcatgttaacaccaaaagccttatctcttggaactatctgcgtaaagaccttgaccttgtacagacctggaacctagaaaagcttcgatcctcagcaccaggggagtgccatcagattatgaagaaccttcaggcccactatgaagactttctgcaggatagtcgtgactctgtgctgttctcagtggctgatcgcttgcgcttggaagaggaggtggaagcttgtaaagcccgcttccagcacctgatgaagtccatggagaatgaggacaaagaggagactgtggccaagatgtacatttcagagttgaagaacatccggctacgcctggaggagtatgaacagagggtggtcaaacgaattcagtctctagccagctctaggactgacagagatgcctggcaggacaatgcattaaggattgcagagcaagagcacacccaggaggatttacagcaattgaggtcagacttggatgcagtttctatgaaatgtgacagctttctccatcagtctccatctagttcaagtgtcccaactctgcgctcagaactgaatctgctggtggagaagatggaccatgtctatggtctctctactgtatatctgaataagttaaagacagttgatgttatagtacgtagcatacaggatgctgaactcttggtcaaaggttatgagattaagctgagtcaagaagaagtagtactggcagatctctcagctctggaggcccattggtcgacattacggcactggcttagtgatgtgaaggacaagaattcagtgttttcagtcctggatgaggaaattgccaaggccaaggtagtggcagagcagatgagtcgtctgacaccagagcgaaatctggatttggagcgctatcaggaaaaaggctcccagctgcaggagcgttggcaccgagtcattgcccagctcgagattcgccaatctgagctagaaagtatccaggaagttctgggagattaccgagcctgccatggaactctcatcaagtggattgaggaaaccactgcccagcaggaaatgatgaagccaggccaggcagaggatagcagagtgctttcggagcagctcagccagcagacggccctatttgcagaaattgagagaaatcagacaaaactggatcaatgtcaaaaattttcccagcagtactctactattgtaaaggactatgaattgcaactgatgacatacaaggcctttgtggaatcgcagcagaaatcccctggcaagcgccgtcgcatgctttcctcttcagatgccatcactcaagagttcatggacttaaggactcgctacacggcattggtgactttaacaactcagcacgtgaaatacatcagtgatgcactccggcgtctggaggaggaggagaaagtggtagaagaggagaaacaagaacatgtggagaaggttaaagaacttttgggctgggtgtctaccctagcgaggaatacacaaggaaaagctacctcatccgagaccaaagaatcaacagacattgaaaaagctattttggaacagcaggttctgtcagaagagctgacaacaaagaaagaacaagtctctgaagctattaaaacatcacagatcttcttggccaagcatggtcataagctctcagaaaaagagaagaaacaaatatctgagcaattgaatgccctaaacaaggcttaccatgacctttgtgatggttctgcaaatcagcttcagcagcttcagagccagttggctcaccagacagaacaaaaggaatgcagagcagttgctggggtgattgacctaggcacagtggagatatttcccatcttcaaagccatgcaaaagggcctccttgaccaagacacaggcctagtgcttctggaatctcaggttatcatgtctggcctcattgcccctgagacgggtgaaaacctctctttggaggagggcatagccagaaacctcattaatccccagatgtaccagcagctccgggagctacaggatgccctggccttaataagcaggcttactgagagcagaggccctctttctgtggtggaagcaattgaaaagagaataatcagtgagacagttggactgaaaatcttagaagctcacctggcaactggaggtttcagtctttcccctagtgagaactgtattaacctggaagaggcttttcatcaaggcctcatttctgcatggcttcattcagtattagagtcttatcttagaacatccaagaatttgatagaccctaacacagctgagaaaattggtttgctggatctgatgcagcgatgtattgtccaccaggaatcaggattcaaattactgcctgtcaaacaattggcaggggggatggtgagcttgaaatcaggccggaaggttagcattttccgtgcagttcaggaagggctaatagataggcaggtcactgtccggttgctggaagctcagctttttgctggtggcatagtagatccaagaacaggacacagacttacagtggaagaggctgtaagacataatctgattgaccaagatatggcctgtgctatcctcataaggcagcttcagacaggaggcatcatagacactgtcacggggcaaaggctaacaatagatgaagcagtgagcaatgatctagtagctgctaagatcgcccttgtgattctggagtccctctggtcattcatggggttgctgtggcctgaatctggagagatcctcccaattacagatgccctagaacaaggtattgtgtctactgaactagcacataaaatccttagtaaccgacagcatattaaggctctgtttctaccagcaaccacagagattttgtcctggaagaaagcaatagaaagtggtatcctggatagagatcttgccaataacttaaaatcgatttgtatacctgatgtgatgccccacatgcaactagcagactctgcagaacaaaatattaatcctggagcagcagttctaccgtgcagcaagagccaccctaaggccacagcaagccagagtgagaatctgttgttccagctgatgactcacagctatattaatgtgcaaaatggacagaggctgcttctgttagataaagagctgatggagacactaacatccagagatgagtatcaaacaagtcctccaaaagtggttgaaattgggcatcaaaggcaaaaaactcctgagggattgcaagaatcagctaatgtgaaaatctcaggaactttcagcagtgggtggactgtgaggctgcctgagttccagttttcttctcagaacaaagaatatcccgatcgggaagattgcactacagaaaaaggcaaaaagaccactgtagaaacagaagattcttctgtagagaaccctgaacaggatctgtttgtagaacaaaaagagagaaatccaaacattgatgctttgaaggtaataaataaagtcaaattagaggtacaaaggcagttgataggtacccaaagggaagaccaaacagcagtgtctgtcagagaaaatgccagcaggggacacctcctgaccatacctcctgctgaggcggaaggtgtgccgttggtggttgacaaagatgttttttctgttgaaacaccaaagaaagaacatcaacctctaagaaacacttcctttacatgtcagaatgaacaagcacacactcttgagactgaatatattcatgatgaaactggaggatctcacataaaaccccaaagcaaaaagttacaagttcaggtaaagaaaactctaggtataaagttagaactaaagtctgaaactgatgggaatgttcatcctctggacaaaaaggaaatgttaaagaaaacatttctggctaaggatgaccataaagaaagtcaagaagcacagaacatcgcaggtggtagtatgatgatgtcagaaaagaccgatgaggaagatagtggcagggaaatttttctgtcatgcagtcatccattagaattgcttgaagaagctaccttaaatgtattatctgcacagttactagatggtggtatctttcatgaacaaacaggtcaaaagctcttactaaatgaagcaatatcccgaggcattgtgccaagtcacactgccgtgaagcttatggagaagctgaacatgtttcaggggttctttgactctcagacttgtgagtctttgacaactgaagaagtcattaatgaaggtctgatggatgagaaattattacataatgtcctcatggcagacaaagctataagtggtgtcttagacccccgtacccagacactgtgctctgtaaaggatgcagttacagttggacttcttgacaaggaaacagccaccagaattttagagaggcaggtggtgactggtggaattattgatctgaaacgaggcaaaaaagtttcagtaactttggcctcaactcttggcttggtggacgttgctgaccagccagaacttataaatctggagaaagcttccaaaggtagagatgctgaaaaaacagttagggagagattaattagtttacaaatggaaacaacaggacttatagaccctgatagtaaagcacctttaacagttgtgcagtccattgacagaggtcttttggagagagaggaggccgttcgtttgttgactaagcaagtggtagatggaggtatcattcaccatatatctgggatgagactttctgttgataatgccttcagacatggcttaattggtgaagatttagccgagaaactcaaaagagttgagaacttaaacatccatcagatttttaatcctgaaacgaaggaaaatatttccctccctaaagccataaaattagatcttattacctcagacctgaaaagagaaatccaggaggttcaggcctttactggaaactttgtggatctcatttctggtcagagattgaccttggcagaagctaaaaaagaaggactgttaactaatgaagcagtattgtctccaggaatgatgcatggcattgtagatcccgagaactgcagaattgtcccctactcagaattagtcaagaaatgtaagattgatattgaatctggacagagatatctagaagtaattcccttctcagacattaaagatggggtgagcgacaaagtgcttacattgtctcaagcaattcagcttggaaaagtagactttgcatctacgctgaaggttctagaagcccaggcaaatactggtggaatcatagatactgctactggaaaaagactgacattggcatcagctttggaagagaaactggtggatgaaaacatggtcagaattattgcatctcatcaggtgttaaatggaggaattgttgacatatttagtgatcagagagtgactttagtagaagctattgagaaaagactgatcagccctgaactggcaaatatgatccaaatagatagttcagagttcagcgatcacagggctcagattgaaaagcaagaagggattgaagtgtgtgcattacaaaatgaatttctaggaaaggatatgttaattgcttgtaatcagactgctgaaatgagttgtaataaagtagaagagagtgagagattatttcaagttgaaaatcagtctgcacaagaaaaggttaaagtgagagtttctgatggggagcaggcaaaaaagagcagggaaatttccttaaaggaatttgggtgcaaggatcaacgtaagccaagaatgtcttcagatgctaaagaatttatcagtatcataaatcctcataatcttaaaggtaaatccttgggccaagtgtcattgacacacccttactctgaatgtgattttaaacttaaagaagtggctagaaataacatgggaaatgatacaaatgaagagcaggaaaaagcagtgacaaaaatagaaattatttctcatatgaagcagtctacctcatgtctagattctgaagaaataagagaaaatcaaggggaagtgattttggaagtacaagaaacatattgtgaaacgtcaggcaaattgccgagtgagcaggttttgcagcaaccaatgaatgctcgggtgaaaagtaagagagagaagagggaggtgattgtagaagaaagtatcagaacatgcaaaccagcatttctttctgaagaaaagttgtatcaggaaactgccattagagatgagcatgactcccatataaagagccaacctagggaaatgacctcaagtgaaaaagggaaagaagctgatacagaaatgggattttctattacttttaaaattgaagagtcctcttcccaagtggtacctcaaggaatttctgtaaaacatttagatgctttaacactcttcagctctaaacaggccaatgaaggaaaagtaaacaatttaagtctctgcttgactttaaaaccagaagaaaacttatctcgagaaattgcctgtggggcccagagtgaaccattcccttgtatgaccccaagacctgaaggattgcactaccaggaatcagatggaaaagcccaagtgacaggcccatcccaaatttccaaaacagacaagtctttccaaggaaccaccagacaggagaccaactatcaagattcctgggttacttcgaaaactaaggaaaccaaacatcaaatttcctcatctaatgaatgtaaagaaaagtcataccaagaagtatcttttgacccagcaagaggtcttaaattggaagaaatcacagtttctagaccagattcaaaagaagtcaggtatctagaattctcagacagaaaagaccttcatcatcagggcagcaaaagtgatgataaactttgtggaactctcaaatctgaaatagcaacacaggaactaactggagagaaatttctagaaatggcaaaccctaatgttgcaggtctagaagcaggatccattgaggacatagtgactcagagaggttccagagtcttgggatcctttcttccagagaaactgttcaaaggagtgtctcaaaaagagaatacagggcaacagaatgccatcattagtcctactgttctagagaccagtgaagaaaagacagtgtccctaacagtatgctctgcagtgaagacagagaagacaccacaggaaaagctcagagaaagccctggcagtgaacaaactcccttcatgactgcacctgaaggaaagggaaatggaggtgtaaacccagagcccttcagagcaactcagaatgtatttacccggcaactctgtttagaacatgatgaaaagctagtatcctatctgtctctgttacggaacattgaaatgaggaccaaacagattcaacctttggagctaaacctggcagaactacaggatctgctgtgtcaggccaaggtattagaaagggagttaaaggatctgaccaccttggtcagtcaggagctggagtgtgtgaatcagattatcatcagccagcctcaagaagttcctgctcaactgttgaaggctctagagaaagatgccaagaatcttcagaagtctctcagctctgtgagtgacacttggaattccaggctactccacttccagaatgctgtggaaatagaaaagactaaagtgttaaatcagcacacacagctagaaggccgacttcaagatctgagagcctgggttggcaataaaaatcttattctgaacagcaagggatctaacagtgaaatagatgttgacagcctgaacctctgcctccaacagtatgaggatttgaaacagcccatggctgaaaggaaagctcagctggatgctcttgcttttgatattcagttctttatctcagaacatgcccaggacttgtcccctcagcagaatcgacagatgctgaggcttctgaatgaactgcagaggtccttccaggacattttggaacagactgccgctcaggtggatgccttgcagggccatcttcaacaaatggagcaggaagccctggtgaagaccctgcagaaacaacaaaatacctgtcaccagcaactggaggatctttgcagttgggtaggacaggcagaaagagcactggcaggccaccaaggcagaaccacccagcaggatctctctgctttgcagaagaaccaaagtgacttgaaggatttacaggatgacattcagaatcgtgccacctcatttgccactgttgtcaaggacattgaggggttcatggaagagaatcagaccaagctgagcccacgtgagttgacagctcttcgggaaaagcttcatcaggctaaggagcaatatgaggcgctccaggaagagacacgtgtggcccagaaggaactggaggaagcagtgacctccgccttacagcaggagactgaaaagagtaaagcagcaaaggaactggcagagaacaagaagaagatcgatgctctcctggattgggtaacttcagtaggatcatctggtggacagctgctgaccaaccttccaggaatggagcagctctcgggagctagcttggagaaaggagccttggacaccactgatggttacatgggggtgaatcaagccccagagaaactggacaagcaatgtgagatgatgaaggcccgtcaccaagaattgctgtcccagcagcaaaatttcattctggccacccagtcagctcaggccttcttggatcagcatggccacaatctcacacctgaggagcaacagatgctgcaacagaagctgggagagctaaaggaacaatactctacttccctggcccaatcagaggcagaactgaagcaggtgcagacacttcaggatgagttgcagaaatttctgcaggatcataaagagtttgaaagctggttggaacgatccgagaaagagctggagaacatgcataagggaggcagcagccccgagacccttccctccctgctaaagcggcaaggaagcttctcagaggatgtcatttcccacaaaggagacttgagatttgtgactatctcaggacagaaagtcttggacatggaaaacagttttaaggaaggcaaagaaccatcagaaattggaaacttagtaaaggacaagttgaaggatgcaacagaaagatacactgctctccactcaaagtgtacacgattaggatctcacctgaatatgctgttaggccagtatcatcaattccaaaacagtgctgacagcctgcaggcctggatgcaggcttgtgaggccaacgtggagaagctcctctcagatactgttgcctctgaccctggagttctccaggagcagcttgcaacaacaaagcagttgcaggaggaattggctgagcaccaagtacctgtggaaaaactccaaaaagtagctcgtgacataatggaaattgaaggggagccagccccagaccacaggcatgttcaagaaactacagattccatactcagccacttccaaagcctctcctatagcctggctgagcgatcttctctgctgcagaaagcaattgcccaatctcagagtgtccaggaaagcctggagagcctgttgcagtctattggggaagttgaacaaaacctggaagggaagcaggtgtcatcactctcatcaggagtcatccaggaagccttagccacaaatatgaaattgaagcaggacattgctcggcaaaagagcagcttggaggccacccgtgagatggtgacccgattcatggagacagcagacagtactacagcagcagtgctgcagggcaaactggcagaggtgagccagcggttcgaacagctctgtctacagcagcaagaaaaggagagctccctaaagaagcttctaccccaggcagagatgtttgaacacctctctggtaagctgcagcagttcatggaaaacaaaagtcggatgctggcctctggaaatcagccagatcaagatattacacatttcttccaacagatccaggagctcaatttggaaatggaagaccaacaggagaacctagatactcttgagcacctggtcactgaactgagctcttgtggctttgcgctggacttgtgccagcatcaggacagggtacagaatctaagaaaagacttcacagagctacagaagacagttaaagagagagagaaagatgcatcatcttgccaggaacagttggatgaattccggaagctggtcaggaccttccagaaatggttgaaagaaactgaagggagtattccacctacggaaacttctatgagtgctaaagagttagaaaagcagattgaacacctgaagagtctactagatgactgggcaagtaagggaactctggtggaagaaatcaattgcaaaggtacttctttagaaaatctcatcatggaaatcacagcacctgattcccaaggcaagacaggttccatactgccctctgtaggaagctctgtaggcagtgtaaacggataccacacctgcaaagatctgacggagatccagtgtgacatgtcagatgtaaacttgaagtatgagaaactagggggagtacttcatgaacgccaggaaagccttcaggctatcctcaacagaatggaggaggttcacaaggaggcaaactctgtgctgcagtggctggaatcaaaagaggaagtcctgaaatccatggatgccatgtcatctccaaccaagacagaaacagtgaaagcccaagctgaatctaacaaggccttcctggctgagttggaacagaattctccaaaaattcaaaaagtaaaggaagccctggctggattactggtgacatatcccaactcacaggaagcagaaaattggaagaaaattcaggaagaactcaattcccgatgggaaagggccactgaggttactgtggctcggcaaaggcagctagaggaatctgcaagtcatctggcctgcttccaggctgcagaatcccagctccggccgtggctgatggagaaagaactgatgatgggagtgctggggcccctgtctattgaccccaacatgttgaatgcacaaaagcaacaggtccagtttatgctaaaggaatttgaagcacgcaggcaacagcatgagcaactgaatgaggcagctcagggcatcctaacaggccctggagatgtctctctgtccaccagccaagtacagaaagaactccagagcatcaatcagaaatgggttgagctgactgacaaactcaactcccgttccagccaaattgaccaagctattgttaagagcacccagtaccaggaactgctccaggacttatcagagaaggtgagggcagttggacaacggctgagtgtccagtcagctatcagcacccaaccagaggctgtaaagcagcaattggaagagaccagtgaaattcgatctgacttggagcagttagaccacgaggttaaggaggctcagacactgtgcgatgaactctcagtgctcattggtgagcagtacctcaaggatgaactgaagaagcgtttggagacagttgccctgcctctccaaggtttagaagaccttgcagccgatcgcattaacagactccaggcagctcttgccagcacccagcagttccagcaaatgtttgatgagttgaggacctggttggatgataaacaaagccagcaagcaaaaaactgcccaatttctgcaaaattggagcggctacagtctcagctacaggagaatgaagagtttcagaaaagtcttaatcaacacagtggctcctatgaggtgattgtggctgaaggggaatctctacttctttctgtacctcctggagaagagaaaaggactctacaaaaccagttggttgagctcaaaaaccattgggaagagcttagtaaaaaaactgcagacagacaatccaggctcaaggattgtatgcagaaagctcagaaatatcagtggcatgtggaagaccttgtgccatggatagaagattgtaaagctaagatgtctgagttgcgagtcactctggatccagtgcagctagagtccagtctcctaagatcaaaggctatgctgaatgaggtggagaagcgccgctccctgctggaaatattgaatagtgctgctgacattctgatcaattcttcagaagcagatgaggatggaatccgggatgagaaggctgggatcaaccagaacatggatgctgttacagaagagctgcaggccaaaacagggtcactcgaagaaatgactcagaggctcagggagttccaggaaagctttaagaatattgaaaagaaggttgaaggagccaaacaccaacttgagatctttgatgctctgggttctcaagcctgtagcaacaagaacctggagaagctaagagctcaacaggaagtgctgcaggccctagagcctcaggtagactatctgaggaactttactcagggtctggtagaagatgccccagatggatctgatgcttctcaacttctccaccaagctgaggtcgcccagcaagagttcctcgaagttaagcaaagagtgaacagtggttgtgtgatgatggaaaacaagctggaggggattggccagtttcactgccgggtccgagagatgttctctcaattggcagacctggatgatgagctagatggcatgggtgctattggcagagacactgatagcctccagtcccaaatcgaggatgtccggctattccttaacaaaattcacgtcctcaaattagacatagaggcctctgaagcagagtgtcgacatatgctagaagaagaggggactctggatttgttaggtctcaaaagggagctagaagccctgaacaaacagtgtggcaaactgacagagagggggaaagctcgtcaggaacagctggaactgacactaggccgtgtagaggacttctacaggaaattgaaaggactcaatgacgcgaccacagcagcagaggaggcagaggccctccagtgggtagtggggaccgaagtggaaatcatcaaccaacaattagcagattttaaaatgtttcagaaagaacaagtggatcctcttcagatgaaattgcagcaggtgaatggacttggccagggattaattcagagtgcaggaaaagactgtgatgtacagggtttagaacatgacatggaagagatcaatgctcgatggaatacattgaataaaaaggtcgcacaaagaattgcacagctacaggaagctttgttgcattgtgggaagtttcaagatgccttggagccattgctcagctggttggcagataccgaggagctcatagccaatcagaaacctccatctgctgagtataaagtggtgaaagcacagatccaagaacagaagttgctccagcggctcctagatgatcgaaaggccacagtagacatgcttcaagcagaaggaggcagaatagcccagtcagcagagctggctgatagagagaaaatcactggacagctggagagtcttgaaagtagatggactgaactactcagtaaggcagcagccaggcaaaaacagctggaagacatcctggttctggccaaacagttccatgagacagctgagcctatttctgacttcttatctgtcacagagaaaaagcttgctaactcagaacctgttggcactcagactgccaaaatacagcagcagatcattcggcacaaggctttaaatgaagaaattgttaatagaaagaagaatgtagatcaagctattaaaaatggtcaggctcttctaaaacaaaccacaggtgaggaggtgttacttatccaggaaaaactagatggtataaagactcgttacgcagacatcacagttactagctccaaggccctcagaactttagagcaagcccggcagctggccaccaagttccagtctacttatgaggaactgaccgggtggctgagggaggtggaggaggagctggcaaccagtggaggacagtctcccacaggggaacagataccccagtttcagcagagacagaaggaattaaagaaggaggtcatggagcacaggctggtgttggacacagtgaatgaggtgagccgtgctctcttagagctggtgccctggagagccagagaagggctggataaacttgtgtccgatgctaacgagcagtacaaactagtcagtgacactattggacaaagggtggatgaaattgatgctgctattcagagatcacaacagtatgagcaagctgccgatgcagaactagcttgggttgctgaaacaaaacggaaactgatggctctgggtccaattcgcctggaacaggaccagaccacagctcagcttcaggtacagaaggctttctccattgacattattcgacacaaagattcaatggatgaactcttcagtcaccgtagtgaaatctttggcacatgtggggaggagcaaaaaactgtattacaggaaaagacagagtctctaatacagcaatatgaagccattagcctactcaattcagagcgttatgcccgcctagagcgggcccaggtcttagtaaaccagttttgggaaacttatgaagagctcagcccctggattgaggaaactcgggcactaatagcacagttaccctctccagccattgatcatgagcagctcaggcagcaacaagaggaaatgaggcaattaagggaatctattgctgaacacaaacctcatattgacaaactactaaagataggcccacaactaaaggaattaaaccctgaggaaggggaaatggtggaagaaaaataccagaaagcagaaaacatgtatgcccaaataaaggaggaggtgcgccagcgagccctggctctggatgaagccgtgtcccagtccacacagattacagagtttcatgataaaattgagcctatgttggagacactggagaatctttcctctcgcctgcgtatgccaccactgatccctgctgaagtagacaagatcagagagtgcatcagtgacaataagagtgccaccgtggagctagaaaaactgcagccatcctttgaggccttgaagcgccgtggagaggagcttattggacgatctcagggagcagacaaggatctggctgcaaaagaaatccaggataaattggatcaaatggtattcttctgggaggacatcaaagctcgggctgaagaacgagaaatcaaatttcttgatgtccttgaattagcagagaagttctggtatgacatggcagctctcctgaccaccatcaaagacacccaggatattgtccatgacttggaaagcccaggcattgatccttccatcatcaaacaacaggttgaagctgctgagactattaaggaagagacagatggtctgcatgaagagctggagtttattcggatccttggagcagatttgatttttgcctgtggagaaactgagaagcctgaagtgaggaagagcattgatgagatgaataatgcttgggagaacttaaacaaaacatggaaagagaggctagaaaaacttgaggatgctatgcaagctgctgtgcagtatcaggacactcttcaggctatgtttgactggctagataacactgtgattaaactctgcaccatgccccctgttggcactgacctcaatactgttaaagatcagttaaatgaaatgaaggagttcaaagtagaagtttaccaacagcaaattgagatggagaagcttaatcaccagggtgaactgatgttaaagaaagctactgatgagacggacagagacattatacgagaaccactgacagaactcaaacacctctgggagaacctgggtgagaaaattgcccaccgacagcacaaactagaaggggctctgttggcccttggtcagttccagcatgccttagaggaactaatgagttggctgactcataccgaagagttgttagatgctcagagaccaataagtggagacccaaaagtcattgaagttgagctcgcaaagcaccatgtcctaaaaaatgatgttttggctcatcaagccacagtggaaacagtcaacaaagctggcaatgagcttcttgaatccagtgctggagatgatgccagcagcttaaggagccgtttggaagccatgaaccaatgctgggagtcagtgttacagaaaacagaggagagggagcagcagcttcagtcaactctgcagcaggcccagggcttccacagtgaaattgaagatttcctcttggaacttactagaatggagagccagctttctgcatctaagcccacaggaggacttcctgaaactgctagggaacagcttgatacacatatggaactctattcccagctgaaagccaaggaagagacttataatcaactacttgacaagggcagactcatgcttctaagccgtgacgactctgggtctggctccaagacagaacagagtgtagcacttttggagcagaagtggcatgtggtcagcagtaagatggaagaaagaaagtcaaagctggaagaggccctcaacttggcaacagaattccagaattccctacaagaatttatcaactggctcactctagcagagcagagtttaaacatcgcttctccaccaagcctgattctaaatactgtcctttcccagatagaagagcacaaggtttttgctaatgaagtaaatgctcatcgagaccagatcattgagctggatcaaactgggaatcaattaaagttccttagccaaaagcaggatgttgttctgatcaagaatttgttggtgagcgtgcagtctcgatgggagaaggttgtccagcgatctattgaaagagggcgatcactagatgatgccaggaagcgggcaaaacaattccatgaagcttggaaaaaactgattgactggctagaagatgcagagagtcacctggactcagaactagagatatccaatgacccagacaaaattaaacttcagctttctaagcataaggagtttcagaagactcttggtggcaagcagcctgtgtatgataccacaattagaactggcagagcactgaaagaaaagactttgcttcccgaagatagtcagaaacttgacaatttcctaggagaagtcagagacaaatgggatactgtttgtggcaagtctgtggagcggcagcacaagttggaggaagccctgctcttttcgggtcagttcatggatgctttgcaggcattggttgactggttatacaaggtggagccacagctggctgaggaccagcccgtgcacggggaccttgacctcgtcatgaacctcatggatgcacacaaggttttccagaaggaactgggaaagcgaacaggaaccgttcaggtcctgaagcggtcaggccgagagctgattgagaatagtcgagatgacaccacttgggtaaaaggacagctccaggaactgagcactcgctgggacactgtctgtaaactctctgtttccaaacaaagccggcttgagcaggccttaaaacaagcggaagtgtttcgagacacagtccacatgctgttggagtggctttctgaagcagagcaaacgcttcgctttcggggagcacttcctgatgacacagaggccctgcagtctctcattgacacccataaggaattcatgaagaaagtagaagaaaagcgagtggacgttaactcagcagtagccatgggagaagtcatcctggctgtctgccaccccgattgcatcacaaccatcaaacactggatcaccatcatccgagctcgcttcgaggaggtcctgacatgggctaagcagcaccagcagcgtcttgaaacggccttgtcagaactggtggctaatgctgagctcctggaagaacttctggcatggatccagtgggctgagaccaccctcattcagcgggatcaggagccaatcccgcagaacattgaccgagttaaagcccttatcgctgagcatcagacatttatggaggagatgactcgcaaacagcctgacgtggaccgggtcaccaagacatacaaaaggaaaaacatagagcctactcacgcgcctttcatagagaaatcccgcagcggaggcaggaaatccctaagtcagccaacccctcctcccatgccaatcctttcacagtctgaagcaaaaaacccacggatcaaccagctttctgcccgctggcagcaggtgtggctgttagcactggagcggcaaaggaaactgaatgatgccttggatcggctggaggagttgaaagaatttgccaactttgactttgatgtctggaggaaaaagtatatgcgttggatgaatcacaaaaagtctcgagtgatggatttcttccggcgcattgataaggaccaggatgggaagataacacgtcaggagtttatcgatggcattttagcatccaagttccccaccaccaagttagagatgactgctgtggctgacattttcgaccgagatggggatggttacattgattattatgaatttgtggctgctcttcatcccaacaaggatgcgtatcgaccaacaaccgatgcagataaaatcgaagatgaggttacaagacaagtggctcagtgcaaatgtgcaaaaaggtttcaggtggagcagatcggagagaataaataccggtttggggattctcagcagttgcggctggtccgtattctgcgcagcaccgtgatggttcgcgttggtggaggatggatggccttggatgaatttttagtgaaaaatgatccctgccgagcacgaggtagaactaacattgaacttagagagaaattcatcctaccagagggagcatcccagggaatgacccccttccgctcacggggtcgaaggtccaaaccatcttcccgggcagcttcccctactcgttccagctccagtgctagtcagagtaaccacagctgtacatccatgccatcttctccagccaccccagccagtggaaccaaggttatcccatcatcaggtagcaagttgaaacgaccaacaccaacttttcattctagtcggacatcccttgctggtgataccagcaatagttcttccccggcctccacaggtgccaaaactaatcgggcagaccctaaaaagtctgccagtcgccctgggagtcgggctgggagtcgagccgggagtcgagccagcagccggcgaggaagtgacgcttctgactttgacctcttagagacgcagtctgcttgttccgacacttcagaaagcagcgctgcagggggccaaggcaactccaggagagggctaaacaaaccttccaaaatcccaaccatgtctaagaagaccaccactgcctcccccaggactccaggtcccaagcgataacactgtctaagcacccccaagccactatccactttgaatcctgctccatacattgggtgtatatttattctgaacgggagaagttatattgttaaaagtgtaaaagaataattgtgttatgaagctgccttattttttttctttttgtaagttactattttcatgtgaatatttatgtagataaaatttgcctcctggtaaccctgtaatggatggggcccagaaatgaaatatttgagaaaaacaagtgaaaaggtcaagatacaaatgtgtattaaaaaaaaaaaagcctattaatagggtttctgcgcggtgcagggttgtaaacctgctttatcttttaggattattcctaaatgcatcttctttataaacttgacttgctatctcagcaagataaattatattaaaaaaataagaatcctgcagtgtttaaggaactctttttttgtaaatcacggacacctcaattagcaagaactgaggggagggctttttccattgtttaatgttttgtgatttttagctaaagagagggaacctcatctaagtaacatttgcacatgatacagcaaaaggagttcattgcaatactgtctttggatattgtttcagtactgggtgtttaaaggacaaatagctgctagaattcaggggtaaatgtaagtgttcagaaaacgtcagaacatttggggttttaaactgatttgttgctccctatccagcctagacaccagtaactcttgtgttcaccaggacccagacccttggcaagggataggctcgttggtgacattgtgaatttcagatttgttttatccactttttttgctatttatttaaatggtcgatcaacttcccacaaactgaggaatgaattccacgagcctgttctgaaaatgtggacgtaagacaaacacgtgctcgtcctttaatggagttcaccagcacacttgttaaccagtcctgtttgctttcgtctttttttgtgcgtaataaagtcaactgaccaagtgaccatgaaaaggggctgtctggggctcctgttttttagctgctgttcttcagctccgaccatgttgctgtgtgattatctcaattggttttaattgaggcagaaactgaagctctaccaatgaactgtttagaaacaagacacacttttgtattaaaattgcttgcagta

SEQ ID NO: 18102 - DNA, 4393 bp, Homo sapiens
  source 1..4393: mol_type = unassigned DNA
atcacttctccctgggctcccaggccctcctgcagcagcccctgggccatgtcttcctcagatgaagagacgctcagtgagcggtcatgtcggagtgagcggtcttgtcggagtgagcgatcttacaggagcgagcggtcggggagcctgtctccctgtcccccaggggacaccttgccctggaacctgccactgcatgagcagaaaaagcggaaaagccaggattcggtgctggaccctgcagagcgtgctgtggtcagagtcgctgatgaacgggaccgggttcagaagaaaacgttcaccaagtgggtcaacaagcacttaatgaaggtccgcaagcacatcaatgatctttatgaagatctgcgggatggccataacctgatctctctgttggaggtcctctcaggcatcaaactgccccgggagaagggcaggatgcgttttcataggctgcagaatgtgcagattgccctggacttcctaaagcagcgacaggtgaaactagtgaatattcgcaatgatgacatcacagatggcaaccccaagttgaccctgggtctgatctggaccattattttgcatttccagatctctgacatctacattagtggagaatcaggggatatgtcagccaaggagaaactactcctgtggacccagaaggtgacagctggttacacaggaatcaaatgcaccaacttttcctcctgctggagtgatgggaagatgttcaatgcactcattcaccgataccgacccgatctagtagacatggagagggtgcaaatccaaagtaaccgagagaatctggaacaggcttttgaagtggcagaaagactgggggtcactcgcctgctggatgcagaagatgtggatgtgccatctccagatgaaaagtctgtaatcacttatgtgtcttcgatttatgatgccttccctaaagttcctgagggtggagaagggatcagtgctacggaagtggactccaggtggcaagaataccaaagccgagtggactccctcattccctggatcaaacagcatacaatactgatgtcagataaaacttttccccaaaaccctgttgaactaaaggcactttataaccaatatatacacttcaaagaaacagaaattctggccaaggagagagaaaaaggaagaattgaggaattatataaattactagaggtgtggattgaatttggccgaattaaactgcctcaaggttatcaccctaatgatgtggaagaagagtggggaaagctcatcatagagatgctggaacgagagaaatcacttcggccggctgtggagaggctggaattgctgctacagattgcaaacaaaatccagaatggtgctttgaactgtgaagaaaaactgacactagctaagaatacactgcaggctgatgctgctcacctggaatcaggacaaccggtacaatgtgagtcagatgtcattatgtacattcaggagtgtgaaggtctcatcaggcagctgcaggtggatctccagatcctgcgggatgagaattactaccagctagaagagctggcttttagggtcatgcgtcttcaggatgagctggtcaccttgcgtctagagtgtacaaacctgtaccggaagggtcatttcacttcacttgaattggttccaccctctactttaaccaccactcatctgaaagcagaacccttaaccaaggcaacccattcttcttctacctcctggttccgaaagcctatgactcgggctgaacttgtggccatcagctcctctgaagatgaaggcaatctccgatttgtgtatgaactactgtcttgggtagaagagatgcagatgaaactggagcgagcagagtggggcaatgacctgcctagtgtggagttgcagctagaaacacagcagcacatccatacgagtgtagaagagctgggctcaagtgtcaaggaggccaggttgtatgagggaaagatgtcccagaatttccataccagctatgctgaaactcttggaaagctggagacacagtattgtaaattgaaggaaacttctagcttccggatgaggcaccttcagagcctgcataaatttgtttccagagctacagctgagttgatctggttgaatgagaaggaggaggaggaactagcatatgactggagtgacaacaattccaatatctcagccaagagaaattacttctctgagttgacaatggaactggaggagaaacaggatgtgtttcgttctctacaagatacagcagaactactttcacttgagaaccacccagccaagcagacagtggaggcttacagtgctgctgtccagtcccagttgcagtggatgaagcagctgtgcctgtgtgttgagcagcatgtgaaagagaatactgcttattttcagttcttcagtgatgcacgagagctggagtcattcttgaggaacctccaagattccattaaacgaaaatattcctgtgaccacaacaccagcttatcccgccttgaagacctgctccaggactccatggtggaggatgaaaaggagcagcttatacagtccaagagttccgttgccagtctcgttgggagatcaaaaaccatcgttcagctaaaaccacgcagtccagaccatgtgttaaagaacaccatttctgtcaaggctgtctgtgactacaggcagatcgagggtcgaacaatcttatcagaaggttatggccctttggcatcagctgcatgttaacaccaaaagccttatctcttggaactatctgcgtaaagaccttgaccttgtacagacctggaacctagaaaagcttcgatcctcagcaccaggggagtgccatcagattatgaagaaccttcaggcccactatgaagactttctgcaggatagtcgtgactctgtgctgttctcagtggctgatcgcttgcgcttggaagaggaggtggaagcttgtaaagcccgcttccagcacctgatgaagtccatggagaatgaggacaaagaggagactgtggccaagatgtacatttcagagttgaagaacatccggctacgcctggaggagtatgaacagagggtggtcaaacgaattcagtctctagccagctctaggactgacagagatgcctggcaggacaatgcattaaggattgcagagcaagagcacacccaggaggatttacagcaattgaggtcagacttggatgcagtttctatgaaatgtgacagctttctccatcagtctccatctagttcaagtgtcccaactctgcgctcagaactgaatctgctggtggagaagatggaccatgtctatggtctctctactgtatatctgaataagttaaagacagttgatgttatagtacgtagcatacaggatgctgaactcttggtcaaaggttatgagattaagctgagtcaagaagaagtagtactggcagatctctcagctctggaggcccattggtcgacattacggcactggcttagtgatgtgaaggacaagaattcagtgttttcagtcctggatgaggaaattgccaaggccaaggtagtggcagagcagatgagtcgtctgacaccagagcgaaatctggatttggagcgctatcaggaaaaaggctcccagctgcaggagcgttggcaccgagtcattgcccagctcgagattcgccaatctgagctagaaagtatccaggaagttctgggagattaccgagcctgccatggaactctcatcaagtggattgaggaaaccactgcccagcaggaaatgatgaagccaggccaggcagaggatagcagagtgctttcggagcagctcagccagcagacggccctatttgcagaaattgagagaaatcagacaaaactggatcaatgtcaaaaattttcccagcagtactctactattgtaaaggactatgaattgcaactgatgacatacaaggcctttgtggaatcgcagcagaaatcccctggcaagcgccgtcgcatgctttcctcttcagatgccatcactcaagagttcatggacttaaggactcgctacacggcattggtgactttaacaactcagcacgtgaaatacatcagtgatgcactccggcgtctggaggaggaggagaaagtggtagaagaggagaaacaagaacatgtggagaaggttaaagaacttttgggctgggtgtctaccctagcgaggaatacacaaggaaaagctacctcatccgagaccaaagaatcaacagacattgaaaaagctattttggaacagcaggttctgtcagaagagctgacaacaaagaaagaacaagtctctgaagctattaaaacatcacagatcttcttggccaagcatggtcataag

SEQ ID NO: 18103 - DNA, 1565 bp, Homo sapiens
  source 1..1565: mol_type = unassigned DNA
cttcttccctttcccctcccccgctggccagttgtttcctgggctttgtctgagatacactgtacagttttagtcccagtctactagcgcctgctgaaaaacagtcagaagtgagatggaggagaagctgccaggaagtttctgacaacactaagctccggcctctgcctctgctgatagtacaggacaacagtaacctcaggagaaaggcatccagaggcctgcgctgagcttgtggctaactcaagggaggagaaaggacgggcctggaaatgcccctcttagattcatcttatttaccaccaaccatctttattttgactcacgttcttggagttgctggtgttctatactggaagaggcatgccagaggtagagcagatgaacgggaccgggttcagaagaaaacgttcaccaagtgggtcaacaagcacttaatgaaggtccgcaagcacatcaatgatctttatgaagatctgcgggatggccataacctgatctctctgttggaggtcctctcaggcatcaaactgccccgggagaagggcaggatgcgttttcataggctgcagaatgtgcagattgccctggacttcctaaagcagcgacaggtgaaactagtgaatattcgcaatgatgacatcacagatggcaaccccaagttgaccctgggtctgatctggaccattattttgcatttccagatctctgacatctacattagtggagaatcaggggatatgtcagccaaggagaaactactcctgtggacccagaaggtgacagctggttacacaggaatcaaatgcaccaacttttcctcctgctggagtgatgggaagatgttcaatgcactcattcaccgataccggtaagaacagtggaatttctgtgctcctgcagggctttttctcatctcttgtttgtaattagttataatactgtttccatctcctcaatcaaaaatcaaagctttgattcatttgttcatttgaaaaagaaacatttatttaactacttttctaggaactgggtacaagtagcagtgaagaaaacagcgaaagttcttgctctcatggaacttatctttcagtagggagaataggtaataaatgtatgccatcaagcagtggtaaatgcaatggcaggattagaaagtggcagaggtttgtggtactttggacagggtggtcagagatggcctttttggtgagcgtgttaaagcagagccatgagggagtgagtcatccaggcttctggggtcagagtgttccagtcggaagaaatacaaatgcaaagggcctggagtgagggcttgcttagagtggtttagggacagcaggtggctgaagtgaggtgaggacgataggaattctgaatgacaaaaataaaaattgttgagttcttagtggtcataaacatgccccaattttcagttctaaccgacgatatttttcccatgacattcaacaaacctaaactgtatgtttaagtttagcattagggagcactgggcccctggtgtatacttaaaaatggaatttgtactcttctaaacctcctgc

SEQ ID NO: 18104 - DNA, 17278 bp, Homo sapiens
  source 1..17278: mol_type = unassigned DNA
atcacttctccctgggctcccaggccctcctgcagcagcccccgcctgggccatgtcttcctcagatgaagagacgctcagtgagcggtcatgtcggagtgagcggtcttgtcggagtgagcgatcttacaggagcgagcggtcggggagcctgtctccctgtcccccaggggacaccttgccctggaacctgccactgcatgagcagaaaaagcggaaaagccaggattcggtgctggaccctgcagagcgtgctgtggtcagagtcgctgatgaacgggaccgggttcagaagaaaacgttcaccaagtgggtcaacaagcacttaatgaaggtccgcaagcacatcaatgatctttatgaagatctgcgggatggccataacctgatctctctgttggaggtcctctcaggcatcaaactgccccgggagaagggcaggatgcgttttcataggctgcagaatgtgcagattgccctggacttcctaaagcagcgacaggtgaaactagtgaatattcgcaatgatgacatcacagatggcaaccccaagttgaccctgggtctgatctggaccattattttgcatttccagatctctgacatctacattagtggagaatcaggggatatgtcagccaaggagaaactactcctgtggacccagaaggtgacagctggttacacaggaatcaaatgcaccaacttttcctcctgctggagtgatgggaagatgttcaatgcactcattcaccgataccgacccgatctagtagacatggagagggtgcaaatccaaagtaaccgagagaatctggaacaggcttttgaagtggcagaaagactgggggtcactcgcctgctggatgcagaagatgtggatgtgccatctccagatgaaaagtctgtaatcacttatgtgtcttcgatttatgatgccttccctaaagttcctgagggtggagaagggatcagtgctacggaagtggactccaggtggcaagaataccaaagccgagtggactccctcattccctggatcaaacagcatacaatactgatgtcagataaaacttttccccaaaaccctgttgaactaaaggcactttataaccaatatatacacttcaaagaaacagaaattctggccaaggagagagaaaaaggaagaattgaggaattatataaattactagaggtgtggattgaatttggccgaattaaactgcctcaaggttatcaccctaatgatgtggaagaagagtggggaaagctcatcatagagatgctggaacgagagaaatcacttcggccggctgtggagaggctggaattgctgctacagattgcaaacaaaatccagaatggtgctttgaactgtgaagaaaaactgacactagctaagaatacactgcaggctgatgctgctcacctggaatcaggacaaccggtacaatgtgagtcagatgtcattatgtacattcaggagtgtgaaggtctcatcaggcagctgcaggtggatctccagatcctgcgggatgagaattactaccagctagaagagctggcttttagggtcatgcgtcttcaggatgagctggtcaccttgcgtctagagtgtacaaacctgtaccggaagggtcatttcacttcacttgaattggttccaccctctactttaaccaccactcatctgaaagcagaacccttaaccaaggcaacccattcttcttctacctcctggttccgaaagcctatgactcgggctgaacttgtggccatcagctcctctgaagatgaaggcaatctccgatttgtgtatgaactactgtcttgggtagaagagatgcagatgaaactggagcgagcagagtggggcaatgacctgcctagtgtggagttgcagctagaaacacagcagcacatccatacgagtgtagaagagctgggctcaagtgtcaaggaggccaggttgtatgagggaaagatgtcccagaatttccataccagctatgctgaaactcttggaaagctggagacacagtattgtaaattgaaggaaacttctagcttccggatgaggcaccttcagagcctgcataaatttgtttccagagctacagctgagttgatctggttgaatgagaaggaggaggaggaactagcatatgactggagtgacaacaattccaatatctcagccaagagaaattacttctctgagttgacaatggaactggaggagaaacaggatgtgtttcgttctctacaagatacagcagaactactttcacttgagaaccacccagccaagcagacagtggaggcttacagtgctgctgtccagtcccagttgcagtggatgaagcagctgtgcctgtgtgttgagcagcatgtgaaagagaatactgcttattttcagttcttcagtgatgcacgagagctggagtcattcttgaggaacctccaagattccattaaacgaaaatattcctgtgaccacaacaccagcttatcccgccttgaagacctgctccaggactccatggatgaaaaggagcagcttatacagtccaagagttccgttgccagtctcgttgggagatcaaaaaccatcgttcagctaaaaccacgcagtccagaccatgtgttaaagaacaccatttctgtcaaggctgtctgtgactacaggcagatcgagattactatttgcaaaaatgatgaatgtgtgctagaagataattctcagcggaccaaatggaaagtgatcagccccacagggaacgaggcaatggtgccgtcagtctgcttcctcatccccccacccaataaggatgccattgagatggccagcagggtcgaacaatcttatcagaaggttatggccctttggcatcagctgcatgttaacaccaaaagccttatctcttggaactatctgcgtaaagaccttgaccttgtacagacctggaacctagaaaagcttcgatcctcagcaccaggggagtgccatcagattatgaagaaccttcaggcccactatgaagactttctgcaggatagtcgtgactctgtgctgttctcagtggctgatcgcttgcgcttggaagaggaggtggaagcttgtaaagcccgcttccagcacctgatgaagtccatggagaatgaggacaaagaggagactgtggccaagatgtacatttcagagttgaagaacatccggctacgcctggaggagtatgaacagagggtggtcaaacgaattcagtctctagccagctctaggactgacagagatgcctggcaggacaatgcattaaggattgcagagcaagagcacacccaggaggatttacagcaattgaggtcagacttggatgcagtttctatgaaatgtgacagctttctccatcagtctccatctagttcaagtgtcccaactctgcgctcagaactgaatctgctggtggagaagatggaccatgtctatggtctctctactgtatatctgaataagttaaagacagttgatgttatagtacgtagcatacaggatgctgaactcttggtcaaaggttatgagattaagctgagtcaagaagaagtagtactggcagatctctcagctctggaggcccattggtcgacattacggcactggcttagtgatgtgaaggacaagaattcagtgttttcagtcctggatgaggaaattgccaaggccaaggtagtggcagagcagatgagtcgtctgacaccagagcgaaatctggatttggagcgctatcaggaaaaaggctcccagctgcaggagcgttggcaccgagtcattgcccagctcgagattcgccaatctgagctagaaagtatccaggaagttctgggagattaccgagcctgccatggaactctcatcaagtggattgaggaaaccactgcccagcaggaaatgatgaagccaggccaggcagaggatagcagagtgctttcggagcagctcagccagcagacggccctatttgcagaaattgagagaaatcagacaaaactggatcaatgtcaaaaattttcccagcagtactctactattgtaaaggactatgaattgcaactgatgacatacaaggcctttgtggaatcgcagcagaaatcccctggcaagcgccgtcgcatgctttcctcttcagatgccatcactcaagagttcatggacttaaggactcgctacacggcattggtgactttaacaactcagcacgtgaaatacatcagtgatgcactccggcgtctggaggaggaggagaaagtggtagaagaggagaaacaagaacatgtggagaaggttaaagaacttttgggctgggtgtctaccctagcgaggaatacacaaggaaaagctacctcatccgagaccaaagaatcaacagacattgaaaaagctattttggaacagcaggttctgtcagaagagctgacaacaaagaaagaacaagtctctgaagctattaaaacatcacagatcttcttggccaagcatggtcataagctctcagaaaaagagaagaaacaaatatctgagcaattgaatgccctaaacaaggcttaccatgacctttgtgatggttctgcaaatcagcttcagcagcttcagagccagttggctcaccagacagaacaaaagaccctgcagaaacaacaaaatacctgtcaccagcaactggaggatctttgcagttgggtaggacaggcagaaagagcactggcaggccaccaaggcagaaccacccagcaggatctctctgctttgcagaagaaccaaagtgacttgaaggatttacaggatgacattcagaatcgtgccacctcatttgccactgttgtcaaggacattgaggggttcatggaagagaatcagaccaagctgagcccacgtgagttgacagctcttcgggaaaagcttcatcaggctaaggagcaatatgaggcgctccaggaagagacacgtgtggcccagaaggaactggaggaagcagtgacctccgccttacagcaggagactgaaaagagtaaagcagcaaaggaactggcagagaacaagaagaagatcgatgctctcctggattgggtaacttcagtaggatcatctggtggacagctgctgaccaaccttccaggaatggagcagctctcgggagctagcttggagaaaggagccttggacaccactgatggttacatgggggtgaatcaagccccagagaaactggacaagcaatgtgagatgatgaaggcccgtcaccaagaattgctgtcccagcagcaaaatttcattctggccacccagtcagctcaggccttcttggatcagcatggccacaatctcacacctgaggagcaacagatgctgcaacagaagctgggagagctaaaggaacaatactctacttccctggcccaatcagaggcagaactgaagcaggtgcagacacttcaggatgagttgcagaaatttctgcaggatcataaagagtttgaaagctggttggaacgatccgagaaagagctggagaacatgcataagggaggcagcagccccgagacccttccctccctgctaaagcggcaaggaagcttctcagaggatgtcatttcccacaaaggagacttgagatttgtgactatctcaggacagaaagtcttggacatggaaaacagttttaaggaaggcaaagaaccatcagaaattggaaacttagtaaaggacaagttgaaggatgcaacagaaagatacactgctctccactcaaagtgtacacgattaggatctcacctgaatatgctgttaggccagtatcatcaattccaaaacagtgctgacagcctgcaggcctggatgcaggcttgtgaggccaacgtggagaagctcctctcagatactgttgcctctgaccctggagttctccaggagcagcttgcaacaacaaagcagttgcaggaggaattggctgagcaccaagtacctgtggaaaaactccaaaaagtagctcgtgacataatggaaattgaaggggagccagccccagaccacaggcatgttcaagaaactacagattccatactcagccacttccaaagcctctcctatagcctggctgagcgatcttctctgctgcagaaagcaattgcccaatctcagagtgtccaggaaagcctggagagcctgttgcagtctattggggaagttgaacaaaacctggaagggaagcaggtgtcatcactctcatcaggagtcatccaggaagccttagccacaaatatgaaattgaagcaggacattgctcggcaaaagagcagcttggaggccacccgtgagatggtgacccgattcatggagacagcagacagtactacagcagcagtgctgcagggcaaactggcagaggtgagccagcggttcgaacagctctgtctacagcagcaagaaaaggagagctccctaaagaagcttctaccccaggcagagatgtttgaacacctctctggtaagctgcagcagttcatggaaaacaaaagtcggatgctggcctctggaaatcagccagatcaagatattacacatttcttccaacagatccaggagctcaatttggaaatggaagaccaacaggagaacctagatactcttgagcacctggtcactgaactgagctcttgtggctttgcgctggacttgtgccagcatcaggacagggtacagaatctaagaaaagacttcacagagctacagaagacagttaaagagagagagaaagatgcatcatcttgccaggaacagttggatgaattccggaagctggtcaggaccttccagaaatggttgaaagaaactgaagggagtattccacctacggaaacttctatgagtgctaaagagttagaaaagcagattgaacacctgaagagtctactagatgactgggcaagtaagggaactctggtggaagaaatcaattgcaaaggtacttctttagaaaatctcatcatggaaatcacagcacctgattcccaaggcaagacagatctgacggagatccagtgtgacatgtcagatgtaaacttgaagtatgagaaactagggggagtacttcatgaacgccaggaaagccttcaggctatcctcaacagaatggaggaggttcacaaggaggcaaactctgtgctgcagtggctggaatcaaaagaggaagtcctgaaatccatggatgccatgtcatctccaaccaagacagaaacagtgaaagcccaagctgaatctaacaaggccttcctggctgagttggaacagaattctccaaaaattcaaaaagtaaaggaagccctggctggattactggtgacatatcccaactcacaggaagcagaaaattggaagaaaattcaggaagaactcaattcccgatgggaaagggccactgaggttactgtggctcggcaaaggcagctagaggaatctgcaagtcatctggcctgcttccaggctgcagaatcccagctccggccgtggctgatggagaaagaactgatgatgggagtgctggggcccctgtctattgaccccaacatgttgaatgcacaaaagcaacaggtccagtttatgctaaaggaatttgaagcacgcaggcaacagcatgagcaactgaatgaggcagctcagggcatcctaacaggccctggagatgtctctctgtccaccagccaagtacagaaagaactccagagcatcaatcagaaatgggttgagctgactgacaaactcaactcccgttccagccaaattgaccaagctattgttaagagcacccagtaccaggaactgctccaggacttatcagagaaggtgagggcagttggacaacggctgagtgtccagtcagctatcagcacccaaccagaggctgtaaagcagcaattggaagagaccagtgaaattcgatctgacttggagcagttagaccacgaggttaaggaggctcagacactgtgcgatgaactctcagtgctcattggtgagcagtacctcaaggatgaactgaagaagcgtttggagacagttgccctgcctctccaaggtttagaagaccttgcagccgatcgcattaacagactccaggcagctcttgccagcacccagcagttccagcaaatgtttgatgagttgaggacctggttggatgataaacaaagccagcaagcaaaaaactgcccaatttctgcaaaattggagcggctacagtctcagctacaggagaatgaagagtttcagaaaagtcttaatcaacacagtggctcctatgaggtgattgtggctgaaggggaatctctacttctttctgtacctcctggagaagagaaaaggactctacaaaaccagttggttgagctcaaaaaccattgggaagagcttagtaaaaaaactgcagacagacaatccaggctcaaggattgtatgcagaaagctcagaaatatcagtggcatgtggaagaccttgtgccatggatagaagattgtaaagctaagatgtctgagttgcgagtcactctggatccagtgcagctagagtccagtctcctaagatcaaaggctatgctgaatgaggtggagaagcgccgctccctgctggaaatattgaatagtgctgctgacattctgatcaattcttcagaagcagatgaggatggaatccgggatgagaaggctgggatcaaccagaacatggatgctgttacagaagagctgcaggccaaaacagggtcactcgaagaaatgactcagaggctcagggagttccaggaaagctttaagaatattgaaaagaaggttgaaggagccaaacaccaacttgagatctttgatgctctgggttctcaagcctgtagcaacaagaacctggagaagctaagagctcaacaggaagtgctgcaggccctagagcctcaggtagactatctgaggaactttactcagggtctggtagaagatgccccagatggatctgatgcttctcaacttctccaccaagctgaggtcgcccagcaagagttcctcgaagttaagcaaagagtgaacagtggttgtgtgatgatggaaaacaagctggaggggattggccagtttcactgccgggtccgagagatgttctctcaattggcagacctggatgatgagctagatggcatgggtgctattggcagagacactgatagcctccagtcccaaatcgaggatgtccggctattccttaacaaaattcacgtcctcaaattagacatagaggcctctgaagcagagtgtcgacatatgctagaagaagaggggactctggatttgttaggtctcaaaagggagctagaagccctgaacaaacagtgtggcaaactgacagagagggggaaagctcgtcaggaacagctggaactgacactaggccgtgtagaggacttctacaggaaattgaaaggactcaatgacgcgaccacagcagcagaggaggcagaggccctccagtgggtagtggggaccgaagtggaaatcatcaaccaacaattagcagattttaaaatgtttcagaaagaacaagtggatcctcttcagatgaaattgcagcaggtgaatggacttggccagggattaattcagagtgcaggaaaagactgtgatgtacagggtttagaacatgacatggaagagatcaatgctcgatggaatacattgaataaaaaggtcgcacaaagaattgcacagctacaggaagctttgttgcattgtgggaagtttcaagatgccttggagccattgctcagctggttggcagataccgaggagctcatagccaatcagaaacctccatctgctgagtataaagtggtgaaagcacagatccaagaacagaagttgctccagcggctcctagatgatcgaaaggccacagtagacatgcttcaagcagaaggaggcagaatagcccagtcagcagagctggctgatagagagaaaatcactggacagctggagagtcttgaaagtagatggactgaactactcagtaaggcagcagccaggcaaaaacagctggaagacatcctggttctggccaaacagttccatgagacagctgagcctatttctgacttcttatctgtcacagagaaaaagcttgctaactcagaacctgttggcactcagactgccaaaatacagcagcagatcattcggcacaaggctttaaatgaagaaattgttaatagaaagaagaatgtagatcaagctattaaaaatggtcaggctcttctaaaacaaaccacaggtgaggaggtgttacttatccaggaaaaactagatggtataaagactcgttacgcagacatcacagttactagctccaaggccctcagaactttagagcaagcccggcagctggccaccaagttccagtctacttatgaggaactgaccgggtggctgagggaggtggaggaggagctggcaaccagtggaggacagtctcccacaggggaacagataccccagtttcagcagagacagaaggaattaaagaaggaggtcatggagcacaggctggtgttggacacagtgaatgaggtgagccgtgctctcttagagctggtgccctggagagccagagaagggctggataaacttgtgtccgatgctaacgagcagtacaaactagtcagtgacactattggacaaagggtggatgaaattgatgctgctattcagagatcacaacagtatgagcaagctgccgatgcagaactagcttgggttgctgaaacaaaacggaaactgatggctctgggtccaattcgcctggaacaggaccagaccacagctcagcttcaggtacagaaggctttctccattgacattattcgacacaaagattcaatggatgaactcttcagtcaccgtagtgaaatctttggcacatgtggggaggagcaaaaaactgtattacaggaaaagacagagtctctaatacagcaatatgaagccattagcctactcaattcagagcgttatgcccgcctagagcgggcccaggtcttagtaaaccagttttgggaaacttatgaagagctcagcccctggattgaggaaactcgggcactaatagcacagttaccctctccagccattgatcatgagcagctcaggcagcaacaagaggaaatgaggcaattaagggaatctattgctgaacacaaacctcatattgacaaactactaaagataggcccacaactaaaggaattaaaccctgaggaaggggaaatggtggaagaaaaataccagaaagcagaaaacatgtatgcccaaataaaggaggaggtgcgccagcgagccctggctctggatgaagccgtgtcccagtccacacaggtatcacagtttcatgataaaattgagcctatgttggagacactggagaatctttcctctcgcctgcgtatgccaccactgatccctgctgaagtagacaagatcagagagtgcatcagtgacaataagagtgccaccgtggagctagaaaaactgcagccatcctttgaggccttgaagcgccgtggagaggagcttattggacgatctcagggagcagacaaggatctggctgcaaaagaaatccaggataaattggatcaaatggtattcttctgggaggacatcaaagctcgggctgaagaacgagaaatcaaatttcttgatgtccttgaattagcagagaagttctggtatgacatggcagctctcctgaccaccatcaaagacacccaggatattgtccatgacttggaaagcccaggcattgatccttccatcatcaaacaacaggttgaagctgctgagactattaaggaagagacagatggtctgcatgaagagctggagtttattcggatccttggagcagatttgatttttgcctgtggagaaactgagaagcctgaagtgaggaagagcattgatgagatgaataatgcttgggagaacttaaacaaaacatggaaagagaggctagaaaaacttgaggatgctatgcaagctgctgtgcagtatcaggacactcttcaggctatgtttgactggctagataacactgtgattaaactctgcaccatgccccctgttggcactgacctcaatactgttaaagatcagttaaatgaaatgaaggagttcaaagtagaagtttaccaacagcaaattgagatggagaagcttaatcaccagggtgaactgatgttaaagaaagctactgatgagacggacagagacattatacgagaaccactgacagaactcaaacacctctgggagaacctgggtgagaaaattgcccaccgacagcacaaactagaaggggctctgttggcccttggtcagttccagcatgccttagaggaactaatgagttggctgactcataccgaagagttgttagatgctcagagaccaataagtggagacccaaaagtcattgaagttgagctcgcaaagcaccatgtcctaaaaaatgatgttttggctcatcaagccacagtggaaacagtcaacaaagctggcaatgagcttcttgaatccagtgctggagatgatgccagcagcttaaggagccgtttggaagccatgaaccaatgctgggagtcagtgttacagaaaacagaggagagggagcagcagcttcagtcaactctgcagcaggcccagggcttccacagtgaaattgaagatttcctcttggaacttactagaatggagagccagctttctgcatctaagcccacaggaggacttcctgaaactgctagggaacagcttgatacacatatggaactctattcccagctgaaagccaaggaagagacttataatcaactacttgacaagggcagactcatgcttctaagccgtgacgactctgggtctggctccaagacagaacagagtgtagcacttttggagcagaagtggcatgtggtcagcagtaagatggaagaaagaaagtcaaagctggaagaggccctcaacttggcaacagaattccagaattccctacaagaatttatcaactggctcactctagcagagcagagtttaaacatcgcttctccaccaagcctgattctaaatactgtcctttcccagatagaagagcacaaggtttttgctaatgaagtaaatgctcatcgagaccagatcattgagctggatcaaactgggaatcaattaaagttccttagccaaaagcaggatgttgttctgatcaagaatttgttggtgagcgtgcagtctcgatgggagaaggttgtccagcgatctattgaaagagggcgatcactagatgatgccaggaagcgggcaaaacaattccatgaagcttggaaaaaactgattgactggctagaagatgcagagagtcacctggactcagaactagagatatccaatgacccagacaaaattaaacttcagctttctaagcataaggagtttcagaagactcttggtggcaagcagcctgtgtatgataccacaattagaactggcagagcactgaaagaaaagactttgcttcccgaagatagtcagaaacttgacaatttcctaggagaagtcagagacaaatgggatactgtttgtggcaagtctgtggagcggcagcacaagttggaggaagccctgctcttttcgggtcagttcatggatgctttgcaggcattggttgactggttatacaaggtggagccacagctggctgaggaccagcccgtgcacggggaccttgacctcgtcatgaacctcatggatgcacacaaggttttccagaaggaactgggaaagcgaacaggaaccgttcaggtcctgaagcggtcaggccgagagctgattgagaatagtcgagatgacaccacttgggtaaaaggacagctccaggaactgagcactcgctgggacactgtctgtaaactctctgtttccaaacaaagccggcttgagcaggccttaaaacaagcggaagtgtttcgagacacagtccacatgctgttggagtggctttctgaagcagagcaaacgcttcgctttcggggagcacttcctgatgacacagaggccctgcagtctctcattgacacccataaggaattcatgaagaaagtagaagaaaagcgagtggacgttaactcagcagtagccatgggagaagtcatcctggctgtctgccaccccgattgcatcacaaccatcaaacactggatcaccatcatccgagctcgcttcgaggaggtcctgacatgggctaagcagcaccagcagcgtcttgaaacggccttgtcagaactggtggctaatgctgagctcctggaagaacttctggcatggatccagtgggctgagaccaccctcattcagcgggatcaggagccaatcccgcagaacattgaccgagttaaagcccttatcgctgagcatcagacatttatggaggagatgactcgcaaacagcctgacgtggaccgggtcaccaagacatacaaaaggaaaaacatagagcctactcacgcgcctttcatagagaaatcccgcagcggaggcaggaaatccctaagtcagccaacccctcctcccatgccaatcctttcacagtctgaagcaaaaaacccacggatcaaccagctttctgcccgctggcagcaggtgtggctgttagcactggagcggcaaaggaaactgaatgatgccttggatcggctggaggagttgaaagaatttgccaactttgactttgatgtctggaggaaaaagtatatgcgttggatgaatcacaaaaagtctcgagtgatggatttcttccggcgcattgataaggaccaggatgggaagataacacgtcaggagtttatcgatggcattttagcatccaagttccccaccaccaagttagagatgactgctgtggctgacattttcgaccgagatggggatggttacattgattattatgaatttgtggctgctcttcatcccaacaaggatgcgtatcgaccaacaaccgatgcagataaaatcgaagatgaggttacaagacaagtggctcagtgcaaatgtgcaaaaaggtttcaggtggagcagatcggagagaataaataccggtttggggattctcagcagttgcggctggtccgtattctgcgcagcaccgtgatggttcgcgttggtggaggatggatggccttggatgaatttttagtgaaaaatgatccctgccgagcacgaggtagaactaacattgaacttagagagaaattcatcctaccagagggagcatcccagggaatgacccccttccgctcacggggtcgaaggtccaaaccatcttcccgggcagcttcccctactcgttccagctccagtgctagtcagagtaaccacagctgtacatccatgccatcttctccagccaccccagccagtggaaccaaggttatcccatcatcaggtagcaagttgaaacgaccaacaccaacttttcattctagtcggacatcccttgctggtgataccagcaatagttcttccccggcctccacaggtgccaaaactaatcgggcagaccctaaaaagtctgccagtcgccctgggagtcgggctgggagtcgagccgggagtcgagccagcagccggcgaggaagtgacgcttctgactttgacctcttagagacgcagtctgcttgttccgacacttcagaaagcagcgctgcagggggccaaggcaactccaggagagggctaaacaaaccttccaaaatcccaaccatgtctaagaagaccaccactgcctcccccaggactccaggtcccaagcgataacactgtctaagcacccccaagccactatccactttgaatcctgctccatacattgggtgtatatttattctgaacgggagaagttatattgttaaaagtgtaaaagaataattgtgttatgaagctgccttattttttttctttttgtaagttactattttcatgtgaatatttatgtagataaaatttgcctcctggtaaccctgtaatggatggggcccagaaatgaaatatttgagaaaaacaagtgaaaaggtcaagatacaaatgtgtattaaaaaaaaaaaagcctattaatagggtttctgcgcggtgcagggttgtaaacctgctttatcttttaggattattcctaaatgcatcttctttataaacttgacttgctatctcagcaagataaattatattaaaaaaataagaatcctgcagtgtttaaggaactctttttttgtaaatcacggacacctcaattagcaagaactgaggggagggctttttccattgtttaatgttttgtgatttttagctaaagagagggaacctcatctaagtaacatttgcacatgatacagcaaaaggagttcattgcaatactgtctttggatattgtttcagtactgggtgtttaaaggacaaatagctgctagaattcaggggtaaatgtaagtgttcagaaaacgtcagaacatttggggttttaaactgatttgttgctccctatccagcctagacaccagtaactcttgtgttcaccaggacccagacccttggcaagggataggctcgttggtgacattgtgaatttcagatttgttttatccactttttttgctatttatttaaatggtcgatcaacttcccacaaactgaggaatgaattccacgagcctgttctgaaaatgtggacgtaagacaaacacgtgctcgtcctttaatggagttcaccagcacacttgttaaccagtcctgtttgctttcgtctttttttgtgcgtaataaagtcaactgaccaagtgaccatgaaaaggggctgtctggggctcctgttttttagctgctgttcttcagctccgaccatgttgctgtgtgattatctcaattggttttaattgaggcagaaactgaagctctaccaatgaactgtttagaaacaagacacacttttgtattaaaattgcttgcagtaacaaatattttgtatttcctgattttcttttcaactattaccttatctataaatgttaccctggggtataatcatgttgtaggtacttaaatgcattccgcaaatcaaaatatcttgatggataaattatagagctt

SEQ ID NO: 18105 - DNA, 2294 bp, Homo sapiens
  source 1..2294: mol_type = unassigned DNA
aggatgggaagataacacgtcaggagtttatcgatggcattttagcatccaagttccccaccaccaagttagagatgactgctgtggctgacattttcgaccgagatggggatggttacattgattattatgaatttgtggctgctcttcatcccaacaaggatgcgtatcgaccaacaaccgatgcagataaaatcgaagatgaggttacaagacaagtggctcagtgcaaatgtgcaaaaaggtttcaggtggagcagatcggagagaataaataccggtttggggattctcagcagttgcggctggtccgtattctgcgcagcaccgtgatggttcgcgttggtggaggatggatggccttggatgaatttttagtgaaaaatgatccctgccgagcacgaggtagaactaacattgaacttagagagaaattcatcctaccagagggagcatcccagggaatgacccccttccgctcacggggtcgaaggtccaaaccatcttcccgggcagcttcccctactcgttccagctccagtgctagtcagagtaaccacagctgtacatccatgccatcttctccagccaccccagccagtggaaccaagacttcacttcagttctctcgctgttatgacaaaccctggttggtaaacagtaaagctggcacccctatcagggacagccattctcctgacctccagctgcccacccccgaggttatcccatcatcaggtagcaagttgaaacgaccaacaccaacttttcattctagtcggacatcccttgctggtgataccagcaatagttcttccccggcctccacaggtgccaaaactaatcgggcagaccctaaaaagtctgccagtcgccctgggagtcgggctgggagtcgagccgggagtcgagccagcagccggcgaggaagtgacgcttctgactttgacctcttagagacgcagtctgcttgttccgacacttcagaaagcagcgctgcagggggccaaggcaactccaggagagggctaaacaaaccttccaaaatcccaaccatgtctaagaagaccaccactgcctcccccaggactccaggtcccaagcgataacactgtctaagcacccccaagccactatccactttgaatcctgctccatacattgggtgtatatttattctgaacgggagaagttatattgttaaaagtgtaaaagaataattgtgttatgaagctgccttattttttttctttttgtaagttactattttcatgtgaatatttatgtagataaaatttgcctcctggtaaccctgtaatggatggggcccagaaatgaaatatttgagaaaaacaagtgaaaaggtcaagatacaaatgtgtattaaaaaaaaaaaagcctattaatagggtttctgcgcggtgcagggttgtaaacctgctttatcttttaggattattcctaaatgcatcttctttataaacttgacttgctatctcagcaagataaattatattaaaaaaataagaatcctgcagtgtttaaggaactctttttttgtaaatcacggacacctcaattagcaagaactgaggggagggctttttccattgtttaatgttttgtgatttttagctaaagagagggaacctcatctaagtaacatttgcacatgatacagcaaaaggagttcattgcaatactgtctttggatattgtttcagtactgggtgtttaaaggacaaatagctgctagaattcaggggtaaatgtaagtgttcagaaaacgtcagaacatttggggttttaaactgatttgttgctccctatccagcctagacaccagtaactcttgtgttcaccaggacccagacccttggcaagggataggctcgttggtgacattgtgaatttcagatttgttttatccactttttttgctatttatttaaatggtcgatcaacttcccacaaactgaggaatgaattccacgagcctgttctgaaaatgtggacgtaagacaaacacgtgctcgtcctttaatggagttcaccagcacacttgttaaccagtcctgtttgctttcgtctttttttgtgcgtaataaagtcaactgaccaagtgaccatgaaaaggggctgtctggggctcctgttttttagctgctgttcttcagctccgaccatgttgctgtgtgattatctcaattggttttaattgaggcagaaactgaagctctaccaatgaactgtttagaaacaagacacacttttgtattaaaattgcttgcagt

SEQ ID NO: 18106 - DNA, 17724 bp, Homo sapiens
  source 1..17724: mol_type = unassigned DNA
gatgaagaaactgagtctcagagaggtgaagtgacttgcccaagatcacagcaattatcacttctccctgggctcccaggccctcctgcagcagcccccgcctgggccatgtcttcctcagatgaagagacgctcagtgagcggtcatgtcggagtgagcggtcttgtcggagtgagcgatcttacaggagcgagcggtcggggagcctgtctccctgtcccccaggggacaccttgccctggaacctgccactgcatgagcagaaaaagcggaaaagccaggattcggtgctggaccctgcagagcgtgctgtggtcagagtcgctgatgaacgggaccgggttcagaagaaaacgttcaccaagtgggtcaacaagcacttaatgaaggtccgcaagcacatcaatgatctttatgaagatctgcgggatggccataacctgatctctctgttggaggtcctctcaggcatcaaactgccccgggagaagggcaggatgcgttttcataggctgcagaatgtgcagattgccctggacttcctaaagcagcgacaggtgaaactagtgaatattcgcaatgatgacatcacagatggcaaccccaagttgaccctgggtctgatctggaccattattttgcatttccagatctctgacatctacattagtggagaatcaggggatatgtcagccaaggagaaactactcctgtggacccagaaggtgacagctggttacacaggaatcaaatgcaccaacttttcctcctgctggagtgatgggaagatgttcaatgcactcattcaccgataccgacccgatctagtagacatggagagggtgcaaatccaaagtaaccgagagaatctggaacaggcttttgaagtggcagaaagactgggggtcactcgcctgctggatgcagaagatgtggatgtgccatctccagatgaaaagtctgtaatcacttatgtgtcttcgatttatgatgccttccctaaagttcctgagggtggagaagggatcagtgctacggaagtggactccaggtggcaagaataccaaagccgagtggactccctcattccctggatcaaacagcatacaatactgatgtcagataaaacttttccccaaaaccctgttgaactaaaggcactttataaccaatatatacacttcaaagaaacagaaattctggccaaggagagagaaaaaggaagaattgaggaattatataaattactagaggtgtggattgaatttggccgaattaaactgcctcaaggttatcaccctaatgatgtggaagaagagtggggaaagctcatcatagagatgctggaacgagagaaatcacttcggccggctgtggagaggctggaattgctgctacagattgcaaacaaaatccagaatggtgctttgaactgtgaagaaaaactgacactagctaagaatacactgcaggctgatgctgctcacctggaatcaggacaaccggtacaatgtgagtcagatgtcattatgtacattcaggagtgtgaaggtctcatcaggcagctgcaggtggatctccagatcctgcgggatgagaattactaccagctagaagagctggcttttagggtcatgcgtcttcaggatgagctggtcaccttgcgtctagagtgtacaaacctgtaccggaagggtcatttcacttcacttgaattggttccaccctctactttaaccaccactcatctgaaagcagaacccttaaccaaggcaacccattcttcttctacctcctggttccgaaagcctatgactcgggctgaacttgtggccatcagctcctctgaagatgaaggcaatctccgatttgtgtatgaactactgtcttgggtagaagagatgcagatgaaactggagcgagcagagtggggcaatgacctgcctagtgtggagttgcagctagaaacacagcagcacatccatacgagtgtagaagagctgggctcaagtgtcaaggaggccaggttgtatgagggaaagatgtcccagaatttccataccagctatgctgaaactcttggaaagctggagacacagtattgtaaattgaaggaaacttctagcttccggatgaggcaccttcagagcctgcataaatttgtttccagagctacagctgagttgatctggttgaatgagaaggaggaggaggaactagcatatgactggagtgacaacaattccaatatctcagccaagagaaattacttctctgagttgacaatggaactggaggagaaacaggatgtgtttcgttctctacaagatacagcagaactactttcacttgagaaccacccagccaagcagacagtggaggcttacagtgctgctgtccagtcccagttgcagtggatgaagcagctgtgcctgtgtgttgagcagcatgtgaaagagaatactgcttattttcagttcttcagtgatgcacgagagctggagtcattcttgaggaacctccaagattccattaaacgaaaatattcctgtgaccacaacaccagcttatcccgccttgaagacctgctccaggactccatggatgaaaaggagcagcttatacagtccaagagttccgttgccagtctcgttgggagatcaaaaaccatcgttcagctaaaaccacgcagtccagaccatgtgttaaagaacaccatttctgtcaaggctgtctgtgactacaggcagatcgagattactatttgcaaaaatgatgaatgtgtgctagaagataattctcagcggaccaaatggaaagtgatcagccccacagggaacgaggcaatggtgccgtcagtctgcttcctcatccccccacccaataaggatgccattgagatggccagcagggtcgaacaatcttatcagaaggttatggccctttggcatcagctgcatgttaacaccaaaagccttatctcttggaactatctgcgtaaagaccttgaccttgtacagacctggaacctagaaaagcttcgatcctcagcaccaggggagtgccatcagattatgaagaaccttcaggcccactatgaagactttctgcaggatagtcgtgactctgtgctgttctcagtggctgatcgcttgcgcttggaagaggaggtggaagcttgtaaagcccgcttccagcacctgatgaagtccatggagaatgaggacaaagaggagactgtggccaagatgtacatttcagagttgaagaacatccggctacgcctggaggagtatgaacagagggtggtcaaacgaattcagtctctagccagctctaggactgacagagatgcctggcaggacaatgcattaaggattgcagagcaagagcacacccaggaggatttacagcaattgaggtcagacttggatgcagtttctatgaaatgtgacagctttctccatcagtctccatctagttcaagtgtcccaactctgcgctcagaactgaatctgctggtggagaagatggaccatgtctatggtctctctactgtatatctgaataagttaaagacagttgatgttatagtacgtagcatacaggatgctgaactcttggtcaaaggttatgagattaagctgagtcaagaagaagtagtactggcagatctctcagctctggaggcccattggtcgacattacggcactggcttagtgatgtgaaggacaagaattcagtgttttcagtcctggatgaggaaattgccaaggccaaggtagtggcagagcagatgagtcgtctgacaccagagcgaaatctggatttggagcgctatcaggaaaaaggctcccagctgcaggagcgttggcaccgagtcattgcccagctcgagattcgccaatctgagctagaaagtatccaggaagttctgggagattaccgagcctgccatggaactctcatcaagtggattgaggaaaccactgcccagcaggaaatgatgaagccaggccaggcagaggatagcagagtgctttcggagcagctcagccagcagacggccctatttgcagaaattgagagaaatcagacaaaactggatcaatgtcaaaaattttcccagcagtactctactattgtaaaggactatgaattgcaactgatgacatacaaggcctttgtggaatcgcagcagaaatcccctggcaagcgccgtcgcatgctttcctcttcagatgccatcactcaagagttcatggacttaaggactcgctacacggcattggtgactttaacaactcagcacgtgaaatacatcagtgatgcactccggcgtctggaggaggaggagaaagtggtagaagaggagaaacaagaacatgtggagaaggttaaagaacttttgggctgggtgtctaccctagcgaggaatacacaaggaaaagctacctcatccgagaccaaagaatcaacagacattgaaaaagctattttggaacagcaggttctgtcagaagagctgacaacaaagaaagaacaagtctctgaagctattaaaacatcacagatcttcttggccaagcatggtcataagctctcagaaaaagagaagaaacaaatatctgagcaattgaatgccctaaacaaggcttaccatgacctttgtgatggttctgcaaatcagcttcagcagcttcagagccagttggctcaccagacagaacaaaagaccctgcagaaacaacaaaatacctgtcaccagcaactggaggatctttgcagttgggtaggacaggcagaaagagcactggcaggccaccaaggcagaaccacccagcaggatctctctgctttgcagaagaaccaaagtgacttgaaggatttacaggatgacattcagaatcgtgccacctcatttgccactgttgtcaaggacattgaggggttcatggaagagaatcagaccaagctgagcccacgtgagttgacagctcttcgggaaaagcttcatcaggctaaggagcaatatgaggcgctccaggaagagacacgtgtggcccagaaggaactggaggaagcagtgacctccgccttacagcaggagactgaaaagagtaaagcagcaaaggaactggcagagaacaagaagaagatcgatgctctcctggattgggtaacttcagtaggatcatctggtggacagctgctgaccaaccttccaggaatggagcagctctcgggagctagcttggagaaaggagccttggacaccactgatggttacatgggggtgaatcaagccccagagaaactggacaagcaatgtgagatgatgaaggcccgtcaccaagaattgctgtcccagcagcaaaatttcattctggccacccagtcagctcaggccttcttggatcagcatggccacaatctcacacctgaggagcaacagatgctgcaacagaagctgggagagctaaaggaacaatactctacttccctggcccaatcagaggcagaactgaagcaggtgcagacacttcaggatgagttgcagaaatttctgcaggatcataaagagtttgaaagctggttggaacgatccgagaaagagctggagaacatgcataagggaggcagcagccccgagacccttccctccctgctaaagcggcaaggaagcttctcagaggatgtcatttcccacaaaggagacttgagatttgtgactatctcaggacagaaagtcttggacatggaaaacagttttaaggaaggcaaagaaccatcagaaattggaaacttagtaaaggacaagttgaaggatgcaacagaaagatacactgctctccactcaaagtgtacacgattaggatctcacctgaatatgctgttaggccagtatcatcaattccaaaacagtgctgacagcctgcaggcctggatgcaggcttgtgaggccaacgtggagaagctcctctcagatactgttgcctctgaccctggagttctccaggagcagcttgcaacaacaaagcagttgcaggaggaattggctgagcaccaagtacctgtggaaaaactccaaaaagtagctcgtgacataatggaaattgaaggggagccagccccagaccacaggcatgttcaagaaactacagattccatactcagccacttccaaagcctctcctatagcctggctgagcgatcttctctgctgcagaaagcaattgcccaatctcagagtgtccaggaaagcctggagagcctgttgcagtctattggggaagttgaacaaaacctggaagggaagcaggtgtcatcactctcatcaggagtcatccaggaagccttagccacaaatatgaaattgaagcaggacattgctcggcaaaagagcagcttggaggccacccgtgagatggtgacccgattcatggagacagcagacagtactacagcagcagtgctgcagggcaaactggcagaggtgagccagcggttcgaacagctctgtctacagcagcaagaaaaggagagctccctaaagaagcttctaccccaggcagagatgtttgaacacctctctggtaagctgcagcagttcatggaaaacaaaagtcggatgctggcctctggaaatcagccagatcaagatattacacatttcttccaacagatccaggagctcaatttggaaatggaagaccaacaggagaacctagatactcttgagcacctggtcactgaactgagctcttgtggctttgcgctggacttgtgccagcatcaggacagggtacagaatctaagaaaagacttcacagagctacagaagacagttaaagagagagagaaagatgcatcatcttgccaggaacagttggatgaattccggaagctggtcaggaccttccagaaatggttgaaagaaactgaagggagtattccacctacggaaacttctatgagtgctaaagagttagaaaagcagattgaacacctgaagagtctactagatgactgggcaagtaagggaactctggtggaagaaatcaattgcaaaggtacttctttagaaaatctcatcatggaaatcacagcacctgattcccaaggcaagacaggttccatactgccctctgtaggaagctctgtaggcagtgtaaacggataccacacctgcaaagatctgacggagatccagtgtgacatgtcagatgtaaacttgaagtatgagaaactagggggagtacttcatgaacgccaggaaagccttcaggctatcctcaacagaatggaggaggttcacaaggaggcaaactctgtgctgcagtggctggaatcaaaagaggaagtcctgaaatccatggatgccatgtcatctccaaccaagacagaaacagtgaaagcccaagctgaatctaacaaggccttcctggctgagttggaacagaattctccaaaaattcaaaaagtaaaggaagccctggctggattactggtgacatatcccaactcacaggaagcagaaaattggaagaaaattcaggaagaactcaattcccgatgggaaagggccactgaggttactgtggctcggcaaaggcagctagaggaatctgcaagtcatctggcctgcttccaggctgcagaatcccagctccggccgtggctgatggagaaagaactgatgatgggagtgctggggcccctgtctattgaccccaacatgttgaatgcacaaaagcaacaggtccagtttatgctaaaggaatttgaagcacgcaggcaacagcatgagcaactgaatgaggcagctcagggcatcctaacaggccctggagatgtctctctgtccaccagccaagtacagaaagaactccagagcatcaatcagaaatgggttgagctgactgacaaactcaactcccgttccagccaaattgaccaagctattgttaagagcacccagtaccaggaactgctccaggacttatcagagaaggtgagggcagttggacaacggctgagtgtccagtcagctatcagcacccaaccagaggctgtaaagcagcaattggaagagaccagtgaaattcgatctgacttggagcagttagaccacgaggttaaggaggctcagacactgtgcgatgaactctcagtgctcattggtgagcagtacctcaaggatgaactgaagaagcgtttggagacagttgccctgcctctccaaggtttagaagaccttgcagccgatcgcattaacagactccaggcagctcttgccagcacccagcagttccagcaaatgtttgatgagttgaggacctggttggatgataaacaaagccagcaagcaaaaaactgcccaatttctgcaaaattggagcggctacagtctcagctacaggagaatgaagagtttcagaaaagtcttaatcaacacagtggctcctatgaggtgattgtggctgaaggggaatctctacttctttctgtacctcctggagaagagaaaaggactctacaaaaccagttggttgagctcaaaaaccattgggaagagcttagtaaaaaaactgcagacagacaatccaggctcaaggattgtatgcagaaagctcagaaatatcagtggcatgtggaagaccttgtgccatggatagaagattgtaaagctaagatgtctgagttgcgagtcactctggatccagtgcagctagagtccagtctcctaagatcaaaggctatgctgaatgaggtggagaagcgccgctccctgctggaaatattgaatagtgctgctgacattctgatcaattcttcagaagcagatgaggatggaatccgggatgagaaggctgggatcaaccagaacatggatgctgttacagaagagctgcaggccaaaacagggtcactcgaagaaatgactcagaggctcagggagttccaggaaagctttaagaatattgaaaagaaggttgaaggagccaaacaccaacttgagatctttgatgctctgggttctcaagcctgtagcaacaagaacctggagaagctaagagctcaacaggaagtgctgcaggccctagagcctcaggtagactatctgaggaactttactcagggtctggtagaagatgccccagatggatctgatgcttctcaacttctccaccaagctgaggtcgcccagcaagagttcctcgaagttaagcaaagagtgaacagtggttgtgtgatgatggaaaacaagctggaggggattggccagtttcactgccgggtccgagagatgttctctcaattggcagacctggatgatgagctagatggcatgggtgctattggcagagacactgatagcctccagtcccaaatcgaggatgtccggctattccttaacaaaattcacgtcctcaaattagacatagaggcctctgaagcagagtgtcgacatatgctagaagaagaggggactctggatttgttaggtctcaaaagggagctagaagccctgaacaaacagtgtggcaaactgacagagagggggaaagctcgtcaggaacagctggaactgacactaggccgtgtagaggacttctacaggaaattgaaaggactcaatgacgcgaccacagcagcagaggaggcagaggccctccagtgggtagtggggaccgaagtggaaatcatcaaccaacaattagcagattttaaaatgtttcagaaagaacaagtggatcctcttcagatgaaattgcagcaggtgaatggacttggccagggattaattcagagtgcaggaaaagactgtgatgtacagggtttagaacatgacatggaagagatcaatgctcgatggaatacattgaataaaaaggtcgcacaaagaattgcacagctacaggaagctttgttgcattgtgggaagtttcaagatgccttggagccattgctcagctggttggcagataccgaggagctcatagccaatcagaaacctccatctgctgagtataaagtggtgaaagcacagatccaagaacagaagttgctccagcggctcctagatgatcgaaaggccacagtagacatgcttcaagcagaaggaggcagaatagcccagtcagcagagctggctgatagagagaaaatcactggacagctggagagtcttgaaagtagatggactgaactactcagtaaggcagcagccaggcaaaaacagctggaagacatcctggttctggccaaacagttccatgagacagctgagcctatttctgacttcttatctgtcacagagaaaaagcttgctaactcagaacctgttggcactcagactgccaaaatacagcagcagatcattcggcacaaggctctggaagaagacatagaaaaccatgcaacagatgtgcaccaggcagtcaaaattgggcagtccctctcctccctgacatctcctgcagaacagggtgtgctgtcagaaaagatagactcattgcaggcccgatacagtgaaattcaagaccgctgttgtcggaaggcagccctacttgaccaagctctgtctaatgctaggctgtttggggaggatgaggtggaggtgctcaactggctggctgaggttgaggacaagctcagttcagtgttcgtaaaggatttcaaacaggatgtcctgcacaggcagcatgctgaccacctggctttaaatgaagaaattgttaatagaaagaagaatgtagatcaagctattaaaaatggtcaggctcttctaaaacaaaccacaggtgaggaggtgttacttatccaggaaaaactagatggtataaagactcgttacgcagacatcacagttactagctccaaggccctcagaactttagagcaagcccggcagctggccaccaagttccagtctacttatgaggaactgaccgggtggctgagggaggtggaggaggagctggcaaccagtggaggacagtctcccacaggggaacagataccccagtttcagcagagacagaaggaattaaagaaggaggtcatggagcacaggctggtgttggacacagtgaatgaggtgagccgtgctctcttagagctggtgccctggagagccagagaagggctggataaacttgtgtccgatgctaacgagcagtacaaactagtcagtgacactattggacaaagggtggatgaaattgatgctgctattcagagatcacaacagtatgagcaagctgccgatgcagaactagcttgggttgctgaaacaaaacggaaactgatggctctgggtccaattcgcctggaacaggaccagaccacagctcagcttcaggtacagaaggctttctccattgacattattcgacacaaagattcaatggatgaactcttcagtcaccgtagtgaaatctttggcacatgtggggaggagcaaaaaactgtattacaggaaaagacagagtctctaatacagcaatatgaagccattagcctactcaattcagagcgttatgcccgcctagagcgggcccaggtcttagtaaaccagttttgggaaacttatgaagagctcagcccctggattgaggaaactcgggcactaatagcacagttaccctctccagccattgatcatgagcagctcaggcagcaacaagaggaaatgaggcaattaagggaatctattgctgaacacaaacctcatattgacaaactactaaagataggcccacaactaaaggaattaaaccctgaggaaggggaaatggtggaagaaaaataccagaaagcagaaaacatgtatgcccaaataaaggaggaggtgcgccagcgagccctggctctggatgaagccgtgtcccagtccacacagattacagagtttcatgataaaattgagcctatgttggagacactggagaatctttcctctcgcctgcgtatgccaccactgatccctgctgaagtagacaagatcagagagtgcatcagtgacaataagagtgccaccgtggagctagaaaaactgcagccatcctttgaggccttgaagcgccgtggagaggagcttattggacgatctcagggagcagacaaggatctggctgcaaaagaaatccaggataaattggatcaaatggtattcttctgggaggacatcaaagctcgggctgaagaacgagaaatcaaatttcttgatgtccttgaattagcagagaagttctggtatgacatggcagctctcctgaccaccatcaaagacacccaggatattgtccatgacttggaaagcccaggcattgatccttccatcatcaaacaacaggttgaagctgctgagactattaaggaagagacagatggtctgcatgaagagctggagtttattcggatccttggagcagatttgatttttgcctgtggagaaactgagaagcctgaagtgaggaagagcattgatgagatgaataatgcttgggagaacttaaacaaaacatggaaagagaggctagaaaaacttgaggatgctatgcaagctgctgtgcagtatcaggacactcttcaggctatgtttgactggctagataacactgtgattaaactctgcaccatgccccctgttggcactgacctcaatactgttaaagatcagttaaatgaaatgaaggagttcaaagtagaagtttaccaacagcaaattgagatggagaagcttaatcaccagggtgaactgatgttaaagaaagctactgatgagacggacagagacattatacgagaaccactgacagaactcaaacacctctgggagaacctgggtgagaaaattgcccaccgacagcacaaactagaaggggctctgttggcccttggtcagttccagcatgccttagaggaactaatgagttggctgactcataccgaagagttgttagatgctcagagaccaataagtggagacccaaaagtcattgaagttgagctcgcaaagcaccatgtcctaaaaaatgatgttttggctcatcaagccacagtggaaacagtcaacaaagctggcaatgagcttcttgaatccagtgctggagatgatgccagcagcttaaggagccgtttggaagccatgaaccaatgctgggagtcagtgttacagaaaacagaggagagggagcagcagcttcagtcaactctgcagcaggcccagggcttccacagtgaaattgaagatttcctcttggaacttactagaatggagagccagctttctgcatctaagcccacaggaggacttcctgaaactgctagggaacagcttgatacacatatggaactctattcccagctgaaagccaaggaagagacttataatcaactacttgacaagggcagactcatgcttctaagccgtgacgactctgggtctggctccaagacagaacagagtgtagcacttttggagcagaagtggcatgtggtcagcagtaagatggaagaaagaaagtcaaagctggaagaggccctcaacttggcaacagaattccagaattccctacaagaatttatcaactggctcactctagcagagcagagtttaaacatcgcttctccaccaagcctgattctaaatactgtcctttcccagatagaagagcacaaggtttttgctaatgaagtaaatgctcatcgagaccagatcattgagctggatcaaactgggaatcaattaaagttccttagccaaaagcaggatgttgttctgatcaagaatttgttggtgagcgtgcagtctcgatgggagaaggttgtccagcgatctattgaaagagggcgatcactagatgatgccaggaagcgggcaaaacaattccatgaagcttggaaaaaactgattgactggctagaagatgcagagagtcacctggactcagaactagagatatccaatgacccagacaaaattaaacttcagctttctaagcataaggagtttcagaagactcttggtggcaagcagcctgtgtatgataccacaattagaactggcagagcactgaaagaaaagactttgcttcccgaagatagtcagaaacttgacaatttcctaggagaagtcagagacaaatgggatactgtttgtggcaagtctgtggagcggcagcacaagttggaggaagccctgctcttttcgggtcagttcatggatgctttgcaggcattggttgactggttatacaaggtggagccacagctggctgaggaccagcccgtgcacggggaccttgacctcgtcatgaacctcatggatgcacacaaggttttccagaaggaactgggaaagcgaacaggaaccgttcaggtcctgaagcggtcaggccgagagctgattgagaatagtcgagatgacaccacttgggtaaaaggacagctccaggaactgagcactcgctgggacactgtctgtaaactctctgtttccaaacaaagccggcttgagcaggccttaaaacaagcggaagtgtttcgagacacagtccacatgctgttggagtggctttctgaagcagagcaaacgcttcgctttcggggagcacttcctgatgacacagaggccctgcagtctctcattgacacccataaggaattcatgaagaaagtagaagaaaagcgagtggacgttaactcagcagtagccatgggagaagtcatcctggctgtctgccaccccgattgcatcacaaccatcaaacactggatcaccatcatccgagctcgcttcgaggaggtcctgacatgggctaagcagcaccagcagcgtcttgaaacggccttgtcagaactggtggctaatgctgagctcctggaagaacttctggcatggatccagtgggctgagaccaccctcattcagcgggatcaggagccaatcccgcagaacattgaccgagttaaagcccttatcgctgagcatcagacatttatggaggagatgactcgcaaacagcctgacgtggaccgggtcaccaagacatacaaaaggaaaaacatagagcctactcacgcgcctttcatagagaaatcccgcagcggaggcaggaaatccctaagtcagccaacccctcctcccatgccaatcctttcacagtctgaagcaaaaaacccacggatcaaccagctttctgcccgctggcagcaggtgtggctgttagcactggagcggcaaaggaaactgaatgatgccttggatcggctggaggagttgaaagaatttgccaactttgactttgatgtctggaggaaaaagtatatgcgttggatgaatcacaaaaagtctcgagtgatggatttcttccggcgcattgataaggaccaggatgggaagataacacgtcaggagtttatcgatggcattttagcatccaagttccccaccaccaagttagagatgactgctgtggctgacattttcgaccgagatggggatggttacattgattattatgaatttgtggctgctcttcatcccaacaaggatgcgtatcgaccaacaaccgatgcagataaaatcgaagatgaggttacaagacaagtggctcagtgcaaatgtgcaaaaaggtttcaggtggagcagatcggagagaataaataccggtttggggattctcagcagttgcggctggtccgtattctgcgcagcaccgtgatggttcgcgttggtggaggatggatggccttggatgaatttttagtgaaaaatgatccctgccgagcacgaggtagaactaacattgaacttagagagaaattcatcctaccagagggagcatcccagggaatgacccccttccgctcacggggtcgaaggtccaaaccatcttcccgggcagcttcccctactcgttccagctccagtgctagtcagagtaaccacagctgtacatccatgccatcttctccagccaccccagccagtggaaccaaggttatcccatcatcaggtagcaagttgaaacgaccaacaccaacttttcattctagtcggacatcccttgctggtgataccagcaatagttcttccccggcctccacaggtgccaaaactaatcgggcagaccctaaaaagtctgccagtcgccctgggagtcgggctgggagtcgagccgggagtcgagccagcagccggcgaggaagtgacgcttctgactttgacctcttagagacgcagtctgcttgttccgacacttcagaaagcagcgctgcagggggccaaggcaactccaggagagggctaaacaaaccttccaaaatcccaaccatgtctaagaagaccaccactgcctcccccaggactccaggtcccaagcgataacactgtctaagcacccccaagccactatccactttgaatcctgctccatacattgggtgtatatttattctgaacgggagaagttatattgttaaaagtgtaaaagaataattgtgttatgaagctgccttattttttttctttttgtaagttactattttcatgtgaatatttatgtagataaaatttgcctcctggtaaccctgtaatggatggggcccagaaatgaaatatttgagaaaaacaagtgaaaaggtcaagatacaaatgtgtattaaaaaaaaaaaagcctattaatagggtttctgcgcggtgcagggttgtaaacctgctttatcttttaggattattcctaaatgcatcttctttataaacttgacttgctatctcagcaagataaattatattaaaaaaataagaatcctgcagtgtttaaggaactctttttttgtaaatcacggacacctcaattagcaagaactgaggggagggctttttccattgtttaatgttttgtgatttttagctaaagagagggaacctcatctaagtaacatttgcacatgatacagcaaaaggagttcattgcaatactgtctttggatattgtttcagtactgggtgtttaaaggacaaatagctgctagaattcaggggtaaatgtaagtgttcagaaaacgtcagaacatttggggttttaaactgatttgttgctccctatccagcctagacaccagtaactcttgtgttcaccaggacccagacccttggcaagggataggctcgttggtgacattgtgaatttcagatttgttttatccactttttttgctatttatttaaatggtcgatcaacttcccacaaactgaggaatgaattccacgagcctgttctgaaaatgtggacgtaagacaaacacgtgctcgtcctttaatggagttcaccagcacacttgttaaccagtcctgtttgctttcgtctttttttgtgcgtaataaagtcaactgaccaagtgaccatgaaaaggggctgtctggggctcctgttttttagctgctgttcttcagctccgaccatgttgctgtgtgattatctcaattggttttaattgaggcagaaactgaagctctaccaatgaactgtttagaaacaagacacacttttgtattaaaattgcttgcagtaacaaatattttgtatttcctgattttcttttcaactattaccttatctataaatgttaccctggggtataatcatgttgtaggtacttaaatgcattccgcaaatcaaaatatcttgatggataaattatagagctt

SEQ ID NO: 18107 - DNA, 10258 bp, Homo sapiens
  source 1..10258: mol_type = unassigned DNA
tgcagactcttccctgaagctgccggctgaggccggagctgccgcctccatgagaggcttcctcctacaccccagggccagaggaccctttgccaccagagtgagatcctagagaccatcatcctggtaaatcccagtgcagacagcatcagctctgaggttcatcatcttcttagcagctcatcagcttataaactactaatcttgagtgggcaaagtttagagcctgggggagacctcatcctacagagtggcacctactcatatgaaaactttgcccaggtccttcacaaccccgagatttcccaattgctcagcaatagagaccctgggatacaggccttccttaccgtgtcctgcttaggggaaggtgattggagccacctgggattatccagttcccaagagaccctgcacctccggctaaaccctgagcccactctgcccaccatggacggcgtggctgagttctccgagtatgtctctgagactgtggacgtgccatccccatttgacctactagagccccccacctcagggggcttcctcaagctctccaagccttgttgctacatcttcccaggtggtcgtggggactctgccctctttgctgtcaatggtttcaacatcctggtggatggtggctctgatcgcaagtcctgtttttggaagctggtacggcacttggaccgcattgactcggtgctactcacacacattggggcagacaacctgccaggcatcaatggactactgcagcgcaaagtggcagagctagaggaggagcagtcccagggctctagcagttacagcgactgggtgaagaaccttatctctcctgagcttggagttgtctttttcaacgtgcctgagaagctgcggcttcctgatgcctcccggaaagccaagcgtagcattgaggaggcctgcctcactctgcagcacttaaaccgcctgggcatccaggctgagcctctatatcgtgtggtcagcaataccattgagccactgaccctcttccacaaaatgggtgtgggccggctggacatgtatgtcctcaaccctgtcaaggacagcaaggagatgcagttcctcatgcaaaagtgggcaggcaatagtaaagccaagacaggcatcgtgctgcccaatgggaaggaggctgagatctccgtgccctaccttacctctatcactgctctggtggtctggctaccagccaatcccactgagaagattgtgcgtgtgctttttccaggaaatgctccccaaaacaagatcttggagggcctagaaaagcttcggcatctggacttcctgcgttaccctgtggccacgcagaaggacctggcttctggggctgtgcctaccaacctcaagcccagcaaaatcaaacagcgggctgatagcaaggagagcctcaaagccactaccaagacggccgtgagcaagttggccaaacgggaggaggtggtagaagagggagccaaggaggcacgttcagagctggccaaggagttagccaagacagagaagaaggcaaaagagtcatctgagaagcccccagagaagcctgccaagcctgagagggtgaagacagagtcaagtgaggcactgaaggcagagaagcgaaagctgatcaaagacaaggtagggaaaaagcaccttaaagaaaagatatcaaagctggaagaaaaaaaagacaaggagaaaaaagagatcaaaaaggagaggaaagagctcaagaaggatgaaggaaggaaggaggagaagaaggatgccaagaaggaggagaagaggaaagataccaaacctgagctcaagaagatttccaagccagacctaaagccctttactcctgaggtacgtaagaccctctataaagccaaggtccctggaagagtcaaaatagacaggagccgtgctatccgtggggagaaggagctgtcttctgagccccagacacccccagcccagaagggaactgtaccactcccaaccatcagtgggcacagggagctggtcctatcctcaccagaggacctcacacaggactttgaggagatgaagcgtgaggagagggctttgctggctgaacaaagggacacaggactaggagataagccattccctctagacactgcagaggagggacccccaagtacagctatccagggaacaccaccctctgttccagggctgggacaagaagaacatgtgatgaaggagaaagagcttgtcccagaggtccctgaggaacaaggcagcaaggacagaggcctagactctggggctgaaacagaggaagagaaagatacctgggaggaaaagaagcagagggaagcagagaggctcccagacagaacagaagccagagaggaaagtgaacctgaagtaaaggaggatgtgatagaaaaggctgagttagaagaaatggaggaggtacacccttcagatgaggaggaagaggacgcgacaaaagctgagggtttttaccaaaaacatatgcaggaacccttgaaggtaactccaaggagccgggaggcttttgggggtcgggaattgggactccagggcaaggcccctgagaaggagacctcgttattcctaagcagcctgaccacacctgcaggagccactgagcatgtctcttacatccaggatgagacaatccctggctactcagagactgagcagaccatctcagatgaggagatccatgatgagccggaggagcgcccagctccacccagatttcatacaagtacatatgacctgcccgggcctgaaggtgctggcccattcgaagccagccaacctgccgatagtgctgttcctgctacctctggcaaagtctatggaacgccagagactgaactcacctaccccactaacatagtggctgcccctttggctgaagaggaacatgtgtcctcggccacttcaatcactgagtgtgacaaactttcttcctttgccacatcagtggctgaggaccaatctgtggcctcacttacagctccccagacagaggagacaggcaagagctccctgctgcttgacacagtcacaagcatcccttcctcccgtactgaagctacgcagggcttggactatgtgccatcagctggtaccatctcacccacctcctcactggaagaagacaagggcttcaaatcaccaccctgtgaggacttctctgtgactggggagtcagagaagagaggagagatcatagggaaaggcttgtctggagagagagctgtggaagaggaagaggaggagacagcaaacgtagagatgtctgagaaactttgcagtcaatatggaactccagtgtttagtgcccctgggcatgccctacatccaggagaaccagcccttggagaagcagaggagcggtgccttagcccagatgacagcacagtgaagatggcttctcctccaccatctggcccacccagtgccacccacacaccctttcatcagtccccagtggaagaaaagtctgagccccaagactttcaggaggcagactcctggggagacactaagcgcacaccaggtgtgggcaaagaagatgctgctgaggagacagtcaagccagggcctgaagagggcacactagagaaggaagagaaagttcctcctcccaggagcccccaggcccaggaagcacctgtcaacattgatgaggggcttacaggctgtaccattcaactgttgccagcacaggataaagcaatagtctttgagattatggaggcaggagagcccacaggcccaattctgggagcagaagcccttcccggaggtttgaggactttaccccaagaacctggcaaacctcagaaagatgaggtgctcagatatcctgaccgaagcctctctcctgaagatgcagaatccctctctgtcctcagcgtgccctccccagacactgccaaccaagagcctacccccaagtctccctgtggcctgacagaacagtacctacacaaagaccgttggccagaggtatctccagaagacacccagtcactttctctgtcagaagagagtcccagcaaggagacctccctggatgtctcttctaagcagctctctccagaaagccttggcaccctccagtttggggaactaaaccttgggaaggaagaaatggggcatctgatgcaggccgaggatacctctcaccacacagctcccatgtctgttccagagccccatgcagccacagcgtcacctcccacagatgggacaactcgatactctgcacagacagacatcacagatgacagccttgacaggaagtcacctgccagctcattctctcactctacaccttcaggaaatgggaagtacttacctggggcgatcacaagccctgatgaacacattctgacacctgatagctccttctccaagagtcctgagtctttgccaggccctgccttggaggacattgccataaagtgggaagataaagttccagggttgaaagacagaacctcagaacagaagaaggaacctgagccaaaggatgaagttttacagcagaaagacaaaactctggagcacaaggaggtggtagagccgaaggatacagccatctatcagaaagatgaggctctgcatgtaaagaatgaggctgtgaaacagcaggataaggctttagaacaaaagggcagagacttagagcaaaaagacacagccctagaacagaaggacaaggccctggaaccaaaagacaaagacttagaagaaaaagacaaggccctggaacagaaggataagattccagaagagaaagacaaagccttagaacaaaaggatacagccctggaacagaaggacaaggccctggaaccaaaagataaagacttggaacaaaaggacagggtcctagaacagaaggagaagatcccagaagagaaagacaaagccttagatcaaaaagtcagaagtgttgaacataaggctccggaggacacggtcgctgaaatgaaggacagagacctagaacagacagacaaagcccctgaacagaaacaccaggcccaggaacaaaaggataaagtctcagaaaagaaggatcaggccttagaacaaaaatactgggctttgggacagaaggatgaagccctggaacaaaacattcaggctctggaagagaaccaccaaactcaggagcaggagagcctagtgcaggaggataaaaccaggaaaccaaagatgctagaggaaaaatccccagaaaaggtcaaggccatggaagagaagttagaagctcttctggagaagaccaaagctctgggcctggaagagagcctagtgcaggagggcagggccagagagcaggaagaaaagtactggagggggcaggatgtggtccaggagtggcaagaaacatctcctaccagagaggagccggctggagaacagaaagagcttgccccggcatgggaggacacatctcctgagcaggacaataggtattggaggggcagagaggatgtggccttggaacaggacacatactggagggagctaagctgtgagcggaaggtctggttccctcacgagctggatggccagggggcccgcccacactacactgaggaacgggaaagcactttcctagatgagggcccagatgatgagcaagaagtacccctgcgggaacacgcaacccggagcccctgggcctcagacttcaaggatttccaggaatcctcaccacagaaggggctagaggtggagcgctggcttgctgaatcaccagttgggttgccaccagaggaagaggacaaactgacccgctctccctttgagatcatctcccctccagcttccccacctgagatggttggacaaagggttccttcagccccaggacaagagagtcctatcccagaccctaagctcatgccacacatgaagaatgaacccactactccctcatggctggctgacatcccaccctgggtgcccaaggacagacccctcccccctgcacccctctccccagctcctggtccccccacacctgccccggaatcccatactcctgcacccttctcttggggcacagccgagtatgacagtgtggtggctgcagtgcaggagggggcagctgagttggaaggtgggccatactcccccctggggaaggactaccgcaaggctgaaggggaaagggaagaagaaggtagggctgaggctcctgacaaaagctcacacagctcaaaggtaccagaggccagcaaaagccatgccaccacggagcctgagcagactgagccggagcagagagagcccacaccctatcctgatgagagaagctttcagtatgcagacatctatgagcagatgatgcttactgggcttggccctgcatgccccactagagagcctccacttggagcagctggggattggcccccatgcctctcaaccaaggaggcagctgccggccgaaacacatctgcagagaaggagctttcatctcctatctcacccaagagcctccagtctgacactccaaccttcagctatgcagccctggcaggacccactgtacccccaaggccagagccagggccaagtatggagcccagcctcaccccacctgcagttcccccccgtgctcctatcctgagcaaaggcccaagcccccctcttaatggtaacatcctgagctgcagcccagataggaggtccccatcccccaaggaatcaggccggagtcactgggatgacagcactagtgactcagaactggagaagggggctcgggaacagccagaaaaagaggcccaatccccaagtcctcctcaccccattcctatggggtcccccacattatggccagaaactgaggcacatgttagccctcccttggactcacacctggggcctgcccgacccagtctggacttccctgcttcagcctttggcttctcctcattgcagccagctcccccacagctgccctctccagctgaaccccgctcggcaccctgtggctcccttgccttctctggggatcgagctctggctctggctccaggaccccccaccagaacccggcatgatgaatacctggaagtgaccaaggcccccagcctggattcctcactgccccagctcccatcacccagttctcctggggcccctctcctctccaatctgccacgacctgcctcaccagccctgtctgagggctcctcctctgaggctaccacgcctgtgatttcaagtgtggcggagcgcttctctccaagccttgaggctgcagaacaggagtctggagagctggacccaggaatggaaccagctgcccacagcctctgggacctcactcctctgagcccagcacccccagcttcactggacttggccctagctccagctccaagcctgcctggagacatgggtgatggcatcctgccgtgccacctggagtgctcagaggcagccacggagaagccaagccccttccaggttccctctgaggattgtgcagccaatggcccaactgaaaccagccctaaccccccaggccctgccccagccaaggctgaaaatgaagaggctgcggcttgccctgcctgggaacgtggggcctggcctgaaggagctgagaggagctcccggcctgacacattgctctcccctgagcagccagtgtgtcctgcagggggctccgggggcccacccagcagtgcctctcctgaggtcgaagctgggccccagggatgtgccactgagcctcggccccatcgtggggagctctccccatccttcctgaacccacctctgcccccatccatagatgatagggacctctcaactgaggaagttcggctagtaggaagaggggggcggcgccgggtaggggggccagggaccactgggggcccatgccctgtgactgatgagacaccccctacatcagccagtgactcaggctcctcacagtcagattctgatgtcccgccagaaactgaggagtgtccgtccatcacagctgaggcagccctcgactcagatgaagatggagacttcctacctgtggacaaagctgggggtgtcagtggtactcaccaccccaggcctggccatgacccacctcctctcccacagccagacccccgcccatcccctccccgccctgatgtgtgcatggctgaccccgaggggctcagctcagagtctgggagagtagagaggctacgggagaaggaaaaggttcaggggcgagtagggcgcagggccccaggcaaggccaagccagcgtcccctgcacggcgtctggatcttcggggaaaacgctcacccacccctggtaaagggcctgcagatcgagcatcccgggccccacctcgaccacgcagcaccacaagccaggtcaccccagcagaggaaaaggatggacacagccccatgtccaaaggcctagtcaatggactcaaggcaggaccaatggccttgagttccaagggcagctctggtgcccctgtatatgtggatctcgcctacatcccgaatcattgcagtggcaagactgctgaccttgacttcttccgtcgagtgcgtgcatcctactatgtggtcagtgggaatgaccctgccaatggcgagccaagccgggctgtgctggatgccctgctggagggcaaggcccagtggggggagaatcttcaggtgactctgatccctactcatgacacggaggtgactcgtgagtggtaccaacaaactcatgagcagcagcaacaactgaatgtcctggtcctggctagcagcagcaccgtggtgatgcaggatgagtccttccctgcctgcaagattgagttctgaaagagccgccctcccttccccaaggatccactcccccagctcctttagagaatggctactgctgagtcctttggggttgagggagatgggagctagggggaggggagggagatgtcttgttgtggggacttgggctgggctaaatgggaggggttgtccctccccatcatccattcctgtgaggtgtctcaaaccaaagttaacagggagaggatgggggaggggacaaattagaataggatagcatctgatgcctgagaaccctctcctagcactgtcaaatgctggtattgaatggggactgaggatgggtctcagagagcaacctcctccctcgtagagggagattatatccccaactccagggacctctttatctcaatctatttatttggcatcctgggagggatttccaatagtaatttatgtgacctggggcaggataccgtcagtgaggtgcccagagctgcaccctttcctccatttcccatcccccatctcctcaaccaccagggtctgagttctagcagggtcctgggggtatcccactgctatactgttctactgcttccctcagtatctgaatgtctcaatttaaaacttgaagctctttagaccaatagactggtgagaggagaaaggagcttatcccccagaccctgctttataccattcacatcccagggctgtgtccagacagcacaaaacggcaaggagagcccaagccccaatgccagaattcttccaaactccctgactctttgaagtttttactcaccccatttcaattatcctgatcccttctcatcccctgcttggcttctctgcatgtggtcatctgctgtggcttggtgtttaatgggttaaaaataagccactgcctgacatcccaacatttgacaccccagcaatgtgtgactcccccaacattccactatgccatcctgcagctgaaatgggaacactggctgcctctccaaacccgctcttggacagaggatctgggaggtggaagccaggccagaggacttggggaaaatgagatggaggaaggaaaaagggagaagctgagccacagcttaactcctacagagtgaaatgaaaacgggctgaaaataccaccccaggagaggacctcgccccaagcaagccagtgagcagccctgccagactactgccagactgagaaacccagaagctggtagtcatgtgggcttgccttctctgccaaacgactgggaaaccaaaatgagcccaccttgtgttcttcctagctccaccctccccgtgctgctgtgttctgctcctccccacgcttccctgctatagttcccagctgctgtaacggagccacctccaactctaacaataaaccaagttcattgcagatagtgta

SEQ ID NO: 18108 - DNA, 10553 bp, Homo sapiens
  source 1..10553: mol_type = unassigned DNA
gctgccggactaacactccgcgggtgtttccatggagaccgaggccgagcctgcgcggcctcacggcgttgccatggagacaactccggggctggggctccgaagtcccggcgcaccgctggctcagaaccccgcggagctgctgtgcgaggccggagccgcggtggcggctgcacgctgggacctgcagaagcactctttgctaattgtgatcggcgatatcggtacagagagtcagctgagggccgtgcgggcccaccttgaacaagggattctctcctggaacattgacctgtcatcctttgacttgaaccaacagttgagactcttcattacccggcacctagctcacttctcctcagaggtcaaaggccagaggaccctttgccaccagagtgagatcctagagaccatcatcctggtaaatcccagtgcagacagcatcagctctgaggttcatcatcttcttagcagctcatcagcttataaactactaatcttgagtgggcaaagtttagagcctgggggagacctcatcctacagagtggcacctactcatatgaaaactttgcccaggtccttcacaaccccgagatttcccaattgctcagcaatagagaccctgggatacaggccttccttaccgtgtcctgcttaggggaaggtgattggagccacctgggattatccagttcccaagagaccctgcacctccggctaaaccctgagcccactctgcccaccatggacggcgtggctgagttctccgagtatgtctctgagactgtggacgtgccatccccatttgacctactagagccccccacctcagggggcttcctcaagctctccaagccttgttgctacatcttcccaggtggtcgtggggactctgccctctttgctgtcaatggtttcaacatcctggtggatggtggctctgatcgcaagtcctgtttttggaagctggtacggcacttggaccgcattgactcggtgctactcacacacattggggcagacaacctgccaggcatcaatggactactgcagcgcaaagtggcagagctagaggaggagcagtcccagggctctagcagttacagcgactgggtgaagaaccttatctctcctgagcttggagttgtctttttcaacgtgcctgagaagctgcggcttcctgatgcctcccggaaagccaagcgtagcattgaggaggcctgcctcactctgcagcacttaaaccgcctgggcatccaggctgagcctctatatcgtgtggtcagcaataccattgagccactgaccctcttccacaaaatgggtgtgggccggctggacatgtatgtcctcaaccctgtcaaggacagcaaggagatgcagttcctcatgcaaaagtgggcaggcaatagtaaagccaagacaggcatcgtgctgcccaatgggaaggaggctgagatctccgtgccctaccttacctctatcactgctctggtggtctggctaccagccaatcccactgagaagattgtgcgtgtgctttttccaggaaatgctccccaaaacaagatcttggagggcctagaaaagcttcggcatctggacttcctgcgttaccctgtggccacgcagaaggacctggcttctggggctgtgcctaccaacctcaagcccagcaaaatcaaacagcgggctgatagcaaggagagcctcaaagccactaccaagacggccgtgagcaagttggccaaacgggaggaggtggtagaagagggagccaaggaggcacgttcagagctggccaaggagttagccaagacagagaagaaggcaaaagagtcatctgagaagcccccagagaagcctgccaagcctgagagggtgaagacagagtcaagtgaggcactgaaggcagagaagcgaaagctgatcaaagacaaggtagggaaaaagcaccttaaagaaaagatatcaaagctggaagaaaaaaaagacaaggagaaaaaagagatcaaaaaggagaggaaagagctcaagaaggatgaaggaaggaaggaggagaagaaggatgccaagaaggaggagaagaggaaagataccaaacctgagctcaagaagatttccaagccagacctaaagccctttactcctgaggtacgtaagaccctctataaagccaaggtccctggaagagtcaaaatagacaggagccgtgctatccgtggggagaaggagctgtcttctgagccccagacacccccagcccagaagggaactgtaccactcccaaccatcagtgggcacagggagctggtcctatcctcaccagaggacctcacacaggactttgaggagatgaagcgtgaggagagggctttgctggctgaacaaagggacacaggactaggagataagccattccctctagacactgcagaggagggacccccaagtacagctatccagggaacaccaccctctgttccagggctgggacaagaagaacatgtgatgaaggagaaagagcttgtcccagaggtccctgaggaacaaggcagcaaggacagaggcctagactctggggctgaaacagaggaagagaaagatacctgggaggaaaagaagcagagggaagcagagaggctcccagacagaacagaagccagagaggaaagtgaacctgaagtaaaggaggatgtgatagaaaaggctgagttagaagaaatggaggaggtacacccttcagatgaggaggaagaggacgcgacaaaagctgagggtttttaccaaaaacatatgcaggaacccttgaaggtaactccaaggagccgggaggcttttgggggtcgggaattgggactccagggcaaggcccctgagaaggagacctcgttattcctaagcagcctgaccacacctgcaggagccactgagcatgtctcttacatccaggatgagacaatccctggctactcagagactgagcagaccatctcagatgaggagatccatgatgagccggaggagcgcccagctccacccagatttcatacaagtacatatgacctgcccgggcctgaaggtgctggcccattcgaagccagccaacctgccgatagtgctgttcctgctacctctggcaaagtctatggaacgccagagactgaactcacctaccccactaacatagtggctgcccctttggctgaagaggaacatgtgtcctcggccacttcaatcactgagtgtgacaaactttcttcctttgccacatcagtggctgaggaccaatctgtggcctcacttacagctccccagacagaggagacaggcaagagctccctgctgcttgacacagtcacaagcatcccttcctcccgtactgaagctacgcagggcttggactatgtgccatcagctggtaccatctcacccacctcctcactggaagaagacaagggcttcaaatcaccaccctgtgaggacttctctgtgactggggagtcagagaagagaggagagatcatagggaaaggcttgtctggagagagagctgtggaagaggaagaggaggagacagcaaacgtagagatgtctgagaaactttgcagtcaatatggaactccagtgtttagtgcccctgggcatgccctacatccaggagaaccagcccttggagaagcagaggagcggtgccttagcccagatgacagcacagtgaagatggcttctcctccaccatctggcccacccagtgccacccacacaccctttcatcagtccccagtggaagaaaagtctgagccccaagactttcaggaggcagactcctggggagacactaagcgcacaccaggtgtgggcaaagaagatgctgctgaggagacagtcaagccagggcctgaagagggcacactagagaaggaagagaaagttcctcctcccaggagcccccaggcccaggaagcacctgtcaacattgatgaggggcttacaggctgtaccattcaactgttgccagcacaggataaagcaatagtctttgagattatggaggcaggagagcccacaggcccaattctgggagcagaagcccttcccggaggtttgaggactttaccccaagaacctggcaaacctcagaaagatgaggtgctcagatatcctgaccgaagcctctctcctgaagatgcagaatccctctctgtcctcagcgtgccctccccagacactgccaaccaagagcctacccccaagtctccctgtggcctgacagaacagtacctacacaaagaccgttggccagaggtatctccagaagacacccagtcactttctctgtcagaagagagtcccagcaaggagacctccctggatgtctcttctaagcagctctctccagaaagccttggcaccctccagtttggggaactaaaccttgggaaggaagaaatggggcatctgatgcaggccgaggatacctctcaccacacagctcccatgtctgttccagagccccatgcagccacagcgtcacctcccacagatgggacaactcgatactctgcacagacagacatcacagatgacagccttgacaggaagtcacctgccagctcattctctcactctacaccttcaggaaatgggaagtacttacctggggcgatcacaagccctgatgaacacattctgacacctgatagctccttctccaagagtcctgagtctttgccaggccctgccttggaggacattgccataaagtgggaagataaagttccagggttgaaagacagaacctcagaacagaagaaggaacctgagccaaaggatgaagttttacagcagaaagacaaaactctggagcacaaggaggtggtagagccgaaggatacagccatctatcagaaagatgaggctctgcatgtaaagaatgaggctgtgaaacagcaggataaggctttagaacaaaagggcagagacttagagcaaaaagacacagccctagaacagaaggacaaggccctggaaccaaaagacaaagacttagaagaaaaagacaaggccctggaacagaaggataagattccagaagagaaagacaaagccttagaacaaaaggatacagccctggaacagaaggacaaggccctggaaccaaaagataaagacttggaacaaaaggacagggtcctagaacagaaggagaagatcccagaagagaaagacaaagccttagatcaaaaagtcagaagtgttgaacataaggctccggaggacacggtcgctgaaatgaaggacagagacctagaacagacagacaaagcccctgaacagaaacaccaggcccaggaacaaaaggataaagtctcagaaaagaaggatcaggccttagaacaaaaatactgggctttgggacagaaggatgaagccctggaacaaaacattcaggctctggaagagaaccaccaaactcaggagcaggagagcctagtgcaggaggataaaaccaggaaaccaaagatgctagaggaaaaatccccagaaaaggtcaaggccatggaagagaagttagaagctcttctggagaagaccaaagctctgggcctggaagagagcctagtgcaggagggcagggccagagagcaggaagaaaagtactggagggggcaggatgtggtccaggagtggcaagaaacatctcctaccagagaggagccggctggagaacagaaagagcttgccccggcatgggaggacacatctcctgagcaggacaataggtattggaggggcagagaggatgtggccttggaacaggacacatactggagggagctaagctgtgagcggaaggtctggttccctcacgagctggatggccagggggcccgcccacactacactgaggaacgggaaagcactttcctagatgagggcccagatgatgagcaagaagtacccctgcgggaacacgcaacccggagcccctgggcctcagacttcaaggatttccaggaatcctcaccacagaaggggctagaggtggagcgctggcttgctgaatcaccagttgggttgccaccagaggaagaggacaaactgacccgctctccctttgagatcatctcccctccagcttccccacctgagatggttggacaaagggttccttcagccccaggacaagagagtcctatcccagaccctaagctcatgccacacatgaagaatgaacccactactccctcatggctggctgacatcccaccctgggtgcccaaggacagacccctcccccctgcacccctctccccagctcctggtccccccacacctgccccggaatcccatactcctgcacccttctcttggggcacagccgagtatgacagtgtggtggctgcagtgcaggagggggcagctgagttggaaggtgggccatactcccccctggggaaggactaccgcaaggctgaaggggaaagggaagaagaaggtagggctgaggctcctgacaaaagctcacacagctcaaaggtaccagaggccagcaaaagccatgccaccacggagcctgagcagactgagccggagcagagagagcccacaccctatcctgatgagagaagctttcagtatgcagacatctatgagcagatgatgcttactgggcttggccctgcatgccccactagagagcctccacttggagcagctggggattggcccccatgcctctcaaccaaggaggcagctgccggccgaaacacatctgcagagaaggagctttcatctcctatctcacccaagagcctccagtctgacactccaaccttcagctatgcagccctggcaggacccactgtacccccaaggccagagccagggccaagtatggagcccagcctcaccccacctgcagttcccccccgtgctcctatcctgagcaaaggcccaagcccccctcttaatggtaacatcctgagctgcagcccagataggaggtccccatcccccaaggaatcaggccggagtcactgggatgacagcactagtgactcagaactggagaagggggctcgggaacagccagaaaaagaggcccaatccccaagtcctcctcaccccattcctatggggtcccccacattatggccagaaactgaggcacatgttagccctcccttggactcacacctggggcctgcccgacccagtctggacttccctgcttcagcctttggcttctcctcattgcagccagctcccccacagctgccctctccagctgaaccccgctcggcaccctgtggctcccttgccttctctggggatcgagctctggctctggctccaggaccccccaccagaacccggcatgatgaatacctggaagtgaccaaggcccccagcctggattcctcactgccccagctcccatcacccagttctcctggggcccctctcctctccaatctgccacgacctgcctcaccagccctgtctgagggctcctcctctgaggctaccacgcctgtgatttcaagtgtggcggagcgcttctctccaagccttgaggctgcagaacaggagtctggagagctggacccaggaatggaaccagctgcccacagcctctgggacctcactcctctgagcccagcacccccagcttcactggacttggccctagctccagctccaagcctgcctggagacatgggtgatggcatcctgccgtgccacctggagtgctcagaggcagccacggagaagccaagccccttccaggttccctctgaggattgtgcagccaatggcccaactgaaaccagccctaaccccccaggccctgccccagccaaggctgaaaatgaagaggctgcggcttgccctgcctgggaacgtggggcctggcctgaaggagctgagaggagctcccggcctgacacattgctctcccctgagcagccagtgtgtcctgcagggggctccgggggcccacccagcagtgcctctcctgaggtcgaagctgggccccagggatgtgccactgagcctcggccccatcgtggggagctctccccatccttcctgaacccacctctgcccccatccatagatgatagggacctctcaactgaggaagttcggctagtaggaagaggggggcggcgccgggtaggggggccagggaccactgggggcccatgccctgtgactgatgagacaccccctacatcagccagtgactcaggctcctcacagtcagattctgatgtcccgccagaaactgaggagtgtccgtccatcacagctgaggcagccctcgactcagatgaagatggagacttcctacctgtggacaaagctgggggtgtcagtggtactcaccaccccaggcctggccatgacccacctcctctcccacagccagacccccgcccatcccctccccgccctgatgtgtgcatggctgaccccgaggggctcagctcagagtctgggagagtagagaggctacgggagaaggaaaaggttcaggggcgagtagggcgcagggccccaggcaaggccaagccagcgtcccctgcacggcgtctggatcttcggggaaaacgctcacccacccctggtaaagggcctgcagatcgagcatcccgggccccacctcgaccacgcagcaccacaagccaggtcaccccagcagaggaaaaggatggacacagccccatgtccaaaggcctagtcaatggactcaaggcaggaccaatggccttgagttccaagggcagctctggtgcccctgtatatgtggatctcgcctacatcccgaatcattgcagtggcaagactgctgaccttgacttcttccgtcgagtgcgtgcatcctactatgtggtcagtgggaatgaccctgccaatggcgagccaagccgggctgtgctggatgccctgctggagggcaaggcccagtggggggagaatcttcaggtgactctgatccctactcatgacacggaggtgactcgtgagtggtaccaacaaactcatgagcagcagcaacaactgaatgtcctggtcctggctagcagcagcaccgtggtgatgcaggatgagtccttccctgcctgcaagattgagttctgaaagagccgccctcccttccccaaggatccactcccccagctcctttagagaatggctactgctgagtcctttggggttgagggagatgggagctagggggaggggagggagatgtcttgttgtggggacttgggctgggctaaatgggaggggttgtccctccccatcatccattcctgtgaggtgtctcaaaccaaagttaacagggagaggatgggggaggggacaaattagaataggatagcatctgatgcctgagaaccctctcctagcactgtcaaatgctggtattgaatggggactgaggatgggtctcagagagcaacctcctccctcgtagagggagattatatccccaactccagggacctctttatctcaatctatttatttggcatcctgggagggatttccaatagtaatttatgtgacctggggcaggataccgtcagtgaggtgcccagagctgcaccctttcctccatttcccatcccccatctcctcaaccaccagggtctgagttctagcagggtcctgggggtatcccactgctatactgttctactgcttccctcagtatctgaatgtctcaatttaaaacttgaagctctttagaccaatagactggtgagaggagaaaggagcttatcccccagaccctgctttataccattcacatcccagggctgtgtccagacagcacaaaacggcaaggagagcccaagccccaatgccagaattcttccaaactccctgactctttgaagtttttactcaccccatttcaattatcctgatcccttctcatcccctgcttggcttctctgcatgtggtcatctgctgtggcttggtgtttaatgggttaaaaataagccactgcctgacatcccaacatttgacaccccagcaatgtgtgactcccccaacattccactatgccatcctgcagctgaaatgggaacactggctgcctctccaaacccgctcttggacagaggatctgggaggtggaagccaggccagaggacttggggaaaatgagatggaggaaggaaaaagggagaagctgagccacagcttaactcctacagagtgaaatgaaaacgggctgaaaataccaccccaggagaggacctcgccccaagcaagccagtgagcagccctgccagactactgccagactgagaaacccagaagctggtagtcatgtgggcttgccttctctgccaaacgactgggaaaccaaaatgagcccaccttgtgttcttcctagctccaccctccccgtgctgctgtgttctgctcctccccacgcttccctgctatagttcccagctgctgtaacggagccacctccaactctaacaataaaccaagttcattgcagatagtgta

SEQ ID NO: 18109 - DNA, 10281 bp, Homo sapiens
  source 1..10281: mol_type = unassigned DNA
actcccaccctaagtgctgcagactcttccctgaagctgccggctgaggccggagctgccgcctccatgagaggcttcctcctacaccccagggccagaggaccctttgccaccagagtgagatcctagagaccatcatcctggtaaatcccagtgcagacagcatcagctctgaggttcatcatcttcttagcagctcatcagcttataaactactaatcttgagtgggcaaagtttagagcctgggggagacctcatcctacagagtggcacctactcatatgaaaactttgcccaggtccttcacaaccccgagatttcccaattgctcagcaatagagaccctgggatacaggccttccttaccgtgtcctgcttaggggaaggtgattggagccacctgggattatccagttcccaagagaccctgcacctccggctaaaccctgagcccactctgcccaccatggacggcgtggctgagttctccgagtatgtctctgagactgtggacgtgccatccccatttgacctactagagccccccacctcagggggcttcctcaagctctccaagccttgttgctacatcttcccaggtggtcgtggggactctgccctctttgctgtcaatggtttcaacatcctggtggatggtggctctgatcgcaagtcctgtttttggaagctggtacggcacttggaccgcattgactcggtgctactcacacacattggggcagacaacctgccaggcatcaatggactactgcagcgcaaagtggcagagctagaggaggagcagtcccagggctctagcagttacagcgactgggtgaagaaccttatctctcctgagcttggagttgtctttttcaacgtgcctgagaagctgcggcttcctgatgcctcccggaaagccaagcgtagcattgaggaggcctgcctcactctgcagcacttaaaccgcctgggcatccaggctgagcctctatatcgtgtggtcagcaataccattgagccactgaccctcttccacaaaatgggtgtgggccggctggacatgtatgtcctcaaccctgtcaaggacagcaaggagatgcagttcctcatgcaaaagtgggcaggcaatagtaaagccaagacaggcatcgtgctgcccaatgggaaggaggctgagatctccgtgccctaccttacctctatcactgctctggtggtctggctaccagccaatcccactgagaagattgtgcgtgtgctttttccaggaaatgctccccaaaacaagatcttggagggcctagaaaagcttcggcatctggacttcctgcgttaccctgtggccacgcagaaggacctggcttctggggctgtgcctaccaacctcaagcccagcaaaatcaaacagcgggctgatagcaaggagagcctcaaagccactaccaagacggccgtgagcaagttggccaaacgggaggaggtggtagaagagggagccaaggaggcacgttcagagctggccaaggagttagccaagacagagaagaaggcaaaagagtcatctgagaagcccccagagaagcctgccaagcctgagagggtgaagacagagtcaagtgaggcactgaaggcagagaagcgaaagctgatcaaagacaaggtagggaaaaagcaccttaaagaaaagatatcaaagctggaagaaaaaaaagacaaggagaaaaaagagatcaaaaaggagaggaaagagctcaagaaggatgaaggaaggaaggaggagaagaaggatgccaagaaggaggagaagaggaaagataccaaacctgagctcaagaagatttccaagccagacctaaagccctttactcctgaggtacgtaagaccctctataaagccaaggtccctggaagagtcaaaatagacaggagccgtgctatccgtggggagaaggagctgtcttctgagccccagacacccccagcccagaagggaactgtaccactcccaaccatcagtgggcacagggagctggtcctatcctcaccagaggacctcacacaggactttgaggagatgaagcgtgaggagagggctttgctggctgaacaaagggacacaggactaggagataagccattccctctagacactgcagaggagggacccccaagtacagctatccagggaacaccaccctctgttccagggctgggacaagaagaacatgtgatgaaggagaaagagcttgtcccagaggtccctgaggaacaaggcagcaaggacagaggcctagactctggggctgaaacagaggaagagaaagatacctgggaggaaaagaagcagagggaagcagagaggctcccagacagaacagaagccagagaggaaagtgaacctgaagtaaaggaggatgtgatagaaaaggctgagttagaagaaatggaggaggtacacccttcagatgaggaggaagaggacgcgacaaaagctgagggtttttaccaaaaacatatgcaggaacccttgaaggtaactccaaggagccgggaggcttttgggggtcgggaattgggactccagggcaaggcccctgagaaggagacctcgttattcctaagcagcctgaccacacctgcaggagccactgagcatgtctcttacatccaggatgagacaatccctggctactcagagactgagcagaccatctcagatgaggagatccatgatgagccggaggagcgcccagctccacccagatttcatacaagtacatatgacctgcccgggcctgaaggtgctggcccattcgaagccagccaacctgccgatagtgctgttcctgctacctctggcaaagtctatggaacgccagagactgaactcacctaccccactaacatagtggctgcccctttggctgaagaggaacatgtgtcctcggccacttcaatcactgagtgtgacaaactttcttcctttgccacatcagtggctgaggaccaatctgtggcctcacttacagctccccagacagaggagacaggcaagagctccctgctgcttgacacagtcacaagcatcccttcctcccgtactgaagctacgcagggcttggactatgtgccatcagctggtaccatctcacccacctcctcactggaagaagacaagggcttcaaatcaccaccctgtgaggacttctctgtgactggggagtcagagaagagaggagagatcatagggaaaggcttgtctggagagagagctgtggaagaggaagaggaggagacagcaaacgtagagatgtctgagaaactttgcagtcaatatggaactccagtgtttagtgcccctgggcatgccctacatccaggagaaccagcccttggagaagcagaggagcggtgccttagcccagatgacagcacagtgaagatggcttctcctccaccatctggcccacccagtgccacccacacaccctttcatcagtccccagtggaagaaaagtctgagccccaagactttcaggaggcagactcctggggagacactaagcgcacaccaggtgtgggcaaagaagatgctgctgaggagacagtcaagccagggcctgaagagggcacactagagaaggaagagaaagttcctcctcccaggagcccccaggcccaggaagcacctgtcaacattgatgaggggcttacaggctgtaccattcaactgttgccagcacaggataaagcaatagtctttgagattatggaggcaggagagcccacaggcccaattctgggagcagaagcccttcccggaggtttgaggactttaccccaagaacctggcaaacctcagaaagatgaggtgctcagatatcctgaccgaagcctctctcctgaagatgcagaatccctctctgtcctcagcgtgccctccccagacactgccaaccaagagcctacccccaagtctccctgtggcctgacagaacagtacctacacaaagaccgttggccagaggtatctccagaagacacccagtcactttctctgtcagaagagagtcccagcaaggagacctccctggatgtctcttctaagcagctctctccagaaagccttggcaccctccagtttggggaactaaaccttgggaaggaagaaatggggcatctgatgcaggccgaggatacctctcaccacacagctcccatgtctgttccagagccccatgcagccacagcgtcacctcccacagatgggacaactcgatactctgcacagacagacatcacagatgacagccttgacaggaagtcacctgccagctcattctctcactctacaccttcaggaaatgggaagtacttacctggggcgatcacaagccctgatgaacacattctgacacctgatagctccttctccaagagtcctgagtctttgccaggccctgccttggaggacattgccataaagtgggaagataaagttccagggttgaaagacagaacctcagaacagaagaaggaacctgagccaaaggatgaagttttacagcagaaagacaaaactctggagcacaaggaggtggtagagccgaaggatacagccatctatcagaaagatgaggctctgcatgtaaagaatgaggctgtgaaacagcaggataaggctttagaacaaaagggcagagacttagagcaaaaagacacagccctagaacagaaggacaaggccctggaaccaaaagacaaagacttagaagaaaaagacaaggccctggaacagaaggataagattccagaagagaaagacaaagccttagaacaaaaggatacagccctggaacagaaggacaaggccctggaaccaaaagataaagacttggaacaaaaggacagggtcctagaacagaaggagaagatcccagaagagaaagacaaagccttagatcaaaaagtcagaagtgttgaacataaggctccggaggacacggtcgctgaaatgaaggacagagacctagaacagacagacaaagcccctgaacagaaacaccaggcccaggaacaaaaggataaagtctcagaaaagaaggatcaggccttagaacaaaaatactgggctttgggacagaaggatgaagccctggaacaaaacattcaggctctggaagagaaccaccaaactcaggagcaggagagcctagtgcaggaggataaaaccaggaaaccaaagatgctagaggaaaaatccccagaaaaggtcaaggccatggaagagaagttagaagctcttctggagaagaccaaagctctgggcctggaagagagcctagtgcaggagggcagggccagagagcaggaagaaaagtactggagggggcaggatgtggtccaggagtggcaagaaacatctcctaccagagaggagccggctggagaacagaaagagcttgccccggcatgggaggacacatctcctgagcaggacaataggtattggaggggcagagaggatgtggccttggaacaggacacatactggagggagctaagctgtgagcggaaggtctggttccctcacgagctggatggccagggggcccgcccacactacactgaggaacgggaaagcactttcctagatgagggcccagatgatgagcaagaagtacccctgcgggaacacgcaacccggagcccctgggcctcagacttcaaggatttccaggaatcctcaccacagaaggggctagaggtggagcgctggcttgctgaatcaccagttgggttgccaccagaggaagaggacaaactgacccgctctccctttgagatcatctcccctccagcttccccacctgagatggttggacaaagggttccttcagccccaggacaagagagtcctatcccagaccctaagctcatgccacacatgaagaatgaacccactactccctcatggctggctgacatcccaccctgggtgcccaaggacagacccctcccccctgcacccctctccccagctcctggtccccccacacctgccccggaatcccatactcctgcacccttctcttggggcacagccgagtatgacagtgtggtggctgcagtgcaggagggggcagctgagttggaaggtgggccatactcccccctggggaaggactaccgcaaggctgaaggggaaagggaagaagaaggtagggctgaggctcctgacaaaagctcacacagctcaaaggtaccagaggccagcaaaagccatgccaccacggagcctgagcagactgagccggagcagagagagcccacaccctatcctgatgagagaagctttcagtatgcagacatctatgagcagatgatgcttactgggcttggccctgcatgccccactagagagcctccacttggagcagctggggattggcccccatgcctctcaaccaaggaggcagctgccggccgaaacacatctgcagagaaggagctttcatctcctatctcacccaagagcctccagtctgacactccaaccttcagctatgcagccctggcaggacccactgtacccccaaggccagagccagggccaagtatggagcccagcctcaccccacctgcagttcccccccgtgctcctatcctgagcaaaggcccaagcccccctcttaatggtaacatcctgagctgcagcccagataggaggtccccatcccccaaggaatcaggccggagtcactgggatgacagcactagtgactcagaactggagaagggggctcgggaacagccagaaaaagaggcccaatccccaagtcctcctcaccccattcctatggggtcccccacattatggccagaaactgaggcacatgttagccctcccttggactcacacctggggcctgcccgacccagtctggacttccctgcttcagcctttggcttctcctcattgcagccagctcccccacagctgccctctccagctgaaccccgctcggcaccctgtggctcccttgccttctctggggatcgagctctggctctggctccaggaccccccaccagaacccggcatgatgaatacctggaagtgaccaaggcccccagcctggattcctcactgccccagctcccatcacccagttctcctggggcccctctcctctccaatctgccacgacctgcctcaccagccctgtctgagggctcctcctctgaggctaccacgcctgtgatttcaagtgtggcggagcgcttctctccaagccttgaggctgcagaacaggagtctggagagctggacccaggaatggaaccagctgcccacagcctctgggacctcactcctctgagcccagcacccccagcttcactggacttggccctagctccagctccaagcctgcctggagacatgggtgatggcatcctgccgtgccacctggagtgctcagaggcagccacggagaagccaagccccttccaggttccctctgaggattgtgcagccaatggcccaactgaaaccagccctaaccccccaggccctgccccagccaaggctgaaaatgaagaggctgcggcttgccctgcctgggaacgtggggcctggcctgaaggagctgagaggagctcccggcctgacacattgctctcccctgagcagccagtgtgtcctgcagggggctccgggggcccacccagcagtgcctctcctgaggtcgaagctgggccccagggatgtgccactgagcctcggccccatcgtggggagctctccccatccttcctgaacccacctctgcccccatccatagatgatagggacctctcaactgaggaagttcggctagtaggaagaggggggcggcgccgggtaggggggccagggaccactgggggcccatgccctgtgactgatgagacaccccctacatcagccagtgactcaggctcctcacagtcagattctgatgtcccgccagaaactgaggagtgtccgtccatcacagctgaggcagccctcgactcagatgaagatggagacttcctacctgtggacaaagctgggggtgtcagtggtactcaccaccccaggcctggccatgacccacctcctctcccacagccagacccccgcccatcccctccccgccctgatgtgtgcatggctgaccccgaggggctcagctcagagtctgggagagtagagaggctacgggagaaggaaaaggttcaggggcgagtagggcgcagggccccaggcaaggccaagccagcgtcccctgcacggcgtctggatcttcggggaaaacgctcacccacccctggtaaagggcctgcagatcgagcatcccgggccccacctcgaccacgcagcaccacaagccaggtcaccccagcagaggaaaaggatggacacagccccatgtccaaaggcctagtcaatggactcaaggcaggaccaatggccttgagttccaagggcagctctggtgcccctgtatatgtggatctcgcctacatcccgaatcattgcagtggcaagactgctgaccttgacttcttccgtcgagtgcgtgcatcctactatgtggtcagtgggaatgaccctgccaatggcgagccaagccgggctgtgctggatgccctgctggagggcaaggcccagtggggggagaatcttcaggtgagtgtgactctgatccctactcatgacacggaggtgactcgtgagtggtaccaacaaactcatgagcagcagcaacaactgaatgtcctggtcctggctagcagcagcaccgtggtgatgcaggatgagtccttccctgcctgcaagattgagttctgaaagagccgccctcccttccccaaggatccactcccccagctcctttagagaatggctactgctgagtcctttggggttgagggagatgggagctagggggaggggagggagatgtcttgttgtggggacttgggctgggctaaatgggaggggttgtccctccccatcatccattcctgtgaggtgtctcaaaccaaagttaacagggagaggatgggggaggggacaaattagaataggatagcatctgatgcctgagaaccctctcctagcactgtcaaatgctggtattgaatggggactgaggatgggtctcagagagcaacctcctccctcgtagagggagattatatccccaactccagggacctctttatctcaatctatttatttggcatcctgggagggatttccaatagtaatttatgtgacctggggcaggataccgtcagtgaggtgcccagagctgcaccctttcctccatttcccatcccccatctcctcaaccaccagggtctgagttctagcagggtcctgggggtatcccactgctatactgttctactgcttccctcagtatctgaatgtctcaatttaaaacttgaagctctttagaccaatagactggtgagaggagaaaggagcttatcccccagaccctgctttataccattcacatcccagggctgtgtccagacagcacaaaacggcaaggagagcccaagccccaatgccagaattcttccaaactccctgactctttgaagtttttactcaccccatttcaattatcctgatcccttctcatcccctgcttggcttctctgcatgtggtcatctgctgtggcttggtgtttaatgggttaaaaataagccactgcctgacatcccaacatttgacaccccagcaatgtgtgactcccccaacattccactatgccatcctgcagctgaaatgggaacactggctgcctctccaaacccgctcttggacagaggatctgggaggtggaagccaggccagaggacttggggaaaatgagatggaggaaggaaaaagggagaagctgagccacagcttaactcctacagagtgaaatgaaaacgggctgaaaataccaccccaggagaggacctcgccccaagcaagccagtgagcagccctgccagactactgccagactgagaaacccagaagctggtagtcatgtgggcttgccttctctgccaaacgactgggaaaccaaaatgagcccaccttgtgttcttcctagctccaccctccccgtgctgctgtgttctgctcctccccacgcttccctgctatagttcccagctgctgtaacggagccacctccaactctaacaataaaccaagttcattgcagatagtgta

SEQ ID NO: 18110 - DNA, 1881 bp, Homo sapiens
  source 1..1881: mol_type = unassigned DNA
atggacggcgtggctgagttctccgagtatgtctctgagactgtggacgtgccatccccatttgacctactagagccccccacctcagggggcttcctcaagctctccaagccttgttgctacatcttcccaggtggtcgtggggactctgccctctttgctgtcaatggtttcaacatcctggtggatggtggctctgatcgcaagtcctgtttttggaagctggtacggcacttggaccgcattgactcggtgctactcacacacattggggcagacaacctgccaggcatcaatggactactgcagcgcaaagtggcagagctagaggaggagcagtcccagggctctagcagttacagcgactgggtgaagaaccttatctctcctgagcttggagttgtctttttcaacgtgcctgagaagctgcggcttcctgatgcctcccggaaagccaagcgtagcattgaggaggcctgcctcactctgcagcacttaaaccgcctgggcatccaggctgagcctctatatcgtgtggtcagcaataccattgagccactgaccctcttccacaaaatgggtgtgggccggctggacatgtatgtcctcaaccctgtcaaggacagcaaggagatgcagttcctcatgcaaaagtgggcaggcaatagtaaagccaagacaggcatcgtgctgcccaatgggaaggaggctgagatctccgtgccctaccttacctctatcactgctctggtggtctggctaccagccaatcccactgagaagattgtgcgtgtgctttttccaggaaatgctccccaaaacaagatcttggagggcctagaaaagcttcggcatctggacttcctgcgttaccctgtggccacgcagaaggacctggcttctggggctgtgcctaccaacctcaagcccagcaaaatcaaacagcgggctgatagcaaggagagcctcaaagccactaccaagacggccgtgagcaagttggccaaacgggaggaggtggtagaagagggagccaaggaggcacgttcagagctggccaaggagttagccaagacagagaagaaggcaaaagagtcatctgagaagcccccagagaagcctgccaagcctgagagggtgaagacagagtcaagtgaggcactgaaggcagagaagcgaaagctgatcaaagacaaggtagggaaaaagcaccttaaagaaaagatatcaaagctggaagaaaaaaaagacaaggagaaaaaagagatcaaaaaggagaggaaagagctcaagaaggatgaaggaaggaaggaggagaagaaggatgccaagaaggaggagaagaggaaagataccaaacctgagctcaagaagatttccaagccagacctaaagccctttactcctgaggtacgtaagaccctctataaagccaaggtccctggaagagtcaaaatagacaggagccgtgctatccgtggggagaaggagctgtcttctgagccccagacacccccagcccagaagggaactgtaccactcccaaccatcagtgggcacagggagctggtcctatcctcaccagaggacctcacacaggactttgaggagatgaagcgtgaggagagggctttgctggctgaacaaagggacacaggactaggagataagccattccctctagacactgcagaggagggacccccaagtacagctatccagggaacaccaccctctgttccagggctgggacaagaagaacatgtgatgaaggagaaagagcttgtcccagaggtccctgaggaacaaggcagcaaggacagaggcctagactctggggctgaaacagaggaaaaaaaaaaaaaaaaaaaaaaaaaaaag

SEQ ID NO: 18111 - DNA, 2241 bp, Homo sapiens
  source 1..2241: mol_type = unassigned DNA
ggcgctcgggctgcgcgggctctgggcagcagcagcagcagcagcagcatcctctcttcctttacttcccttccgcttctttctcttccttctccttctttttcccccccctccccttcttcccctaacccttctacccctctcctttttctccggagggcgctaagtccgtgagcggtggcagtcgcgaccgcgggtgcatccagtttctgcgcccagattttattgatctaatccaaagtatcttataacttctggctggaattaagattcttcagcttgtctctaaccgaggaagcattgattgggagctactcattcagaaaattaaaagaaagaagccagaaaatattatcaaccctttgagaacacgacacaacgaactttatattttaccacttccttgaatagttgcaggagaaataacaaggcattgaagaatggcagatgaacggaaagatgaagcaaaggcacctcactggacctcagcaccgctaacagaggcatctgcacactcacatccacctgagattaaggatcaaggcggagcaggggaaggacttgtccgaagcgccaatggattcccatacagggaggatgaagagggtgcctttggagagcatgggtcacagggcacctattcaaataccaaagagaatgggatcaacggagagctgacctcagctgacagagaaacagcagaggaggtgtctgcaaggatagttcaagtagtcactgctgaggctgtagcagtcctgaaaggtgaacaagagaaagaagctcaacataaagaccagactgcagctctgcctttagcagctgaagaaacagctaatctgcctccttctccacccccatcacctgcctcagaacagactgtcacagtggaggaagcagcaggtggggaatcagctctggctcccagtgtatttaaacaggcaaaggacaaagtctctaattctaccttgtcaaagattcctgctttacagggtagcacaaagtccccaagatacagctcagcctgccctagcacgactaaaagggctacattttctgacagtttattaatacagcccacctcagcaggctccacagaccgtttgccatactcaaaatcagggaacaaggacggagtaaccaagagcccagaaaagcgctcttctctcccaagaccttcctccattctccctcctcggcgaggtgtgtcaggagacagagatgagaattccttctctctcaacagttctatctcttcttcagcacggcggaccaccaggtcagagccaattcgcagagcagggaagagtggtacctcaacacccactacccctgggtctactgccatcactcctggcaccccaccaagttattcttcacgcacaccaggcactcctggaacccctagctatcccaggacccctcacacaccaggaacccccaagtctgccatcttggtgccgagtgagaagaaggtcgccatcatacgtactcctccaaaatctcctgcgactcccaagcagcttcggcttattaaccaaccactgccagacctgaagaatgtcaaatccaaaatcggatcaacagacaacatcaaataccagcctaaaggggggcaggttaggattttaaacaagaagatcgattttagcaaagttcagtccagatgtggttccaaggataacatcaaacattcggctgggggcggaaatgtacaaattgttaccaagaaaatagacctaagccatgtgacatccaaatgtggctctctgaagaacatccgccacaggccaggtggcggacgtgtgaaaattgagagtgtaaaactagatttcaaagaaaaggcccaagctaaagttggttctcttgataatgctcatcatgtacctggaggtggtaatgtcaagattgacagccaaaagttgaacttcagagagcatgctaaagcccgtgtggaccatggggctgagatcattacacagtccccaggcagatccagcgtggcatcaccccgacgactcagcaatgtctcctcgtctggaagcatcaacctgctcgaatctcctcagcttgccactttggctgaggatgtcactgctgcactcgctaagcagggcttgtgaatatttctcatttagcattgaaataataatatttaggcatgagctcttggcaggagtgggctctgagcagttgttatattcattctttataaaccataaaataaataatctcatccccaaa

SEQ ID NO: 18112 - DNA, 9711 bp, Homo sapiens
  source 1..9711: mol_type = unassigned DNA
atggcaaaccgctaaatcgtaagtgagggctgcatcctattgtcagtgaatgatggcggagctgagtggcttgtcatcattctcgaaaattctgagactagtgagctctctccctctctcccactcgccttattttcctgttcgccactgcggggacttctaatttgcagcttccctttccccggcacacacagacacgagctggtggcttgcagactgcgtctgtctggagctagagagccagagagccagcctgtggggataatgctcccggagaaggattctgcagcagttctcaaaggctagacttgagtggtattgctgcatatgcgctgattcttcagcttgtctctaaccgaggaagcattgattgggagctactcattcagaaaattaaaagaaagaagccagaaaatattatcaaccctttgagaacacgacacaacgaactttatattttaccacttccttgaatagttgcaggagaaataacaaggcattgaagaatggcagatgaacggaaagatgaagcaaaggcacctcactggacctcagcaccgctaacagaggcatctgcacactcacatccacctgagattaaggatcaaggcggagcaggggaaggacttgtccgaagcgccaatggattcccatacagggaggatgaagagggtgcctttggagagcatgggtcacagggcacctattcaaataccaaagagaatgggatcaacggagagctgacctcagctgacagagaaacagcagaggaggtgtctgcaaggatagttcaagtagtcactgctgaggctgtagcagtcctgaaaggtgaacaagagaaagaagctcaacataaagaccagactgcagctctgcctttagcagctgaagaaacagctaatctgcctccttctccacccccatcacctgcctcagaacagactgtcacagtggaggaagatttacttacagcctcgaagatggagttccacgatcaacaggaattgactccctctacagctgagccttcagaccagaaggaaaaggagtcagagaagcaaagtaagcctggtgaagaccttaaacatgctgccttagtttctcagccagagacaactaaaacttaccctgataaaaaggacatgcaaggcacggaagaagaaaaagcacccctagctttgtttgggcacactcttgttgccagcctggaagacatgaaacagaagacagaaccaagccttgtagtacctggcattgacctccctaaagagcctccaactccaaaagaacaaaaggactggttcatcgaaatgccaacggaagcaaaaaaggatgagtggggtttagttgcccccatatctcctggccctctgactcccatgagggaaaaagatgtatttgatgatatcccaaaatgggaagggaaacagtttgattctcccatgccaagtccctttcaagggggaagcttcactcttcctttagatgtcatgaagaatgaaatagttacagaaacatcgccctttgcccctgcctttttacagccagatgacaaaaaatctctgcaacaaaccagtggcccagctactgccaaagatagttttaaaattgaagagccccatgaggctaaacctgacaaaatggcagaagcaccaccctcagaggcaatgaccttacccaaagatgctcacattccagttgtagaagaacatgttatggggaaagttttagaggaagaaaaggaggccataaatcaagagactgtgcagcaaagggatactttcacccccagtggacaggaacctatacttactgaaaaggaaactgagctgaagcttgaagaaaaaaccaccatttctgacaaagaagctgtgccaaaagagagtaaacccccaaaacctgcagatgaagaaataggcataattcagacctccacagagcacactttctcagaacagaaagaccaagagcctaccacagatatgttgaaacaggactcgttccctgtaagtttggagcaagcagttacagattcagccatgacctctaaaacactggagaaagccatgaccgaaccatctgcattaattgaaaagagctcaattcaggaactttttgaaatgagagttgatgacaaagataagattgaaggagttggagctgcaacatcagctgagcttgatatgccattttatgaagataaatcaggaatgtccaagtactttgaaacatctgccttgaaagaagaagcaacaaaaagcattgagccaggcagtgattactatgaactgagtgacactagagaaagtgtccatgagtctattgataccatgtctcccatgcataaaaatggtgacaaggagtttcaaacaggaaaagaatcccagcccagtcctccagcacaagaagcagggtacagcactctcgcacagagttatccatcagatttacctgaagaacccagttctcctcaagaaagaatgttcactattgatccaaaagtgtatggagagaaaagggacctccacagtaagaataaggatgatttgacccttagcaggagtttaggacttggtggtaggtctgcaatagaacaaagaagcatgtcaatcaatttgccgatgtcttgcctagattccatagcccttggatttaactttggtcggggacatgatctttctcctctggcttccgatattctaaccaacactagtggaagtatggatgaaggggatgattaccttccagccaccacacctgcactggagaaagccccttgcttccctgtagaaagcaaagaggaagaacagatagagaaagtaaaagctactggagaagaaagtactcaagcggagatatcatgtgagtctcctttcctagccaaagatttttacaaaaatggtactgtcatggcacctgaccttcctgaaatgctagatctggcaggcacaaggtcaagattggcttctgtgagtgcagatgctgaggttgccaggaggaaatcagtcccatcagagactgtggttgaggatagtcgtactggcttgcccccggtaactgatgaaaaccatgtcattgtaaaaacggacagtcagctcgaagacctgggctactgtgtgttcaataagtacacagtcccattgccatcacctgttcaagacagtgagaatttatcaggggagagtggtaccttttacgaaggcactgatgataaagttcgaagagatttggccacagacctttcactgattgaagtgaaactggcagcagccggaagagtcaaagatgagttcagtgttgacaaagaagcatccgcgcatatctctggtgacaaatcaggactgagtaaggagtttgaccaagagaagaaagctaatgataggttggatactgtactagaaaagagtgaagaacatgctgattcaaaagaacatgccaagaaaactgaagaggctggtgatgaaatagaaacattcggattaggagtaacctatgagcaagctttggccaaagatttgtcaataccaacagatgcatcctctgagaaagcagagaagggtcttagttcagtgccagagatagctgaggtagaaccatccaaaaaggtggaacaaggtctggattttgctgtccagggtcaactagatgttaaaattagtgactttggacagatggcttcagggctaaacatagatgatagaagggcaacagagctaaaacttgaggctacacaggacatgaccccctcatccaaagcaccgcaggaggcagatgcatttatgggtgttgagtctggccacatgaaagaaggcactaaagttagtgagacagaagtcaaagagaaggtggccaagcctgacttggtgcaccaggaggctgtagacaaggaggagtcctatgaatctagtggtgagcatgaaagtctcaccatggagtccttgaaagctgatgagggcaagaaggaaacatctccagaatcatctctaattcaagatgagattgccgtcaaattgtcagtggaaataccttgcccacctgctgtttcagaggctgatttagccacagatgagagagctgatgtccagatggaatttattcaggggccaaaagaagaaagcaaagagaccccagatatatccatcacgccttctgatgttgcagagccattgcatgaaacgatcgtatctgaaccagcagagattcagagtgaggaagaagagatagaagcccagggagaatatgataaactgctcttccgctcagacacccttcagataactgacctgggtgtctcaggtgccagggaggaatttgtggagacctgcccaagtgaacacaaaggagtgattgagtctgttgtgaccatcgaggatgatttcatcactgtagtgcaaaccacaactgatgaaggggagtcagggtcccacagcgtgcgttttgcagccctagagcagcctgaggtggaaaggagaccatctcctcatgatgaagaagagtttgaagtagaagaggcagctgaagcccaggcagaacccaaagatggttccccagaggctccagcttcccctgagagagaagaggttgcactttctgaatataagacagaaacctatgacgattacaaagatgagaccaccattgacgactccatcatggacgctgacagcctctgggtggacactcaagatgatgataggagcatcatgacagaacagttagaaactattcctaaagaggagaaagctgaaaaggaagctcggagatcatctcttgagaaacatagaaaagaaaagccttttaaaaccgggagaggcagaatttccactcctgaaagaaaagtagctaaaaaggaacctagcacagtctccagagatgaagtgagaaggaaaaaagcagtttataagaaggctgaacttgctaaaaaaacagaagttcaggcccactctccctccaggaaattcattttaaaacctgctatcaaatatactagaccaactcatctctcctgtgttaagcggaaaaccacagcagcaggtggggaatcagctctggctcccagtgtatttaaacaggcaaaggacaaagtctctgacggagtaaccaagagcccagaaaagcgctcttctctcccaagaccttcctccattctccctcctcggcgaggtgtgtcaggagacagagatgagaattccttctctctcaacagttctatctcttcttcagcacggcggaccaccaggtcagagccaattcgcagagcagggaagagtggtacctcaacacccactacccctgggtctactgccatcactcctggcaccccaccaagttattcttcacgcacaccaggcactcctggaacccctagctatcccaggacccctcacacaccaggaacccccaagtctgccatcttggtgccgagtgagaagaaggtcgccatcatacgtactcctccaaaatctcctgcgactcccaagcagcttcggcttattaaccaaccactgccagacctgaagaatgtcaaatccaaaatcggatcaacagacaacatcaaataccagcctaaaggggggcaggtacaaattgttaccaagaaaatagacctaagccatgtgacatccaaatgtggctctctgaagaacatccgccacaggccaggtggcggacgtgtgaaaattgagagtgtaaaactagatttcaaagaaaaggcccaagctaaagttggttctcttgataatgctcatcatgtacctggaggtggtaatgtcaagattgacagccaaaagttgaacttcagagagcatgctaaagcccgtgtggaccatggggctgagatcattacacagtccccaggcagatccagcgtggcatcaccccgacgactcagcaatgtctcctcgtctggaagcatcaacctgctcgaatctcctcagcttgccactttggctgaggatgtcactgctgcactcgctaagcagggcttgtgaatatttctcatttagcattgaaataataatatttaggcatgagctcttggcaggagtgggctctgagcagttgttatattcattctttataaaccataaaataaataatctcatccccaaactgtagtaattgttacaattttctatttaaaaaatgaatagtacatgcagaaattgacctgatttccatttgcaacaggaagacactggctttacatgggttcaattggacaattatttttgctctgctctgttttgcatggagtattattattttaaaaattgcatttttacctttcatgtgcctgaaggctatccactacattctgaaggccttgttaaaatccaagctgctcatttcactattctgtttctgagtgagaagataaaaactgcccattgtaacttatttcaggttaaattaaaccaaggagtctgattgcaggaagggaagagcatgtaagaaataagtttttttaaagtgttattttgtataaatgggaagaaagattcaattaagttattaacatttgggacctggataattatatcagagtatgtcagtccaataaattatttaactaattaaaaaatagttgcaaagcatttgagctgtggttgaggaagtggtgtaaaagtgcatccattaggaatgatgcactttcattaggatggactcgtgtctgattagaatgtcagttgatcagctagatttgtgtccacactaccagtttcacaccccctttccatctgtttgatacagtattatagatataaatatatatatatttctctgtggccatttgtgatacttcctcatatacttgaatattatacttctttattcacagtatctgtgtctcctgcaccctttggtgttgcaattttagatatgtgaaagtagatgttagcagggttctctccctatttaaaaaaaatacattaaaaaagacaaaaaattttagcatgaagttgctttctgtaacaactcaaagccgtaaccctgttttagtgccagatacaagtctctcccgtgatgctagacaaaaaattatttttctttgctttcaccaacatggagtttgtgggggtgggtccagttatacatgaaagggtttacagattgttggtttaagattatggatttatctcatttttaatcacaggatagtttggggtttattcctattattattcatgaaaccgacttaagattttttctttatttttctttttttttccatttgctaaagttgaaagttgaaactaactataatagtttgaaacatgttttctcatttttccaaatagtatctgtttattaaattctctaatagaagatgtttgtctttcttacccaaagtaaagatcccctgatcagaaagaaaaaatacaatactttgggaagctatagctataaaacacttgagacacagatatctaaatcagtttttttccaagactccaacattgcactctgtaaagtaacacactgtgatctagtattatttatcagtagataatactgttctgactgtatatacagtctagaactcacaaatcaattagttcctctcacaaatcattcatcttagacttacaaataaggaatgaaatagtcaatggcctgattaaggcaaagagctaccaggctagatggacactttttaaaaattttatctgttctttttcttgctcagggctggtaggttggatctgaaccattaaaatcaaatggtccactaggcgtatgatctctttgagccaaatcagttcctgaatataaaggaggaaatgatgaggatgtactgaggcaacggggaagtatagaaacatccaagacaaaagccaagggatgcaaaggcagagacacaggtgctttttggtgacccagtggatatggcaaccagtgtaactgccatacaagaaaccctaggagcaaacccacaccactcattctcagctaagagattttacacaggcaaacgtgtcttaaaccatctataaatcagttattttatatgacagtcaaaaccttagaaaccttaggatcattatatctattttctgcctattaattgctgtgaggtttgatttgaccaatctgggcaatttattcatcagcttcccttgaagtgcaccagaaaatagaagaaaggtgtgtggagacttagggtattttattacatgttttcatagtcttaaatagtgattaaatttctctagaaagaagttaacagctcattagaaaagttttaacctgtgaaataagtatttttctcaacattctttaaagtttttatataagttaacactaggtaaacattctgcatactagaagtcagtttattacaaatacatgtcaaaaataaagattatacaaggcaccaaactactagatttggcattaaaacaaatgtttatttctaatcacaacaaaattataatgaataaatgttcttgctttgtatggaaatacaattctttattaaagttaacagaaaggaactgatcgtttgtaccagtaaaagagagaaacacacaggttaaatatcttcttgtggggttaaggggtagaacctatcttgccttcactctcaagataacgactcaaattaagctttttgagcaccactcttgtggggacacacatacgctgatctaggaatgaaatcttcgtggtctcaattctagatctactatgccagtttctctctggctttagcctttgagaacctgtataagaatacgtaagtaatccagagctgtgaagagtttaaaggccaacttctccagtgaactcaacctctgggtcacttgcaaccagaaattggatacctcataatgatgcaggaaagacccgagttcatgatgagtttcaaaggccacgttcatttaggaaccaactctctctggatttacctgctgagttccagcagcgtgatgggctgacatcccacctacaagtatgacacctgtgtaacaccagctaggtacggctggagaaggctgaagagagaatgccattaaatggaagaatgtactgattgtagtgaccttctccacacacacacacacacacacacacacacacacctacagtaatacagcaagcgtggaataatcagccaatatataacattccatcagtattttattaaggaaataacctgaatgtggttgattttgacatagctgcaattacagttttcttctatttttcaagccacaataaggaaaataaactactcatggtctaaatactagagataaagtagattcatggcttggtaaggaaattttaagcattccttcaaagattgacgtgctaaaataagcattgatgttttgagtttttttacacctaggatttttagcttgggtgtgtaggtgaaggccaagactctctgcaggaaaaagcttattttcaaactcagaaaataaaatgtcaatcataaaaatctacttcaactttagcaaaaagaaaaaaaaatcaacaaaaagtatactctgtatgctgggattccgaggttccaacacactgttacaaatctgtggggggtttctttcttctgataattctagagcctgttaccatagaaaggcatttcttcaatggctggttgtagttagttcatgtttttcaatcaaatttgcaaatgtatttgttgctgtatagtgattgttttgcaaaataaaattgcttgtcacctaactgcta

SEQ ID NO: 18113 - DNA, 2038 bp, Homo sapiens
  source 1..2038: mol_type = unassigned DNA
gctaaatcgtaagtgagggctgcatcctattgtcagtgaatgatggcggagctgagtggcttgtcatcattctcgaaaattctgagactagtgagctctctccctctctcccactcgccttattttcctgttcgccactgcggggacttctaatttgcagcttccctttccccggcacacacagacacgagctggtggcttgcagactgcgtctgtctggagctagagagccagagagccagcctgtggggataatgctcccggagaaggattctgcagcagttctcaaaggctagacttgagtggtattgctgcatatgcgctgattcttcagcttgtctctaaccgaggaagcattgattgggagctactcattcagaaaattaaaagaaagaagccagaaaatattatcaaccctttgagaacacgacacaacgaactttatattttaccacttccttgaatagttgcaggagaaataacaaggcattgaagaatggcagatgaacggaaagatgaagcaaaggcacctcactggacctcagcaccgctaacagaggcatctgcacactcacatccacctgagattaaggatcaaggcggagcaggggaaggacttgtccgaagcgccaatggattcccatacagggaggatgaagagggtgcctttggagagcatgggtcacagggcacctattcaaataccaaagagaatgggatcaacggagagctgacctcagctgacagagaaacagcagaggaggtgtctgcaaggatagttcaagtagtcactgctgaggctgtagcagtcctgaaaggtgaacaagagaaagaagctcaacataaagaccagactgcagctctgcctttagcagctgaagaaacagctaatctgcctccttctccacccccatcacctgcctcagaacagactgtcacagtggaggaagcagcaggtggggaatcagctctggctcccagtgtatttaaacaggcaaaggacaaagtctctgacggagtaaccaagagcccagaaaagcgctcttctctcccaagaccttcctccattctccctcctcggcgaggtgtgtcaggagacagagatgagaattccttctctctcaacagttctatctcttcttcagcacggcggaccaccaggtcagagccaattcgcagagcagggaagagtggtacctcaacacccactacccctgggtctactgccatcactcctggcaccccaccaagttattcttcacgcacaccaggcactcctggaacccctagctatcccaggacccctcacacaccaggaacccccaagtctgccatcttggtgccgagtgagaagaaggtcgccatcatacgtactcctccaaaatctcctgcgactcccaagcagcttcggcttattaaccaaccactgccagacctgaagaatgtcaaatccaaaatcggatcaacagacaacatcaaataccagcctaaaggggggcaggtacaaattgttaccaagaaaatagacctaagccatgtgacatccaaatgtggctctctgaagaacatccgccacaggccaggtggcggacgtgtgaaaattgagagtgtaaaactagatttcaaagaaaaggcccaagctaaagttggttctcttgataatgctcatcatgtacctggaggtggtaatgtcaagattgacagccaaaagttgaacttcagagagcatgctaaagcccgtgtggaccatggggctgagatcattacacagtccccaggcagatccagcgtggcatcaccccgacgactcagcaatgtctcctcgtctggaagcatcaacctgctcgaatctcctcagcttgccactttggctgaggatgtcactgctgcactcgctaagcagggcttgtgaatatttctcatttagcattgaaataataatatttaggcatgagctcttggcaggagtgggctctgagcagttgttatattcattctttataaaccataaaataaataatctcatccccaaactgta

SEQ ID NO: 18114 - DNA, 614 bp, Homo sapiens
  source 1..614: mol_type = unassigned DNA
ggagaccagatgatgacattcataggctgatagactcgactcctggggacacacttggatggaggcaattaaaatgcctgtcaggcatttggtaccagaagcccctatggcaaaccgctaaatcattcttcagcttgtctctaaccgaggaagcattgattgggagctactcattcagaaaattaaaagaaagaagccagaaaatattatcaaccctttgagaacacgacacaacgaactttatattttaccacttccttgaatagttgcaggagaaataacaaggcattgaagaatggcagatgaacggaaagatgaagcaaaggcacctcactggacctcagcaccgctaacagaggcatctgcacactcacatccacctgagattaaggatcaaggcggagcaggggaaggacttgtccgaagcgccaatggattcccatacagggaggatgaagagggtgcctttggagagcatgggtcacagggcacctattcaaataccaaagagaatgggatcaacggagagctgacctcagctgacagagaaacagcagaggaggtgtctgcaaggatagttcaagtagtcactgctgaggctgtagcagtcctga

SEQ ID NO: 18115 - DNA, 5303 bp, Homo sapiens
  source 1..5303: mol_type = unassigned DNA
tcagcttgtctctaaccgaggaagcattgattgggagctactcattcagaaaattaaaagaaagaagccagaaaatattatcaaccctttgagaacacgacacaacgaactttatattttaccacttccttgaatagttgcaggagaaataacaaggcattgaagaatggcagatgaacggaaagatgaagcaaaggcacctcactggacctcagcaccgctaacagaggcatctgcacactcacatccacctgagattaaggatcaaggcggagcaggggaaggacttgtccgaagcgccaatggattcccatacagggaggatgaagagggtgcctttggagagcatgggtcacagggcacctattcaaataccaaagagaatgggatcaacggagagctgacctcagctgacagagaaacagcagaggaggtgtctgcaaggatagttcaagtagtcactgctgaggctgtagcagtcctgaaaggtgaacaagagaaagaagctcaacataaagaccagactgcagctctgcctttagcagctgaagaaacagctaatctgcctccttctccacccccatcacctgcctcagaacagactgtcacagtggaggaagcagcaggtggggaatcagctctggctcccagtgtatttaaacaggcaaaggacaaagtctctgacggagtaaccaagagcccagaaaagcgctcttctctcccaagaccttcctccattctccctcctcggcgaggtgtgtcaggagacagagatgagaattccttctctctcaacagttctatctcttcttcagcacggcggaccaccaggtcagagccaattcgcagagcagggaagagtggtacctcaacacccactacccctgggtctactgccatcactcctggcaccccaccaagttattcttcacgcacaccaggcactcctggaacccctagctatcccaggacccctcacacaccaggaacccccaagtctgccatcttggtgccgagtgagaagaaggtcgccatcatacgtactcctccaaaatctcctgcgactcccaagcagcttcggcttattaaccaaccactgccagacctgaagaatgtcaaatccaaaatcggatcaacagacaacatcaaataccagcctaaaggggggcaggtacaaattgttaccaagaaaatagacctaagccatgtgacatccaaatgtggctctctgaagaacatccgccacaggccaggtggcggacgtgtgaaaattgagagtgtaaaactagatttcaaagaaaaggcccaagctaaagttggttctcttgataatgctcatcatgtacctggaggtggtaatgtcaagattgacagccaaaagttgaacttcagagagcatgctaaagcccgtgtggaccatggggctgagatcattacacagtccccaggcagatccagcgtggcatcaccccgacgactcagcaatgtctcctcgtctggaagcatcaacctgctcgaatctcctcagcttgccactttggctgaggatgtcactgctgcactcgctaagcagggcttgtgaatatttctcatttagcattgaaataataatatttaggcatgagctcttggcaggagtgggctctgagcagttgttatattcattctttataaaccataaaataaataatctcatccccaaactgtagtaattgttacaattttctatttaaaaaatgaatagtacatgcagaaattgacctgatttccatttgcaacaggaagacactggctttacatgggttcaattggacaattatttttgctctgctctgttttgcatggagtattattattttaaaaattgcatttttacctttcatgtgcctgaaggctatccactacattctgaaggccttgttaaaatccaagctgctcatttcactattctgtttctgagtgagaagataaaaactgcccattgtaacttatttcaggttaaattaaaccaaggagtctgattgcaggaagggaagagcatgtaagaaataagtttttttaaagtgttattttgtataaatgggaagaaagattcaattaagttattaacatttgggacctggataattatatcagagtatgtcagtccaataaattatttaactaattaaaaaatagttgcaaagcatttgagctgtggttgaggaagtggtgtaaaagtgcatccattaggaatgatgcactttcattaggatggactcgtgtctgattagaatgtcagttgatcagctagatttgtgtccacactaccagtttcacaccccctttccatctgtttgatacagtattatagatataaatatatatatatttctctgtggccatttgtgatacttcctcatatacttgaatattatacttctttattcacagtatctgtgtctcctgcaccctttggtgttgcaattttagatatgtgaaagtagatgttagcagggttctctccctatttaaaaaaaatacattaaaaaagacaaaaaattttagcatgaagttgctttctgtaacaactcaaagccgtaaccctgttttagtgccagatacaagtctctcccgtgatgctagacaaaaaattatttttctttgctttcaccaacatggagtttgtgggggtgggtccagttatacatgaaagggtttacagattgttggtttaagattatggatttatctcatttttaatcacaggatagtttggggtttattcctattattattcatgaaaccgacttaagattttttctttatttttctttttttttccatttgctaaagttgaaagttgaaactaactataatagtttgaaacatgttttctcatttttccaaatagtatctgtttattaaattctctaatagaagatgtttgtctttcttacccaaagtaaagatcccctgatcagaaagaaaaaatacaatactttgggaagctatagctataaaacacttgagacacagatatctaaatcagtttttttccaagactccaacattgcactctgtaaagtaacacactgtgatctagtattatttatcagtagataatactgttctgactgtatatacagtctagaactcacaaatcaattagttcctctcacaaatcattcatcttagacttacaaataaggaatgaaatagtcaatggcctgattaaggcaaagagctaccaggctagatggacactttttaaaaattttatctgttctttttcttgctcagggctggtaggttggatctgaaccattaaaatcaaatggtccactaggcgtatgatctctttgagccaaatcagttcctgaatataaaggaggaaatgatgaggatgtactgaggcaacggggaagtatagaaacatccaagacaaaagccaagggatgcaaaggcagagacacaggtgctttttggtgacccagtggatatggcaaccagtgtaactgccatacaagaaaccctaggagcaaacccacaccactcattctcagctaagagattttacacaggcaaacgtgtcttaaaccatctataaatcagttattttatatgacagtcaaaaccttagaaaccttaggatcattatatctattttctgcctattaattgctgtgaggtttgatttgaccaatctgggcaatttattcatcagcttcccttgaagtgcaccagaaaatagaagaaaggtgtgtggagacttagggtattttattacatgttttcatagtcttaaatagtgattaaatttctctagaaagaagttaacagctcattagaaaagttttaacctgtgaaataagtatttttctcaacattctttaaagtttttatataagttaacactaggtaaacattctgcatactagaagtcagtttattacaaatacatgtcaaaaataaagattatacaaggcaccaaactactagatttggcattaaaacaaatgtttatttctaatcacaacaaaattataatgaataaatgttcttgctttgtatggaaatacaattctttattaaagttaacagaaaggaactgatcgtttgtaccagtaaaagagagaaacacacaggttaaatatcttcttgtggggttaaggggtagaacctatcttgccttcactctcaagataacgactcaaattaagctttttgagcaccactcttgtggggacacacatacgctgatctaggaatgaaatcttcgtggtctcaattctagatctactatgccagtttctctctggctttagcctttgagaacctgtataagaatacgtaagtaatccagagctgtgaagagtttaaaggccaacttctccagtgaactcaacctctgggtcacttgcaaccagaaattggatacctcataatgatgcaggaaagacccgagttcatgatgagtttcaaaggccacgttcatttaggaaccaactctctctggatttacctgctgagttccagcagcgtgatgggctgacatcccacctacaagtatgacacctgtgtaacaccagctaggtacggctggagaaggctgaagagagaatgccattaaatggaagaatgtactgattgtagtgaccttctccacacacacacacacacacacacacacacacacctacagtaatacagcaagcgtggaataatcagccaatatataacattccatcagtattttattaaggaaataacctgaatgtggttgattttgacatagctgcaattacagttttcttctatttttcaagccacaataaggaaaataaactactcatggtctaaatactagagataaagtagattcatggcttggtaaggaaattttaagcattccttcaaagattgacgtgctaaaataagcattgatgttttgagtttttttacacctaggatttttagcttgggtgtgtaggtgaaggccaagactctctgcaggaaaaagcttattttcaaactcagaaaataaaatgtcaatcataaaaatctacttcaactttagcaaaaagaaaaaaaaatcaacaaaaagtatactctgtatgctgggattccgaggttccaacacactgttacaaatctgtggggggtttctttcttctgataattctagagcctgttaccatagaaaggcatttcttcaatggctggttgtagttagttcatgtttttcaatcaaatttgcaaatgtatttgttgctgtatagtgattgttttgcaaaataaaattgcttgtcacctaactgcta

SEQ ID NO: 18116 - DNA, 5472 bp, Homo sapiens
  source 1..5472: mol_type = unassigned DNA
atggcagatgaacggaaagatgaagcaaaggcacctcactggacctcagcaccgctaacagaggcatctgcacactcacatccacctgagattaaggatcaaggcggagcaggggaaggacttgtccgaagcgccaatggattcccatacagggaggatgaagagggtgcctttggagagcatgggtcacagggcacctattcaaataccaaagagaatgggatcaacggagagctgacctcagctgacagagaaacagcagaggaggtgtctgcaaggatagttcaagtagtcactgctgaggctgtagcagtcctgaaaggtgaacaagagaaagaagctcaacataaagaccagactgcagctctgcctttagcagctgaagaaacagctaatctgcctccttctccacccccatcacctgcctcagaacagactgtcacagtggaggaagcctcgaagatggagttccacgatcaacaggaattgactccctctacagctgagccttcagaccagaaggaaaaggagtcagagaagcaaagtaagcctggtgaagaccttaaacatgctgccttagtttctcagccagagacaactaaaacttaccctgataaaaaggacatgcaaggcacggaagaagaaaaagcacccctagctttgtttgggcacactcttgttgccagcctggaagacatgaaacagaagacagaaccaagccttgtagtacctggcattgacctccctaaagagcctccaactccaaaagaacaaaaggactggttcatcgaaatgccaacggaagcaaaaaaggatgagtggggtttagttgcccccatatctcctggccctctgactcccatgagggaaaaagatgtatttgatgatatcccaaaatgggaagggaaacagtttgattctcccatgccaagtccctttcaagggggaagcttcactcttcctttagatgtcatgaagaatgaaatagttacagaaacatcgccctttgcccctgcctttttacagccagatgacaaaaaatctctgcaacaaaccagtggcccagctactgccaaagatagttttaaaattgaagagccccatgaggctaaacctgacaaaatggcagaagcaccaccctcagaggcaatgaccttacccaaagatgctcacattccagttgtagaagaacatgttatggggaaagttttagaggaagaaaaggaggccataaatcaagagactgtgcagcaaagggatactttcacccccagtggacaggaacctatacttactgaaaaggaaactgagctgaagcttgaagaaaaaaccaccatttctgacaaagaagctgtgccaaaagagagtaaacccccaaaacctgcagatgaagaaataggcataattcagacctccacagagcacactttctcagaacagaaagaccaagagcctaccacagatatgttgaaacaggactcgttccctgtaagtttggagcaagcagttacagattcagccatgacctctaaaacactggagaaagccatgaccgaaccatctgcattaattgaaaagagctcaattcaggaactttttgaaatgagagttgatgacaaagataagattgaaggagttggagctgcaacatcagctgagcttgatatgccattttatgaagataaatcaggaatgtccaagtactttgaaacatctgccttgaaagaagaagcaacaaaaagcattgagccaggcagtgattactatgaactgagtgacactagagaaagtgtccatgagtctattgataccatgtctcccatgcataaaaatggtgacaaggagtttcaaacaggaaaagaatcccagcccagtcctccagcacaagaagcagggtacagcactctcgcacagagttatccatcagatttacctgaagaacccagttctcctcaagaaagaatgttcactattgatccaaaagtgtatggagagaaaagggacctccacagtaagaataaggatgatttgacccttagcaggagtttaggacttggtggtaggtctgcaatagaacaaagaagcatgtcaatcaatttgccgatgtcttgcctagattccatagcccttggatttaactttggtcggggacatgatctttctcctctggcttccgatattctaaccaacactagtggaagtatggatgaaggggatgattaccttccagccaccacacctgcactggagaaagccccttgcttccctgtagaaagcaaagaggaagaacagatagagaaagtaaaagctactggagaagaaagtactcaagcggagatatcatgtgagtctcctttcctagccaaagatttttacaaaaatggtactgtcatggcacctgaccttcctgaaatgctagatctggcaggcacaaggtcaagattggcttctgtgagtgcagatgctgaggttgccaggaggaaatcagtcccatcagagactgtggttgaggatagtcgtactggcttgcccccggtaactgatgaaaaccatgtcattgtaaaaacggacagtcagctcgaagacctgggctactgtgtgttcaataagtacacagtcccattgccatcacctgttcaagacagtgagaatttatcaggggagagtggtaccttttacgaaggcactgatgataaagttcgaagagatttggccacagacctttcactgattgaagtgaaactggcagcagccggaagagtcaaagatgagttcagtgttgacaaagaagcatccgcgcatatctctggtgacaaatcaggactgagtaaggagtttgaccaagagaagaaagctaatgataggttggatactgtactagaaaagagtgaagaacatgctgattcaaaagaacatgccaagaaaactgaagaggctggtgatgaaatagaaacattcggattaggagtaacctatgagcaagctttggccaaagatttgtcaataccaacagatgcatcctctgagaaagcagagaagggtcttagttcagtgccagagatagctgaggtagaaccatccaaaaaggtggaacaaggtctggattttgctgtccagggtcaactagatgttaaaattagtgactttggacagatggcttcagggctaaacatagatgatagaagggcaacagagctaaaacttgaggctacacaggacatgaccccctcatccaaagcaccgcaggaggcagatgcatttatgggtgttgagtctggccacatgaaagaaggcactaaagttagtgagacagaagtcaaagagaaggtggccaagcctgacttggtgcaccaggaggctgtagacaaggaggagtcctatgaatctagtggtgagcatgaaagtctcaccatggagtccttgaaagctgatgagggcaagaaggaaacatctccagaatcatctctaattcaagatgagattgccgtcaaattgtcagtggaaataccttgcccacctgctgtttcagaggctgatttagccacagatgagagagctgatgtccagatggaatttattcaggggccaaaagaagaaagcaaagagaccccagatatatccatcacgccttctgatgttgcagagccattgcatgaaacgatcgtatctgaaccagcagagattcagagtgaggaagaagagatagaagcccagggagaatatgataaactgctcttccgctcagacacccttcagataactgacctgggtgtctcaggtgccagggaggaatttgtggagacctgcccaagtgaacacaaaggagtgattgagtctgttgtgaccatcgaggatgatttcatcactgtagtgcaaaccacaactgatgaaggggagtcagggtcccacagcgtgcgttttgcagccctagagcagcctgaggtggaaaggagaccatctcctcatgatgaagaagagtttgaagtagaagaggcagctgaagcccaggcagaacccaaagatggttccccagaggctccagcttcccctgagagagaagaggttgcactttctgaatataagacagaaacctatgacgattacaaagatgagaccaccattgacgactccatcatggacgctgacagcctctgggtggacactcaagatgatgataggagcatcatgacagaacagttagaaactattcctaaagaggagaaagctgaaaaggaagctcggagatcatctcttgagaaacatagaaaagaaaagccttttaaaaccgggagaggcagaatttccactcctgaaagaaaagtagctaaaaaggaacctagcacagtctccagagatgaagtgagaaggaaaaaagcagtttataagaaggctgaacttgctaaaaaaacagaagttcaggcccactctccctccaggaaattcattttaaaacctgctatcaaatatactagaccaactcatctctcctgtgttaagcggaaaaccacagcagcaggtggggaatcagctctggctcccagtgtatttaaacaggcaaaggacaaagtctctgacggagtaaccaagagcccagaaaagcgctcttctctcccaagaccttcctccattctccctcctcggcgaggtgtgtcaggagacagagatgagaattccttctctctcaacagttctatctcttcttcagcacggcggaccaccaggtcagagccaattcgcagagcagggaagagtggtacctcaacacccactacccctgggtctactgccatcactcctggcaccccaccaagttattcttcacgcacaccaggcactcctggaacccctagctatcccaggacccctcacacaccaggaacccccaagtctgccatcttggtgccgagtgagaagaaggtcgccatcatacgtactcctccaaaatctcctgcgactcccaagcagcttcggcttattaaccaaccactgccagacctgaagaatgtcaaatccaaaatcggatcaacagacaacatcaaataccagcctaaaggggggcaggtacaaattgttaccaagaaaatagacctaagccatgtgacatccaaatgtggctctctgaagaacatccgccacaggccaggtggcggacgtgtgaaaattgagagtgtaaaactagatttcaaagaaaaggcccaagctaaagttggttctcttgataatgctcatcatgtacctggaggtggtaatgtcaagattgacagccaaaagttgaacttcagagagcatgctaaagcccgtgtggaccatggggctgagatcattacacagtccccaggcagatccagcgtggcatcaccccgacgactcagcaatgtctcctcgtctggaagcatcaacctgctcgaatctcctcagcttgccactttggctgaggatgtcactgctgcactcgctaagcagggcttgtga

SEQ ID NO: 18117 - DNA, 5004 bp, Homo sapiens
  source 1..5004: mol_type = unassigned DNA
atggaaaccacaggggaccagggaattgaaggaatggcctatatggacgaaaatagaaatattacatttacctgtcccagaacaccatcagagctgataaataaatcatctcctctagaggttctggaatcagcagcctgtgaaaaactgcccactcctactcctcaagtagtaaaggaaggtgattcctttccagataccttggcaaaaaatgggcaagagatagccccagcccagatttccaaatcattaatggtagataactacaccaaagatggagtcccaggtcaagaaagacccaagggtccctctgctgttgtgccctctacaagcacaggaggagttgctctacctattacaacagccatagaaacagttaacattcatggagatcactctcttaagaataaagctgagcttgctgattccatgaaaaatgaagcagggatcgatgaagggcatgtgataggagaatctgagtcagtgcacagtggtgcgtctaagcattcagtagagaaagtcacagagctagcaaaaggtcacctccttcctggagtgccagtagaagaccagagcctaccaggagaggccagagccctagaaggatatgcagatagaggtaatttcccagcacatccagtgaatgaagagaaagagactaaagaagggtctgttgcagttcagattcctgacttactggaagacaaagcacaaaagctcagtttttgtgaggaccaaaatgctcaagatagaaattccaaaggttcagatagtttgaataagaaggtagatctgactcttttgtctccaaaaagtgaaaatgataaattgaaagaaattagtctggcttgtaaaatcacggaattggaaagcgtttccttgccaacaccagaaatccagtcagatttcttacatagcaaagtcgaagctcctccttcagaggtggcggatacgttagtaataatgactgcttccaagggtgttcgactcccagaacccaaagataagattttggagacacctcagaaaatgacagaaaaatctgaatcaaagacaccaggagaagggaaaaaggaagataaaagcagaatggcagaaccaatgaaaggctacatgagacccaccaagtcccgaggacttactccacttttgccaaagtctacaatccaggaacaagagagacataagcaactgaagtccgctggaatagccaggccagaagaaggaaggcctgtggtgagtgggacaggaaatgacatcaccaccccaccgaacaaggagctcccaccaagcccagagaagaaaacaaagcctttggccaccactcaacctgcaaagacttcaacatcgaaagccaaaacacagcccacttctctccctaagcagccagctcccaccaccattggtgggttgaataaaaaacccatgagccttgcttcaggcttagtgccagctgccccacccaaacgccctgccgtcgcctctgccaggccttccatcttaccttcaaaagacgtgaagccaaagcccattgcagatgcaaaggctcctgagaagcgggcctcaccatccaagccagcttctgccccagcctccagatctgggtccaagagcactcagactgttgcaaaaaccacaacagctgctgctgttgcctcaactggcccaagcagtaggagcccctccacgctcctgcccaagaagcccactgccattaagactgagggaaaacctgcagaagtcaagaagatgactgcaaagtctgtaccagctgacttgagtcgcccaaagagcacctccaccagttccatgaagaaaaccaccactctcagtgggacagcccccgctgcaggggtggttcccagccgagtcaaggccacacccatgccctcccggccctccacaactcctttcatagacaagaagcccacctcggccaaacccagctccaccaccccccggctcagccgcctggccaccaatacttctgctcctgatctgaagaatgtccgctccaaggttggctccacggaaaacatcaagcatcagcctggaggaggccgggccaaagtagagaaaaaaacagaggcagctgctacaacccgaaagcctgaatctaatgcagtcactaaaacagccggcccaattgcaagtgcacagaaacaacctgcggggaaagtccagatagtctccaaaaaagtgagctacagccatattcagtccaagtgtggttccaaggacaatattaagcatgtccctggaggtggtaatgttcagattcagaacaagaaagtggacatctctaaggtctcctccaagtgtgggtctaaggctaacatcaagcacaagcctggtggaggagatgtcaagattgaaagtcagaagttgaacttcaaggagaaggcccaggccaaggtgggatccctcgataatgtgggccacctacctgcaggaggtgctgtgaagactgagggcggtggcagcgaggctcctctgtgtccgggtccccctgctggggaggagccggccatctctgaggcagcgcctgaagctggcgcccccacttcagccagtggcctcaatggccaccccaccctgtcagggggtggtgaccaaagggaggcccagaccttggacagccagatccaggagacaagcatctaatgatgacattctggtctcgtcttccgtctcccccgtgttcccctcttgtctcccctgttcccctctcccttccctcctcccatgtcactgcagattgagacctacaggctgacgttccgggcaaatgccagggcccgcaccgaccacggggccgacattgtctcccgccccccacacttccctggcggccccaactcgggctcccgggtccttggccccctttcccgggctgtccactagaccagtgagcgcttgggcgccgtgctgggcagcccgctaggctcgccttccctcctgctttgcgtgcccggggcagcagcagccctgccccacacctcctctcactccccagcctgggcccatctccctgctttggtcttgccccatcactgcgccactgctccgtggaggaggttgggagggggttggggtggttgaggctaagttgggatctaggagaggagaaccagattctatcctcatctttttttggttctttggtccaaacccaaaagaaactgacatgccctcccttctccctggatctacctggagggaagagtggaggtggattccgagtggtgacaggacgctgaccgtggagcttaagccactgcctctccctctggtcccacaaatgggcgcccccccctccccatgcaggtggtgtcgggcccttcttgctgccctgccccaagttgggggtcagtgctgcctgtccccatgcttaacatacccgcctagctgctgtcacatttttcttgttttgtccttttatttttttctaataacctaaaaactggcaaaatagttctgcaggttgaagccatgtctacatgaaagtcctcagtaagtgttagagggaacagggcggagatatccttatgccacccccgctggaggatgtgggcagcttagggccctggaggcggtgcggcagggaagaggggtgcagaggctgtggctggtgagccggtcaggcacacaaggggcccttggagcgtggactggttggttttgccattttgttgtgtgtatgctgcttttcttttctaaccaagaggctggttttggcatctctgtcccattccctgggatctggtggtcagccctaggataaaaagccagggctggagaacaagaaagggccaggagatggaattccttcaggccggcacccacaccctaggacatgtaagccctcatgtccaagggagcctcatgcagatagtaggaaatcaggtctggaaatttaaaaataaaaggcatgagactaaggctatctgcttcccttatgccctgactggagaggggagggaggagaggcaaggcccacagagggcatcccagctaggccttgggatggctgcagtgaggagaaatcccgggaactgtattgacacaaagattcttattgcacttgtattttttgtattaaagtttgcatggtttctaataaaggattcaaacataagtttgtagtgaaatggcctgggagattccaagggcttctctggagggggattggctgcagtgtagatttgcctctgaggaggctgccccagacttggcctcctcatgccccctcctgacctctgcccttctctggtcctggcatccctggagaaggtaggggtcttgacctaagtttagatttgatctccatgtgcagggaggctgtcctgggcctgacaggtcctccccctttctgaggtagcagtgccttgtggaggtttgacaccatgtccctagctccccaagcacacaccaggaaactgcaggggctcacggaggaagtgctgcctgggccagggggaccagctttcctccgtagagaccatgtgcagaacacttctgctgtgccaagaacatgagggagccagtgttttgtcagcaggaagaaagggcctgctgggatgaaagtgggaaggaaacagggttgcgtagtcaggagacacctcaggggcaacagcacaggcccagagtacctgctgcctccactgcgtctgtcctggggtcatgaggatgctgaggttgacgacaggttccaggtcctttcactcctttggccaaaggttgggggtaggtggcccaagtggcgtgctctctaggtagacaacaggagtggtcagagttccctcaaaggatcctccactccagagcacctgagaaggccgggaccagaggccctgtgtgatgtgtactccgcagctgtttggggtgggacatttctgtacttctcgatttgcttatggctcagccattacctgtgtcagtccatgattctgttgtaacagttttaagagtaaataaataaagctgcctgatgtcccatcacgc

SEQ ID NO: 18118 - DNA, 1564 bp, Homo sapiens
  source 1..1564: mol_type = unassigned DNA
atctgtgaggaaccagtggccaagaagagagaagaattggctcacttcagcaacagcagcagcaactctgggaagaaggaactcggcactgctggattatatctccatagtaagctggagcagattcctgaaggaagcagcaaggaaaaagggcaggaagattttagtgaaactagaattgattcatgctcgcaggtttgccagcgaggagagaaacagccaggacagacggctctggcagggaagaaagaaattgaggtcactgcaacccagagcactccatcgttcctgtttgaaaagcccccacgtgatggaatagccaggccagaagaaggaaggcctgtggtgagtgggacaggaaatgacatcaccaccccaccgaacaaggagctcccaccaagcccagagaagaaaacaaagcccattgcagatgcaaaggctcctgagaagcgggcctcaccatccaagccagcttctgccccagcctccagatctgggtccaagagcactcagactgttgcaaaaaccacaacagctgctgctgttgcctcaactggcccaagcagtaggagcccctccacgctcctgcccaagaagcccactgccattaagactgagggaaaacctgcagaagtcaagaagatgactgcaaagtctgtaccagctgacttgagtcgcccaaagagcacctccaccagttccatgaagaaaaccaccactctcagtgggacagcccccgctgcaggggtggttcccagccgagtcaaggccacacccatgccctcccggccctccacaactcctttcatagacaagaagcccacctcggccaaacccagctccaccaccccccggctcagccgcctggccaccaatacttctgctcctgatctgaagaatgtccgctccaaggttggctccacggaaaacatcaagcatcagcctggaggaggccgggtccagatagtctccaaaaaagtgagctacagccatattcagtccaagtgtggttccaaggacaatattaagcatgtccctggaggtggtaatgttcagattcagaacaagaaagtggacatctctaaggtctcctccaagtgtgggtctaaggctaacatcaagcacaagcctggtggaggagatgtcaagattgaaagtcagaagttgaacttcaaggagaaggcccaggccaaggtgggatccctcgataatgtgggccacctacctgcaggaggtgctgtgaagattgagacctacaggctgacgttccgggcaaatgccagggcccgcaccgaccacggggccgacattgtctcccgccccccacacttccctggcggccccaactcgggctcccgggtccttggccccctttcccgggctgtccactagaccagtgagcgcttgggcgccgtgctgggcagcccgctaggctcgccttccctcctgctttgcgtgcccggggcagcagcagccctgccccacacctcctctcactccccagcctgggcccatctccctgctttggtcttgccccatcactgcgccactgctccgtggagga

SEQ ID NO: 18119 - DNA, 5142 bp, Homo sapiens
  source 1..5142: mol_type = unassigned DNA
acccgctggtggcccggtccgcgtgtgcgccgactctcgcactctcctcgctccgggcgcccagactctgagagagagcgacggccatcatagaacagcgaaggcagtcgatcggcctgcggtccgcttcggcattcgcaggccgcaggcgggaggctagagcccccaggcgcacctcgccccaaccgcccgcggctcgggcagctctgcagagacgtcgtggcggcagggccagcacccattggtccgccacagccctccgccctccccctcgccacgcttattggccggagcggcggcgctcgccgggtaggcggtggcggcgtccctcccttgcgccggccctcaagaggcgacgaggaagcggccgcctccctgcgccccgcccctccggctagctcgctggctcccggctcctcccgacgtctcctacctcctcacggctcttcccggcgctctcctggctcccttctgccccagctccgtctcggcggcggcgggcagttgcagtggtgcagaatggctgacctcagtcttgcagatgcattaacagaaccatctccagacattgagggagagataaagcgggacttcattgccacactagaggcagaggcctttgatgatgttgtgggagaaactgttggaaaaacagactatattcctctcctggatgttgatgagaaaaccgggaactcagagtcaaagaagaaaccgtgctcagaaactagccagattgaagatactccatcttctaaaccaacactcctagccaatggtggtcatggagtagaagggagcgatactacagggtctccaactgaattccttgaagagaaaatggcctaccaggaatacccaaatagccagaactggccagaagataccaacttttgtttccaacctgagcaagtggtcgatcctatccagactgatccctttaagatgtaccatgatgatgacctggcagatttggtctttccctccagtgcgacagctgatacttcaatatttgcaggacaaaatgatcccttgaaagacagttacggtatgtctccctgcaacacagctgttgtacctcaggggtggtctgtggaagccttaaactctccacactcagagtcctttgtttccccagaggctgttgcagaacctcctcagccaacggcagttcccttagagctagccaaggagatagaaatggcatcagaagagaggccaccagcacaagcattggaaataatgatgggactgaagactactgacatggcaccatctaaagaaacagagatggccctcgccaaggacatggcactagctacaaaaaccgaggtggcattggctaaagatatggaatcacccaccaaattagatgtgacactggccaaggacatgcagccatccatggaatcagatatggccctagtcaaggacatggaactacccacagaaaaagaagtggccctggttaaggatgtcagatggcccacagaaacagatgtatcttcagccaagaatgtggtactgcccacagaaacagaggtagccccagccaaggatgtgacactgttgaaagaaacagagagggcatctcctataaaaatggacttagccccttccaaggacatgggaccacccaaagaaaacaagaaagaaacagagagggcatctcctataaaaatggacttggctccttccaaggacatgggaccacccaaagaaaacaagatagtcccagccaaggatttggtattactctcagaaatagaggtggcacaggctaatgacattatatcatccacagaaatatcctctgctgagaaggtggctttgtcctcagaaacagaggtagccctggccagggacatgacactgcccccggaaaccaacgtgatcttgaccaaggataaagcactacctttagaagcagaggtggccccagtcaaggacatggctcaactcccagaaacagaaatagccccggccaaggatgtggctccgtccacagtaaaagaagtgggcttgttgaaggacatgtctccactatcagaaacagaaatggctctgggcaaggatgtgactccacctccagaaacagaagtagttctcatcaagaacgtatgtctgcctccagaaatggaggtggccctgactgaggatcaggtcccagccctcaaaacagaagcacccctggctaaggatggggttctgaccctggccaacaatgtgactccagccaaagatgttccaccactctcagaaacagaggcaacaccagttccaattaaagacatggaaattgcacaaacacaaaaaggaataagtgaggattcccatttagaatctctgcaggatgtggggcagtcagctgcacctactttcatgatttcaccagaaaccgtcacaggaacggggaaaaagtgcagcttgccggccgaggaggattctgtgttagaaaaactaggggaaaggaaaccatgcaacagtcaaccttctgagctttcttcagagacctcaggaatagccaggccagaagaaggaaggcctgtggtgagtgggacaggaaatgacatcaccaccccaccgaacaaggagctcccaccaagcccagagaagaaaacaaagcctttggccaccactcaacctgcaaagacttcaacatcgaaagccaaaacacagcccacttctctccctaagcagccagctcccaccaccattggtgggttgaataaaaaacccatgagccttgcttcaggcttagtgccagctgccccacccaaacgccctgccgtcgcctctgccaggccttccatcttaccttcaaaagacgtgaagccaaagcccattgcagatgcaaaggctcctgagaagcgggcctcaccatccaagccagcttctgccccagcctccagatctgggtccaagagcactcagactgttgcaaaaaccacaacagctgctgctgttgcctcaactggcccaagcagtaggagcccctccacgctcctgcccaagaagcccactgccattaagactgagggaaaacctgcagaagtcaagaagatgactgcaaagtctgtaccagctgacttgagtcgcccaaagagcacctccaccagttccatgaagaaaaccaccactctcagtgggacagcccccgctgcaggggtggttcccagccgagtcaaggccacacccatgccctcccggccctccacaactcctttcatagacaagaagcccacctcggccaaacccagctccaccaccccccggctcagccgcctggccaccaatacttctgctcctgatctgaagaatgtccgctccaaggttggctccacggaaaacatcaagcatcagcctggaggaggccgggccaaagtagagaaaaaaacagaggcagctgctacaacccgaaagcctgaatctaatgcagtcactaaaacagccggcccaattgcaagtgcacagaaacaacctgcggggaaagtccagatagtctccaaaaaagtgagctacagccatattcagtccaagtgtggttccaaggacaatattaagcatgtccctggaggtggtaatgttcagattcagaacaagaaagtggacatctctaaggtctcctccaagtgtgggtctaaggctaacatcaagcacaagcctggtggaggagatgtcaagattgaaagtcagaagttgaacttcaaggagaaggcccaggccaaggtgggatccctcgataatgtgggccacctacctgcaggaggtgctgtgaagactgagggcggtggcagcgaggctcctctgtgtccgggtccccctgctggggaggagccggccatctctgaggcagcgcctgaagctggcgcccccacttcagccagtggcctcaatggccaccccaccctgtcagggggtggtgaccaaagggaggcccagaccttggacagccagatccaggagacaagcatctaatgatgacattctggtctcgtcttccgtctcccccgtgttcccctcttgtctcccctgttcccctctcccttccctcctcccatgtcactgcagattgagacctacaggctgacgttccgggcaaatgccagggcccgcaccgaccacggggccgacattgtctcccgccccccacacttccctggcggccccaactcgggctcccgggtccttggccccctttcccgggctgtccactagaccagtgagcgcttgggcgccgtgctgggcagcccgctaggctcgccttccctcctgctttgcgtgcccggggcagcagcagccctgccccacacctcctctcactccccagcctgggcccatctccctgctttggtcttgccccatcactgcgccactgctccgtggaggaggttgggagggggttggggtggttgaggctaagttgggatctaggagaggagaaccagattctatcctcatctttttttggttctttggtccaaacccaaaagaaactgacatgccctcccttctccctggatctacctggagggaagagtggaggtggattccgagtggtgacaggacgctgaccgtggagcttaagccactgcctctccctctggtcccacaaatgggcgcccccccctccccatgcaggtggtgtcgggcccttcttgctgccctgccccaagttgggggtcagtgctgcctgtccccatgcttaacatacccgcctagctgctgtcacatttttcttgttttgtccttttatttttttctaataacctaaaaactggcaaaatagttctgcaggttgaagccatgtctacatgaaagtcctcagtaagtgttagagggaacagggcggagatatccttatgccacccccgctggaggatgtgggcagcttagggccctggaggcggtgcggcagggaagaggggtgcagaggctgtggctggtgagccggtcaggcacacaaggggcccttggagcgtggactggttggttttgccattttgttgtgtgtatgctgcttttcttttctaaccaagaggctggttttggcatctctgtcccattccctgggatctggtggtcagccctaggataaaaagccagggctggagaacaagaaagggccaggagatggaattc

SEQ ID NO: 18120 - DNA, 2282 bp, Homo sapiens
  source 1..2282: mol_type = unassigned DNA
aagacagatgcagccaatagatacactgcagtggctgacaaaccaagtaaaaggagtaatgatggaaaaagtaaaaaggttaaaaatagttctcctgagaagcacattctggagaataagatagatgcaacaaaaatacatgttcccatggaaaccacaggggaccagggaattgaaggaatggcctatatggacgaaaatagaaatattacatttacctgtcccagaacaccatcagagctgataaataaatcatctcctctagaggttctggaatcagcagcctgtgaaaaactgcccactcctactcctcaagtagtaaaggaaggtgattcctttccagataccttggcaaaaaatgggcaagagatagccccagcccagatttccaaatcattaatggtagataactacaccaaagatggagtcccaggtcaagaaagacccaagggtccctctgctgttgtgccctctacaagcacaggaggagttgctctacctattacaacagccatagaaacagttaacattcatggagatcactctcttaagaataaagctgagcttgctgattccatgaaaaatgaagcagggatcgatgaagggcatgtgataggagaatctgagtcagtgcacagtggtgcgtctaagcattcagtagagaaagtcacagagctagcaaaaggtcacctccttcctggagtgccagtagaagaccagagcctaccaggagaggccagagccctagaaggatatgcagatagaggtaatttcccagcacatccagtgaatgaagagaaagagactaaagaagggtctgttgcagttcagattcctgacttactggaagacaaagcacaaaagctcagtttttgtgaggaccaaaatgctcaagatagaaattccaaaggttcagatagtttgaataagaaggtagatctgactcttttgtctccaaaaagtgaaaatgataaattgaaagaaattagtctggcttgtaaaatcacggaattggaaagcgtttccttgccaacaccagaaatccagtcagatttcttacatagcaaagtcgaagctcctccttcagaggtggcggatacgttagtaataatgactgcttccaagggtgttcgactcccagaacccaaagataagattttggagacacctcagaaaatgacagaaaaatctgaatcaaagacaccaggagaagggaaaaaggaagataaaagcagaatggcagaaccaatgaaaggctacatgagacccaccaagtcccgaggacttactccacttttgccaaagtctacaatccaggaacaagagagacataagcaactgaagtccgctggaatagccaggccagaagaaggaaggcctgtggtgagtgggacaggaaatgacatcaccaccccaccgaacaaggagctcccaccaagcccagagaagaaaacaaagcctttggccaccactcaacctgcaaagacttcaacatcgaaagccaaaacacagcccacttctctccctaagcagccagctcccaccaccattggtgggttgaataaaaaacccatgagccttgcttcaggcttagtgccagctgccccacccaaacgccctgccgtcgcctctgccaggccttccatcttaccttcaaaagacgtgaagccaaagcccattgcagatgcaaaggctcctgagaagcgggcctcaccatccaagccagcttctgccccagcctccagatctgggtccaagagcactcagactgttgcaaaaaccacaacagctgctgctgttgcctcaactggcccaagcagtaggagcccctccacgctcctgcccaagaagcccactgccattaagactgagggaaaacctgcagaagtcaagaagatgactgcaaagtctgtaccagctgacttgagtcgcccaaagagcacctccaccagttccatgaagaaaaccaccactctcagtgggacagcccccgctgcaggggtggttcccagccgagtcaaggccacacccatgccctcccggccctccacaactcctttcatagacaagaagcccacctcggccaaacccagctccaccaccccccggctcagccgcctggccaccaatacttctgctcctgatctgaagaatgtccgctccaaggccaaagtagagaaaaaaacagaggcagctgctacaacccgaaagcctgaatctaatgcagtcactaaaacagccggcccaattgcaagtgcacagaaacaacctgcggggaaagt

SEQ ID NO: 18121 - DNA, 5302 bp, Homo sapiens
  source 1..5302: mol_type = unassigned DNA
aggccccacccgctggtggcccggtccgcgtgtgcgccgactctcgcactctcctcgctccgggcgcccagactctgagagagagcgacggccatcatagaacagcgaaggcagtcgatcggcctgcggtccgcttcggcattcgcaggccgcaggcgggaggctagagcccccaggcgcacctcgccccaaccgcccgcggctcgggcagctctgcagagacgtcgtggcggcagggccagcacccattggtccgccacagccctccgccctccccctcgccacgcttattggccggagcggcggcgctcgccgggtaggcggtggcggcgtccctcccttgcgccggccctcaagaggcgacgaggaagcggccgcctccctgcgccccgcccctccggctagctcgctggctcccggctcctcccgacgtctcctacctcctcacggctcttcccggcgctctcctggctcccttctgccccagctccgtctcggcggcggcgggcagttgcagtggtgcagaatggctgacctcagtcttgcagatgcattaacagaaccatctccagacattgagggagagataaagcgggacttcattgccacactagaggcagaggcctttgatgatgttgtgggagaaactgttggaaaaacagactatattcctctcctggatgttgatgagaaaaccgggaactcagagtcaaagaagaaaccgtgctcagaaactagccagattgaagatactccatcttctaaaccaacactcctagccaatggtggtcatggagtagaagggagcgatactacagggtctccaactgaattccttgaagagaaaatggcctaccaggaatacccaaatagccagaactggccagaagataccaacttttgtttccaacctgagcaagtggtcgatcctatccagactgatccctttaagatgtaccatgatgatgacctggcagatttggtctttccctccagtgcgacagctgatacttcaatatttgcaggacaaaatgatcccttgaaagacagttacggtatgtctccctgcaacacagctgttgtacctcaggggtggtctgtggaagccttaaactctccacactcagagtcctttgtttccccagaggctgttgcagaacctcctcagccaacggcagttcccttagagctagccaaggagatagaaatggcatcagaagagaggccaccagcacaagcattggaaataatgatgggactgaagactactgacatggcaccatctaaagaaacagagatggccctcgccaaggacatggcactagctacaaaaaccgaggtggcattggctaaagatatggaatcacccaccaaattagatgtgacactggccaaggacatgcagccatccatggaatcagatatggccctagtcaaggacatggaactacccacagaaaaagaagtggccctggttaaggatggtgttcgactcccagaacccaaagataagattttggagacacctcagaaaatgacagaaaaatctgaatcaaagacaccaggagaagggaaaaaggaagataaaagcagaatggcagaaccaatgaaaggctacatgagacccaccaagtcccgaggacttactccacttttgccaaagtctacaatccaggaacaagagagacataagcaactgaagtccgctggaatagccaggccagaagaaggaaggcctgtggtgagtgggacaggaaatgacatcaccaccccaccgaacaaggagctcccaccaagcccagagaagaaaacaaagcctttggccaccactcaacctgcaaagacttcaacatcgaaagccaaaacacagcccacttctctccctaagcagccagctcccaccaccattggtgggttgaataaaaaacccatgagccttgcttcaggcttagtgccagctgccccacccaaacgccctgccgtcgcctctgccaggccttccatcttaccttcaaaagacgtgaagccaaagcccattgcagatgcaaaggctcctgagaagcgggcctcaccatccaagccagcttctgccccagcctccagatctgggtccaagagcactcagactgttgcaaaaaccacaacagctgctgctgttgcctcaactggcccaagcagtaggagcccctccacgctcctgcccaagaagcccactgccattaagactgagggaaaacctgcagaagtcaagaagatgactgcaaagtctgtaccagctgacttgagtcgcccaaagagcacctccaccagttccatgaagaaaaccaccactctcagtgggacagcccccgctgcaggggtggttcccagccgagtcaaggccacacccatgccctcccggccctccacaactcctttcatagacaagaagcccacctcggccaaacccagctccaccaccccccggctcagccgcctggccaccaatacttctgctcctgatctgaagaatgtccgctccaaggttggctccacggaaaacatcaagcatcagcctggaggaggccgggttcagattcagaacaagaaagtggacatctctaaggtctcctccaagtgtgggtctaaggctaacatcaagcacaagcctggtggaggagatgtcaagattgaaagtcagaagttgaacttcaaggagaaggcccaggccaaggtgggatccctcgataatgtgggccacctacctgcaggaggtgctgtgaagactgagggcggtggcagcgaggctcctctgtgtccgggtccccctgctggggaggagccggccatctctgaggcagcgcctgaagctggcgcccccacttcagccagtggcctcaatggccaccccaccctgtcagggggtggtgaccaaagggaggcccagaccttggacagccagatccaggagacaagcatctaatgatgacattctggtctcgtcttccgtctcccccgtgttcccctcttgtctcccctgttcccctctcccttccctcctcccatgtcactgcagattgagacctacaggctgacgttccgggcaaatgccagggcccgcaccgaccacggggccgacattgtctcccgccccccacacttccctggcggccccaactcgggctcccgggtccttggccccctttcccgggctgtccactagaccagtgagcgcttgggcgccgtgctgggcagcccgctaggctcgccttccctcctgctttgcgtgcccggggcagcagcagccctgccccacacctcctctcactccccagcctgggcccatctccctgctttggtcttgccccatcactgcgccactgctccgtggaggaggttgggagggggttggggtggttgaggctaagttgggatctaggagaggagaaccagattctatcctcatctttttttggttctttggtccaaacccaaaagaaactgacatgccctcccttctccctggatctacctggagggaagagtggaggtggattccgagtggtgacaggacgctgaccgtggagcttaagccactgcctctccctctggtcccacaaatgggcgcccccccctccccatgcaggtggtgtcgggcccttcttgctgccctgccccaagttgggggtcagtgctgcctgtccccatgcttaacatacccgcctagctgctgtcacatttttcttgttttgtccttttatttttttctaataacctaaaaactggcaaaatagttctgcaggttgaagccatgtctacatgaaagtcctcagtaagtgttagagggaacagggcggagatatccttatgccacccccgctggaggatgtgggcagcttagggccctggaggcggtgcggcagggaagaggggtgcagaggctgtggctggtgagccggtcaggcacacaaggggcccttggagcgtggactggttggttttgccattttgttgtgtgtatgctgcttttcttttctaaccaagaggctggttttggcatctctgtcccattccctgggatctggtggtcagccctaggataaaaagccagggctggagaacaagaaagggccaggagatggaattccttcaggccggcacccacaccctaggacatgtaagccctcatgtccaagggagcctcatgcagatagtaggaaatcaggtctggaaatttaaaaataaaaggcatgagactaaggctatctgcttcccttatgccctgactggagaggggagggaggagaggcaaggcccacagagggcatcccagctaggccttgggatggctgcagtgaggagaaatcccgggaactgtattgacacaaagattcttattgcacttgtattttttgtattaaagtttgcatggtttctaataaaggattcaaacataagtttgtagtgaaatggcctgggagattccaagggcttctctggagggggattggctgcagtgtagatttgcctctgaggaggctgccccagacttggcctcctcatgccccctcctgacctctgcccttctctggtcctggcatccctggagaaggtaggggtcttgacctaagtttagatttgatctccatgtgcagggaggctgtcctgggcctgacaggtcctccccctttctgaggtagcagtgccttgtggaggtttgacaccatgtccctagctccccaagcacacaccaggaaactgcaggggctcacggaggaagtgctgcctgggccagggggaccagctttcctccgtagagaccatgtgcagaacacttctgctgtgccaagaacatgagggagccagtgttttgtcagcaggaagaaagggcctgctgggatgaaagtgggaaggaaacagggttgcgtagtcaggagacacctcaggggcaacagcacaggcccagagtacctgctgcctccactgcgtctgtcctggggtcatgaggatgctgaggttgacgacaggttccaggtcctttcactcctttggccaaaggttgggggtaggtggcccaagtggcgtgctctctaggtagacaacaggagtggtcagagttccctcaaaggatcctccactccagagcacctgagaaggccgggaccagaggccctgtgtgatgtgtactccgcagctgtttggggtgggacatttctgtacttctcgatttgcttatggctcagccattacctgtgtcagtccatgattctgttgtaacagttttaagagtaaataaataaagctgcctgatgtcccatcacgc

SEQ ID NO: 18122 - DNA, 5590 bp, Homo sapiens
  source 1..5590: mol_type = unassigned DNA
ctcctcacggctcttcccggcgctctcctggctcccttctgccccagctccgtctcggcggcggcgggcagttgcagtggtgcagaatggctgacctcagtcttgcagatgcattaacagaaccatctccagacattgagggagagataaagcgggacttcattgccacactagaggcagaggcctttgatgatgttgtgggagaaactgttggaaaaacagactatattcctctcctggatgttgatgagaaaaccgggaactcagagtcaaagaagaaaccgtgctcagaaactagccagattgaagatactccatcttctaaaccaacactcctagccaatggtggtcatggagtagaagggagcgatactacagggtctccaactgaattccttgaagagaaaatggcctaccaggaatacccaaatagccagaactggccagaagataccaacttttgtttccaacctgagcaagtggtcgatcctatccagactgatccctttaagatgtaccatgatgatgacctggcagatttggtctttccctccagtgcgacagctgatacttcaatatttgcaggacaaaatgatcccttgaaagacagttacggtatgtctccctgcaacacagctgttgtacctcaggggtggtctgtggaagccttaaactctccacactcagagtcctttgtttccccagaggctgttgcagaacctcctcagccaacggcagttcccttagagctagccaaggagatagaaatggcatcagaagagaggccaccagcacaagcattggaaataatgatgggactgaagactactgacatggcaccatctaaagaaacagagatggccctcgccaaggacatggcactagctacaaaaaccgaggtggcattggctaaagatatggaatcacccaccaaattagatgtgacactggccaaggacatgcagccatccatggaatcagatatggccctagtcaaggacatggaactacccacagaaaaagaagtggccctggttaaggatgtcagatggcccacagaaacagatgtatcttcagccaagaatgtggtactgcccacagaaacagaggtagccccagccaaggatgtgacactgttgaaagaaacagagagggcatctcctataaaaatggacttagccccttccaaggacatgggaccacccaaagaaaacaagaaagaaacagagagggcatctcctataaaaatggacttggctccttccaaggacatgggaccacccaaagaaaacaagatagtcccagccaaggatttggtattactctcagaaatagaggtggcacaggctaatgacattatatcatccacagaaatatcctctgctgagaaggtggctttgtcctcagaaacagaggtagccctggccagggacatgacactgcccccggaaaccaacgtgatcttgaccaaggataaagcactacctttagaagcagaggtggccccagtcaaggacatggctcaactcccagaaacagaaatagccccggccaaggatgtggctccgtccacagtaaaagaagtgggcttgttgaaggacatgtctccactatcagaaacagaaatggctctgggcaaggatgtgactccacctccagaaacagaagtagttctcatcaagaacgtatgtctgcctccagaaatggaggtggccctgactgaggatcaggtcccagccctcaaaacagaagcacccctggctaaggatggggttctgaccctggccaacaatgtgactccagccaaagatgttccaccactctcagaaacagaggcaacaccagttccaattaaagacatggaaattgcacaaacacaaaaaggaataagtgaggattcccatttagaatctctgcaggatgtggggcagtcagctgcacctactttcatgatttcaccagaaaccgtcacaggaacggggaaaaagtgcagcttgccggccgaggaggattctgtgttagaaaaactaggggaaaggaaaccatgcaacagtcaaccttctgagctttcttcagagacctcaggaatagccaggccagaagaaggaaggcctgtggtgagtgggacaggaaatgacatcaccaccccaccgaacaaggagctcccaccaagcccagagaagaaaacaaagcctttggccaccactcaacctgcaaagacttcaacatcgaaagccaaaacacagcccacttctctccctaagcagccagctcccaccaccattggtgggttgaataaaaaacccatgagccttgcttcaggcttagtgccagctgccccacccaaacgccctgccgtcgcctctgccaggccttccatcttaccttcaaaagacgtgaagccaaagcccattgcagatgcaaaggctcctgagaagcgggcctcaccatccaagccagcttctgccccagcctccagatctgggtccaagagcactcagactgttgcaaaaaccacaacagctgctgctgttgcctcaactggcccaagcagtaggagcccctccacgctcctgcccaagaagcccactgccattaagactgagggaaaacctgcagaagtcaagaagatgactgcaaagtctgtaccagctgacttgagtcgcccaaagagcacctccaccagttccatgaagaaaaccaccactctcagtgggacagcccccgctgcaggggtggttcccagccgagtcaaggccacacccatgccctcccggccctccacaactcctttcatagacaagaagcccacctcggccaaacccagctccaccaccccccggctcagccgcctggccaccaatacttctgctcctgatctgaagaatgtccgctccaaggttggctccacggaaaacatcaagcatcagcctggaggaggccgggccaaagtagagaaaaaaacagaggcagctgctacaacccgaaagcctgaatctaatgcagtcactaaaacagccggcccaattgcaagtgcacagaaacaacctgcggggaaagtccagatagtctccaaaaaagtgagctacagccatattcagtccaagtgtggttccaaggacaatattaagcatgtccctggaggtggtaatgttcagattcagaacaagaaagtggacatctctaaggtctcctccaagtgtgggtctaaggctaacatcaagcacaagcctggtggaggagatgtcaagattgaaagtcagaagttgaacttcaaggagaaggcccaggccaaggtgggatccctcgataatgtgggccacctacctgcaggaggtgctgtgaagattgagacctacaggctgacgttccgggcaaatgccagggcccgcaccgaccacggggccgacattgtctcccgccccccacacttccctggcggccccaactcgggctcccgggtccttggccccctttcccgggctgtccactagaccagtgagcgcttgggcgccgtgctgggcagcccgctaggctcgccttccctcctgctttgcgtgcccggggcagcagcagccctgccccacacctcctctcactccccagcctgggcccatctccctgctttggtcttgccccatcactgcgccactgctccgtggaggaggttgggagggggttggggtggttgaggctaagttgggatctaggagaggagaaccagattctatcctcatctttttttggttctttggtccaaacccaaaagaaactgacatgccctcccttctccctggatctacctggagggaagagtggaggtggattccgagtggtgacaggacgctgaccgtggagcttaagccactgcctctccctctggtcccacaaatgggcgcccccccctccccatgcaggtggtgtcgggcccttcttgctgccctgccccaagttgggggtcagtgctgcctgtccccatgcttaacatacccgcctagctgctgtcacatttttcttgttttgtccttttatttttttctaataacctaaaaactggcaaaatagttctgcaggttgaagccatgtctacatgaaagtcctcagtaagtgttagagggaacagggcggagatatccttatgccacccccgctggaggatgtgggcagcttagggccctggaggcggtgcggcagggaagaggggtgcagaggctgtggctggtgagccggtcaggcacacaaggggcccttggagcgtggactggttggttttgccattttgttgtgtgtatgctgcttttcttttctaaccaagaggctggttttggcatctctgtcccattccctgggatctggtggtcagccctaggataaaaagccagggctggagaacaagaaagggccaggagatggaattccttcaggccggcacccacaccctaggacatgtaagccctcatgtccaagggagcctcatgcagatagtaggaaatcaggtctggaaatttaaaaataaaaggcatgagactaaggctatctgcttcccttatgccctgactggagaggggagggaggagaggcaaggcccacagagggcatcccagctaggccttgggatggctgcagtgaggagaaatcccgggaactgtattgacacaaagattcttattgcacttgtattttttgtattaaagtttgcatggtttctaataaaggattcaaacataagtttgtagtgaaatggcctgggagattccaagggcttctctggagggggattggctgcagtgtagatttgcctctgaggaggctgccccagacttggcctcctcatgccccctcctgacctctgcccttctctggtcctggcatccctggagaaggtaggggtcttgacctaagtttagatttgatctccatgtgcagggaggctgtcctgggcctgacaggtcctccccctttctgaggtagcagtgccttgtggaggtttgacaccatgtccctagctccccaagcacacaccaggaaactgcaggggctcacggaggaagtgctgcctgggccagggggaccagctttcctccgtagagaccatgtgcagaacacttctgctgtgccaagaacatgagggagccagtgttttgtcagcaggaagaaagggcctgctgggatgaaagtgggaaggaaacagggttgcgtagtcaggagacacctcaggggcaacagcacaggcccagagtacctgctgcctccactgcgtctgtcctggggtcatgaggatgctgaggttgacgacaggttccaggtcctttcactcctttggccaaaggttgggggtaggtggcccaagtggcgtgctctctaggtagacaacaggagtggtcagagttccctcaaaggatcctccactccagagcacctgagaaggccgggaccagaggccctgtgtgatgtgtactccgcagctgtttggggtgggacatttctgtacttctcgatttgcttatggctcagccattacctgtgtcagtccatgattctgttgtaacagttttaagagtaaataaataaagctgcctgatgtcccatc

SEQ ID NO: 18123 - DNA, 3478 bp, Homo sapiens
  source 1..3478: mol_type = unassigned DNA
cttagtgcttggattggcaccatactgtgttttaaattgcagatctaaacagagtgctagttcacgggaaattacattctcagattaaagtagcattttgttgtgcagaaagcagcaggttccttcctttctttcgctttcattcattcttcctttctttctttctttcacatttgtaagtgcatttaatactcaactgcttgaggagagaggggcattgagggagagatgaattttgtcatgaatactggggaattggtgtgatgtcactgcaagctctgtgtgatcgtaggtggtattagagctccaggagcgaaagcagggagagcagtggaggagagacgatgtcgctctcagacaagcagacagcctctctcactgccgcgtacggtcagctcagtaagggcaagcctgcagagtgccgaatggactccccaaaagaaatcagtcaagccggattcgaatggcagaggacagagggcaaactgaatgaaattgggctgaatgtcagcatggacgggcaaccaaaagatgggcttgtgaagaatgccagcttcctggagcagaacaagctctgcttttttgaggggaagctagacaaagagctgagcattgaaatgcaggacaaggactgtcaagaagcctcaggtcaccttgagagcaggtatgtgatttcagagacctgccatcccttggaggggaactcggtacaccagaagacctccgagttccatctgggactcatagaggggccagacaaaaacaaaaccattccagttcaggggaaggtggcagggaagaatggactagagaccaagagccagtcagatctggatttccctggggctgctgacatccctaccagatatgttaaggagcaggaaaccagtgtttggaaccccagctttcatccagtggctcaaggctctctgggctcaagggaagcaactccgggagagatggagaatagcatcacccctggctgcccagtgattggggtggtaaatgataactctgagcagctgaagtgtgagtccccactcctggtgtctctagcccacccagcccccattattgagcattcacccaccaccattccgccaatcactatggtgttcacccaggaacatttgaatgcaagctgtcacatcagagaccatgataaggagttggagaaattgagttctaccgaggaggctgtgctcaaccaagccccccagcagaaaaaggcagtgcgcagggccctgtctgaatgttctcacctctcagttcccccagctgtcaaccttgcagataagtaccctgaactccctgcccgagaagagccttcttctggcctgctgcctccccctagtagcccaatgcctagtcctacacctgggaaactgggagctcctgctatgaagcgctccatgactgtgggtgaggaacagacagctagctacaaattgagccctgggaaactgcccatcttgtctactaaagagatacctcctttcatctgtgaggaaccagtggccaagaagagagaagaattggctcacttcagcaacagcagcagcaactctgggaagaaggaactcggcactgctggattatatctccatagtaagctggagcagattcctgaaggaagcagcaaggaaaaagggcaggaagattttagtgaaactagaattgattcatgctcgcaggtttgccagcgaggagagaaacagccaggacagacggctctggcagggaagaaagaaattgaggtcactgcaacccagagcactccatcgttcctgtttgaaaagcccccacgtgatggaatagccaggccagaagaaggaaggcctgtggtgagtgggacaggaaatgacatcaccaccccaccgaacaaggagctcccaccaagcccagagaagaaaacaaagcccattgcagatgcaaaggctcctgagaagcgggcctcaccatccaagccagcttctgccccagcctccagatctgggtccaagagcactcagactgttgcaaaaaccacaacagctgctgctgttgcctcaactggcccaagcagtaggagcccctccacgctcctgcccaagaagcccactgctgacttgagtcgcccaaagagcacctccaccagttccatgaagaaaaccaccactctcagtgggacagcccccgctgcaggggtggttcccagccgagtcaaggccacacccatgccctcccggccctccacaactcctttcatagacaagaagcccacctcggccaaacccagctccaccaccccccggctcagccgcctggccaccaatacttctgctcctgatctgaagaatgtccgctccaaggttggctccacggaaaacatcaagcatcagcctggaggaggccgggtccagatagtctccaaaaaagtgagctacagccatattcagtccaagtgtggttccaaggacaatattaagcatgtccctggaggtggtaatgttcagattcagaacaagaaagtggacatctctaaggtctcctccaagtgtgggtctaaggctaacatcaagcacaagcctggtggaggagatgtcaagattgaaagtcagaagttgaacttcaaggagaaggcccaggccaaggtgggatccctcgataatgtgggccacctacctgcaggaggtgctgtgaagattgagacctacaggctgacgttccgggcaaatgccagggcccgcaccgaccacggggccgacattgtctcccgccccccacacttccctggcggccccaactcgggctcccgggtccttggccccctttcccgggctgtccactagaccagtgagcgcttgggcgccgtgctgggcagcccgctaggctcgccttccctcctgctttgcgtgcccggggcagcagcagccctgccccacacctcctctcactccccagcctgggcccatctccctgctttggtcttgccccatcactgcgccactgctccgtggaggaggttgggagggggttggggtggttgaggctaagttgggatctaggagaggagaaccagattctatcctcatctttttttggttctttggtccaaacccaaaagaaactgacatgccctcccttctccctggatctacctggagggaagagtggaggtggattccgagtggtgacaggacgctgaccgtggagcttaagccactgcctctccctctggtcccacaaatgggcgcccccccctccccatgcaggtggtgtcgggcccttcttgctgccctgccccaagttgggggtcagtgctgcctgtccccatgcttaacatacccgcctagctgctgtcacatttttcttgttttgtccttttatttttttctaataacctaaaaactggcaaaatagttctgcaggttgaagccatgtctacatgaaagtcctcagtaagtgttagagggaacagggcggagatatccttatg

SEQ ID NO: 18124 - DNA, 8920 bp, Homo sapiens
  source 1..8920: mol_type = unassigned DNA
acctcctcacggctcttcccggcgctctcctggctcccttctgccccagctccgtctcggcggcggcgggcagttgcagtggtgcagaatggctgacctcagtcttgcagatgcattaacagaaccatctccagacattgagggagagataaagcgggacttcattgccacactagaggcagaggcctttgatgatgttgtgggagaaactgttggaaaaacagactatattcctctcctggatgttgatgagaaaaccgggaactcagagtcaaagaagaaaccgtgctcagaaactagccagattgaagacctcccactacccccacaccctgccagcctttcttttcatcttcctcttgatactccatcttctaaaccaacactcctagccaatggtggtcatggagtagaagggagcgatactacagggtctccaactgaattccttgaagagaaaatggcctaccaggaatacccaaatagccagaactggccagaagataccaacttttgtttccaacctgagcaagtggtcgatcctatccagactgatccctttaagatgtaccatgatgatgacctggcagatttggtctttccctccagtgcgacagctgatacttcaatatttgcaggacaaaatgatcccttgaaagacagttacggtatgtctccctgcaacacagctgttgtacctcaggggtggtctgtggaagccttaaactctccacactcagagtcctttgtttccccagaggctgttgcagaacctcctcagccaacggcagttcccttagagctagccaaggagatagaaatggcatcagaagagaggccaccagcacaagcattggaaataatgatgggactgaagactactgacatggcaccatctaaagaaacagagatggccctcgccaaggacatggcactagctacaaaaaccgaggtggcattggctaaagatatggaatcacccaccaaattagatgtgacactggccaaggacatgcagccatccatggaatcagatatggccctagtcaaggacatggaactacccacagaaaaagaagtggccctggttaaggatgtcagatggcccacagaaacagatgtatcttcagccaagaatgtggtactgcccacagaaacagaggtagccccagccaaggatgtgacactgttgaaagaaacagagagggcatctcctataaaaatggacttagccccttccaaggacatgggaccacccaaagaaaacaagaaagaaacagagagggcatctcctataaaaatggacttggctccttccaaggacatgggaccacccaaagaaaacaagatagtcccagccaaggatttggtattactctcagaaatagaggtggcacaggctaatgacattatatcatccacagaaatatcctctgctgagaaggtggctttgtcctcagaaacagaggtagccctggccagggacatgacactgcccccggaaaccaacgtgatcttgaccaaggataaagcactacctttagaagcagaggtggccccagtcaaggacatggctcaactcccagaaacagaaatagccccggccaaggatgtggctccgtccacagtaaaagaagtgggcttgttgaaggacatgtctccactatcagaaacagaaatggctctgggcaaggatgtgactccacctccagaaacagaagtagttctcatcaagaacgtatgtctgcctccagaaatggaggtggccctgactgaggatcaggtcccagccctcaaaacagaagcacccctggctaaggatggggttctgaccctggccaacaatgtgactccagccaaagatgttccaccactctcagaaacagaggcaacaccagttccaattaaagacatggaaattgcacaaacacaaaaaggaataagtgaggattcccatttagaatctctgcaggatgtggggcagtcagctgcacctactttcatgatttcaccagaaaccgtcacaggaacggggaaaaagtgcagcttgccggccgaggaggattctgtgttagaaaaactaggggaaaggaaaccatgcaacagtcaaccttctgagctttcttcagagacctcagccaacttcatgtattgcggtacccctcccacacaagccaaacaagtttgcagacccagtgaccgcaggtcaacccggcccaagcctgccagggtccctcctgagctgctgggaggctctcctccatggaagactcttgatcacaggctgggccactgctctttgtctgagtcaggttgggtctctggttcatcctcctgtggtgggcctgggaaccaaagaaaaagtattcatgttgactcacttgaaccccagagggatcttggcagggaggcctgggatatagaaagcacaccaataatgatgaagaaaaagaagaagaaaccaaagcaaaagagatattctcaaccacgggctggaggaccttcggatgatgacaatgcagataagcctaaaggtcatccatttgcagctgacacacaaaaatcaggtgttctccccagccagcctaccactatgggtacagaatatggacttgtatctggagaaaacttgaaaagggaatgtttagttaactccagtgcagccagactggtagctgagaactttgtctcagagagtctcagaattcctttatatccttctgaagaagcccccaaaactgcaataagttctcagtctaagctgagagtagaggaagagagcaaaagtaacaagtcagtactacaaaaccaagacaagaaattgctgaagcaacatgaatacaaaccacagcctgcaccccacctgaagactcctgtagataaaagccagtcagtaggccctctcaatctgaaaggacccctagcagaagtttctgcatacaatgtagaaacccctttggatatcagacttaaagagggttgctctcctttcttggaccaagaggttatgggtgtagtttcaaaacccacagcagcaaaagaaataccaaatttggtacccactttgatagcaagtaatccattagaatgtaatctaaaagaagggaataatgaaagtaaaatgactaaactgcagaatgtcaaactgaaggagtttcctgaaggagctgaagaggataaagaactaaaaaaggaagcttttcccaacgaaagacaagagatcagcatctttacttctgagcagctgcagggccaagtgttggtacaggtccctggggtagagaatgaaccatttaagagaatggcaggtgatggcaaaagcaggaagggaaggggaagttctgggaaaatgagaacagattctgggaaggtaaaagcaaaatctgagctgccatttcttctggacagccagaaggacggaagggctgttctcataccgagtgagccagtctctaaaactgaaggaatgactactcaggataagagtgaggagctggggctgaattcttcaaagcaaccaggcactaaggctgatctcacggaggcagtggtgatgggggagcctaaagagatgactcagcctaaggtggcaggcaccatgcaggcattgattcctttggaaagtggatcaggcatgactcagacttctggtgttagcacagaaacaggagatgtagtcaaagatatgggtgtcaataaccagagcaaggaaggaaggtgtccatggaaggatcatgaggcagctccctggatttctgaaaagcctaaaaagagaggcaatgaaggcaaaagcaaaaagtttaaaaataattattccacacagcctgctagaatggagaggaaggaagaaatccttaacccaccttttgaagggaaggatggagatactggtagtattccccataaaagcaaggaaataggatttactttccccaaaatgcatgattcttcgttctcacatacaccagatacacccacagtggaagcagttgacaggaagggtggaaattttcaggttaattttgttgagcttgggactcttggggaaaacaagataagcacagtcaaggcttctactgttactgaaccacctgccaaggtgacagatgtgagctgccaagagcaaatccagggggcaggatttgttccttcagtagtatctgaggagaataagacagatgcagccaatagatacactgcagtggctgacaaaccaagtaaaaggagtaatgatggaaaaagtaaaaaggttaaaaatagttctcctgagaagcacattctggagaataagatagatgcaacaaaaatacatgttcccatggaaaccacaggggaccagggaattgaaggaatggcctatatggacgaaaatagaaatattacatttacctgtcccagaacaccatcagagctgataaataaatcatctcctctagaggttctggaatcagcagcctgtgaaaaactgcccactcctactcctcaagtagtaaaggaaggtgattcctttccagataccttggcaaaaaatgggcaagagatagccccagcccagatttccaaatcattaatggtagataactacaccaaagatggagtcccaggtcaagaaagacccaagggtccctctgctgttgtgccctctacaagcacaggaggagttgctctacctattacaacagccatagaaacagttaacattcatggagatcactctcttaagaataaagctgagcttgctgattccatgaaaaatgaagcagggatcgatgaagggcatgtgataggagaatctgagtcagtgcacagtggtgcgtctaagcattcagtagagaaagtcacagagctagcaaaaggtcacctccttcctggagtgccagtagaagaccagagcctaccaggagaggccagagccctagaaggatatgcagatagaggtaatttcccagcacatccagtgaatgaagagaaagagactaaagaagggtctgttgcagttcagattcctgacttactggaagacaaagcacaaaagctcagtttttgtgaggaccaaaatgctcaagatagaaattccaaaggttcagatagtttgaataagaaggtagatctgactcttttgtctccaaaaagtgaaaatgataaattgaaagaaattagtctggcttgtaaaatcacggaattggaaagcgtttccttgccaacaccagaaatccagtcagatttcttacatagcaaagtcgaagctcctccttcagaggtggcggatacgttagtaataatgactgcttccaagggtgttcgactcccagaacccaaagataagattttggagacacctcagaaaatgacagaaaaatctgaatcaaagacaccaggagaagggaaaaaggaagataaaagcagaatggcagaaccaatgaaaggctacatgagacccaccaagtcccgaggacttactccacttttgccaaagtctacaatccaggaacaagagagacataagcaactgaagtccgctggaatagccaggccagaagaaggaaggcctgtggtgagtgggacaggaaatgacatcaccaccccaccgaacaaggagctcccaccaagcccagagaagaaaacaaagcctttggccaccactcaacctgcaaagacttcaacatcgaaagccaaaacacagcccacttctctccctaagcagccagctcccaccaccattggtgggttgaataaaaaacccatgagccttgcttcaggcttagtgccagctgccccacccaaacgccctgccgtcgcctctgccaggccttccatcttaccttcaaaagacgtgaagccaaagcccattgcagatgcaaaggctcctgagaagcgggcctcaccatccaagccagcttctgccccagcctccagatctgggtccaagagcactcagactgttgcaaaaaccacaacagctgctgctgttgcctcaactggcccaagcagtaggagcccctccacgctcctgcccaagaagcccactgccattaagactgagggaaaacctgcagaagtcaagaagatgactgcaaagtctgtaccagctgacttgagtcgcccaaagagcacctccaccagttccatgaagaaaaccaccactctcagtgggacagcccccgctgcaggggtggttcccagccgagtcaaggccacacccatgccctcccggccctccacaactcctttcatagacaagaagcccacctcggccaaacccagctccaccaccccccggctcagccgcctggccaccaatacttctgctcctgatctgaagaatgtccgctccaaggttggctccacggaaaacatcaagcatcagcctggaggaggccgggccaaagtagagaaaaaaacagaggcagctgctacaacccgaaagcctgaatctaatgcagtcactaaaacagccggcccaattgcaagtgcacagaaacaacctgcggggaaagtccagatagtctccaaaaaagtgagctacagccatattcagtccaagtgtggttccaaggacaatattaagcatgtccctggaggtggtaatgttcagattcagaacaagaaagtggacatctctaaggtctcctccaagtgtgggtctaaggctaacatcaagcacaagcctggtggaggagatgtcaagattgaaagtcagaagttgaacttcaaggagaaggcccaggccaaggtgggatccctcgataatgtgggccacctacctgcaggaggtgctgtgaagactgagggcggtggcagcgaggctcctctgtgtccgggtccccctgctggggaggagccggccatctctgaggcagcgcctgaagctggcgcccccacttcagccagtggcctcaatggccaccccaccctgtcagggggtggtgaccaaagggaggcccagaccttggacagccagatccaggagacaagcatctaatgatgacattctggtctcgtcttccgtctcccccgtgttcccctcttgtctcccctgttcccctctcccttccctcctcccatgtcactgcagattgagacctacaggctgacgttccgggcaaatgccagggcccgcaccgaccacggggccgacattgtctcccgccccccacacttccctggcggccccaactcgggctcccgggtccttggccccctttcccgggctgtccactagaccagtgagcgcttgggcgccgtgctgggcagcccgctaggctcgccttccctcctgctttgcgtgcccggggcagcagcagccctgccccacacctcctctcactccccagcctgggcccatctccctgctttggtcttgccccatcactgcgccactgctccgtggaggaggttgggagggggttggggtggttgaggctaagttgggatctaggagaggagaaccagattctatcctcatctttttttggttctttggtccaaacccaaaagaaactgacatgccctcccttctccctggatctacctggagggaagagtggaggtggattccgagtggtgacaggacgctgaccgtggagcttaagccactgcctctccctctggtcccacaaatgggcgcccccccctccccatgcaggtggtgtcgggcccttcttgctgccctgccccaagttgggggtcagtgctgcctgtccccatgcttaacatacccgcctagctgctgtcacatttttcttgttttgtccttttatttttttctaataacctaaaaactggcaaaatagttctgcaggttgaagccatgtctacatgaaagtcctcagtaagtgttagagggaacagggcggagatatccttatgccacccccgctggaggatgtgggcagcttagggccctggaggcggtgcggcagggaagaggggtgcagaggctgtggctggtgagccggtcaggcacacaaggggcccttggagcgtggactggttggttttgccattttgttgtgtgtatgctgcttttcttttctaaccaagaggctggttttggcatctctgtcccattccctgggatctggtggtcagccctaggataaaaagccagggctggagaacaagaaagggccaggagatggaattccttcaggccggcacccacaccctaggacatgtaagccctcatgtccaagggagcctcatgcagatagtaggaaatcaggtctggaaatttaaaaataaaaggcatgagactaaggctatctgcttcccttatgccctgactggagaggggagggaggagaggcaaggcccacagagggcatcccagctaggccttgggatggctgcagtgaggagaaatcccgggaactgtattgacacaaagattcttattgcacttgtattttttgtattaaagtttgcatggtttctaataaaggattcaaacataagtttgtagtgaaatggcctgggagattccaagggcttctctggagggggattggctgcagtgtagatttgcctctgaggaggctgccccagacttggcctcctcatgccccctcctgacctctgcccttctctggtcctggcatccctggagaaggtaggggtcttgacctaagtttagatttgatctccatgtgcagggaggctgtcctgggcctgacaggtcctccccctttctgaggtagcagtgccttgtggaggtttgacaccatgtccctagctccccaagcacacaccaggaaactgcaggggctcacggaggaagtgctgcctgggccagggggaccagctttcctccgtagagaccatgtgcagaacacttctgctgtgccaagaacatgagggagccagtgttttgtcagcaggaagaaagggcctgctgggatgaaagtgggaaggaaacagg

SEQ ID NO: 18125 - DNA, 1533 bp, Homo sapiens
  source 1..1533: mol_type = unassigned DNA
aagaattggctcacttcagcaacagcagcagcaactctgggaagaaggaactcggcactgctggattatatctccatagtaagctggagcagattcctgaaggaagcagcaaggaaaaagggcaggaagattttagtgaaactagaattgattcatgctcgcaggtttgccagcgaggagagaaacagccaggacagacggctctggcagggaagaaagaaattgaggtcactgcaacccagagcactccatcgttcctgtttgaaaagcccccacgtgatggaatagccaggccagaagaaggaaggcctgtggtgagtgggacaggaaatgacatcaccaccccaccgaacaaggagctcccaccaagcccagagaagaaaacaaagcccattgcagatgcaaaggctcctgagaagcgggcctcaccatccaagccagcttctgccccagcctccagatctgggtccaagagcactcagactgttgcaaaaaccacaacagctgctgctgttgcctcaactggcccaagcagtaggagcccctccacgctcctgcccaagaagcccactgccattaagactgagggaaaacctgcagaagtcaagaagatgactgcaaagtctgtaccagctgacttgagtcgcccaaagagcacctccaccagttccatgaagaaaaccaccactctcagtgggacagcccccgctgcaggggtggttcccagccgagtcaaggccacacccatgccctcccggccctccacaactcctttcatagacaagaagcccacctcggccaaacccagctccaccaccccccggctcagccgcctggccaccaatacttctgctcctgatctgaagaatgtccgctccaaggttggctccacggaaaacatcaagcatcagcctggaggaggccgggtccagatagtctccaaaaaagtgagctacagccatattcagtccaagtgtggttccaaggacaatattaagcatgtccctggaggtggtaatgttcagattcagaacaagaaagtggacatctctaaggtctcctccaagtgtgggtctaaggctaacatcaagcacaagcctggtggaggagatgtcaagattgaaagtcagaagttgaacttcaaggagaaggcccaggccaaggtgggatccctcgataatgtgggccacctacctgcaggaggtgctgtgaagattgagacctacaggctgacgttccgggcaaatgccagggcccgcaccgaccacggggccgacattgtctcccgccccccacacttccctggcggccccaactcgggctcccgggtccttggccccctttcccgggctgtccactagaccagtgagcgcttgggcgccgtgctgggcagcccgctaggctcgccttccctcctgctttgcgtgcccggggcagcagcagccctgccccacacctcctctcactccccagcctgggcccatctccctgctttggtcttgccccatcactgcgccactgctccgtggagga

SEQ ID NO: 18126 - DNA, 2743 bp, Homo sapiens
  source 1..2743: mol_type = unassigned DNA
cccggcgctctcctggctcccttctgccccagctccgtctcggcggcggcgggcagttgcagtggtgcagaatggctgacctcagtcttgcagatgcattaacagaaccatctccagacattgagggagagataaagcgggacttcattgccacactagaggcagaggcctttgatgatgttgtgggagaaactgttggaaaaacagactatattcctctcctggatgttgatgagaaaaccgggaactcagagtcaaagaagaaaccgtgctcagaaactagccagattgaagatactccatcttctaaaccaacactcctagccaatggtggtcatggagtagaagggagcgatactacagaagcctagcgtgtctctcaacactggggctgctgcaacaccagaccagtgatctttcctaagcatcgttatacttctaaaaccttcagcattttgcagagctttgcttttcattcctggacatgatgtagaagaaactgagggtagttcttcggggcctatttctgctgatgcctgagcaaacaacctgcttcctcttgtgctctgcagggtttgatggagcctcatttccctttgtgaacacaaagtgcaaaatgaattctttttaattttagtaatttttacaaaggttatctaatgtcttttatttcttgttttctttatgattttatcatttgattcattctcacatttttttcctttaaatatttttagttgacctttttcctttggttttcaaatgttcaacatgaatcagaatagtgtaacaccaaatgagaacatgtgttttcataaaggggttgaggccaccagtactgcagcgaatttccttttcttctccctcctccttccttctctgagcttgcttttagggaaggttaatcttacaggctacctatgtttctctccaccttactaaaatctaaataatgatagatattttaagtttttaaattgagtagttctgagtaatcctagaatatttttccaaattaaataatcctttattatttgcaagttgggccaaatttttttttttttggagacggactcttaacaatctaagattgtttcaacaggactttcttattcccattcctaattttttcaaactaattgcttaaatctagaaccagttgagattagtactgtacaatggtatgctttgattgtatttatagaaatataacataaaacatggaccatgttttgaaatcttagaggaattctggtttaaaatctgaaatactttaaagttttctatccttttactgattatgcagcttcttataacccccaaggtacagattatttcagcttaaaagaaataattggcaccatgttctgagaaagattttgagatatacattgttttttgtttttgagacagggtctcactcttgcctaggctggagtgcggtggcgcgatcttggcttactgcaccctctgcctcccaggttcaagtggttctcctgcctcagcctcccaagtagctgggattataggtgtgcgccaccacaccagctaatttttgtatttttagtagagacggggttttactttgttggccaggctggtctcgaactcctgatctcaagtgatccacccgccttggccacccaaagtgctgggattacaggtgtgagacactgtgcctggccagatatacattgttttagatcccctgatacagaactacttttgagatggtaagattagaatatcatgaaagtttaaactgaatccttgcagcgacttccggaatttaggaagcattccctcttctacaggggtctggtcacaagggctggattctctgacaaaaatttcttctatggattctggacagaagacacttgagggtgatatgttttaaaggaaagaggttatgcttatcttcttagcagttgataaaatattaaaactctcttgccatagagaatacaccatcaaagaaaacacaaccctttccctttggtgtacagttatttattaagttgattttggggtttctttcgccagggatcttttcaaaactggtagtagttatttttaaaaatcatgtttgacatctttctattgctcgtaaccagtccctgtagctgtctaagttatgggtggagaagcctgggtatgactttccgttgtgtacactcacacttcatgattgacatttatttattcttttatttccatttggttatgcttatttttgtttgaaatttgtttttttcaaatatgtttcctttttgaacttacagaattgttgaaattttctactaacagccagctaaaatttggtatatgttagctctatctgtttcacttggacgtttcattttgaaagaaagaaattttatgtttcacatatagttttatacaaagtagccagtcccataatgaaatgctgtattgccatagtggtcacacccaagtggtccagtatctcaatggtgaggcagccagactggtcagggctgctttgttgaaatgtgatgattttcatatgccttctttctctttctctctctctttttttttccttttttggcccaatgttgaagatgtagaactttgtttttaaataatgtttttataatttcattcgtatacctaagtttgtattttttgtgactttggacttcaacagtttgtatattgggacttctaatgtgattactgtactaaataaattccactaataaacatcttacattaa

SEQ ID NO: 18127 - DNA, 6762 bp, Homo sapiens
  source 1..6762: mol_type = unassigned DNA
ggacggccgagcggcagggcgctcgcgcgcgcccactagtggccggaggagaaggctcccgcggaggccgcgctgcccgccccctcccctggggaggctcgcgttcccgctgctcgcgcctgcgccgcccgccggcctcaggaacgcgccctcttcgccggcgcgcgccctcgcagtcaccgccacccaccagctccggcaccaacagcagcgccgctgccaccgcccaccttctgccgccgccaccacagccaccttctcctcctccgctgtcctctcccgtcctcgcctctgtcgactatcaggtgaactttgaaccaggatggctgagccccgccaggagttcgaagtgatggaagatcacgctgggacgtacgggttgggggacaggaaagatcaggggggctacaccatgcaccaagaccaagagggtgacacggacgctggcctgaaagaatctcccctgcagacccccactgaggacggatctgaggaaccgggctctgaaacctctgatgctaagagcactccaacagcggaagatgtgacagcacccttagtggatgagggagctcccggcaagcaggctgccgcgcagccccacacggagatcccagaaggaaccacagctgaagaagcaggcattggagacacccccagcctggaagacgaagctgctggtcacgtgacccaagagcctgaaagtggtaaggtggtccaggaaggcttcctccgagagccaggccccccaggtctgagccaccagctcatgtccggcatgcctggggctcccctcctgcctgagggccccagagaggccacacgccaaccttcggggacaggacctgaggacacagagggcggccgccacgcccctgagctgctcaagcaccagcttctaggagacctgcaccaggaggggccgccgctgaagggggcagggggcaaagagaggccggggagcaaggaggaggtggatgaagaccgcgacgtcgatgagtcctccccccaagactcccctccctccaaggcctccccagcccaagatgggcggcctccccagacagccgccagagaagccaccagcatcccaggcttcccagcggagggtgccatccccctccctgtggatttcctctccaaagtttccacagagatcccagcctcagagcccgacgggcccagtgtagggcgggccaaagggcaggatgcccccctggagttcacgtttcacgtggaaatcacacccaacgtgcagaaggagcaggcgcactcggaggagcatttgggaagggctgcatttccaggggcccctggagaggggccagaggcccggggcccctctttgggagaggacacaaaagaggctgaccttccagagccctctgaaaagcagcctgctgctgctccgcgggggaagcccgtcagccgggtccctcaactcaaagctcgcatggtcagtaaaagcaaagacgggactggaagcgatgacaaaaaagccaagacatccacacgttcctctgctaaaaccttgaaaaataggccttgccttagccccaaacaccccactcctggtagctcagaccctctgatccaaccctccagccctgctgtgtgcccagagccaccttcctctcctaaatacgtctcttctgtcacttcccgaactggcagttctggagcaaaggagatgaaactcaagggggctgatggtaaaacgaagatcgccacaccgcggggagcagcccctccaggccagaagggccaggccaacgccaccaggattccagcaaaaaccccgcccgctccaaagacaccacccagctctggtgaacctccaaaatcaggggatcgcagcggctacagcagccccggctccccaggcactcccggcagccgctcccgcaccccgtcccttccaaccccacccacccgggagcccaagaaggtggcagtggtccgtactccacccaagtcgccgtcttccgccaagagccgcctgcagacagcccccgtgcccatgccagacctgaagaatgtcaagtccaagatcggctccactgagaacctgaagcaccagccgggaggcgggaaggtgcagataattaataagaagctggatcttagcaacgtccagtccaagtgtggctcaaaggataatatcaaacacgtcccgggaggcggcagtgtgcaaatagtctacaaaccagttgacctgagcaaggtgacctccaagtgtggctcattaggcaacatccatcataaaccaggaggtggccaggtggaagtaaaatctgagaagcttgacttcaaggacagagtccagtcgaagattgggtccctggacaatatcacccacgtccctggcggaggaaataaaaagattgaaacccacaagctgaccttccgcgagaacgccaaagccaagacagaccacggggcggagatcgtgtacaagtcgccagtggtgtctggggacacgtctccacggcatctcagcaatgtctcctccaccggcagcatcgacatggtagactcgccccagctcgccacgctagctgacgaggtgtctgcctccctggccaagcagggtttgtgatcaggcccctggggcggtcaataattgtggagaggagagaatgagagagtgtggaaaaaaaaagaataatgacccggcccccgccctctgcccccagctgctcctcgcagttcggttaattggttaatcacttaacctgcttttgtcactcggctttggctcgggacttcaaaatcagtgatgggagtaagagcaaatttcatctttccaaattgatgggtgggctagtaataaaatatttaaaaaaaaacattcaaaaacatggccacatccaacatttcctcaggcaattccttttgattcttttttcttccccctccatgtagaagagggagaaggagaggctctgaaagctgcttctgggggatttcaagggactgggggtgccaaccacctctggccctgttgtgggggtgtcacagaggcagtggcagcaacaaaggatttgaaacttggtgtgttcgtggagccacaggcagacgatgtcaaccttgtgtgagtgtgacgggggttggggtggggcgggaggccacgggggaggccgaggcaggggctgggcagaggggagaggaagcacaagaagtgggagtgggagaggaagccacgtgctggagagtagacatccccctccttgccgctgggagagccaaggcctatgccacctgcagcgtctgagcggccgcctgtccttggtggccgggggtgggggcctgctgtgggtcagtgtgccaccctctgcagggcagcctgtgggagaagggacagcgggtaaaaagagaaggcaagctggcaggagggtggcacttcgtggatgacctccttagaaaagactgaccttgatgtcttgagagcgctggcctcttcctccctccctgcagggtagggggcctgagttgaggggcttccctctgctccacagaaaccctgttttattgagttctgaaggttggaactgctgccatgattttggccactttgcagacctgggactttagggctaaccagttctctttgtaaggacttgtgcctcttgggagacgtccacccgtttccaagcctgggccactggcatctctggagtgtgtgggggtctgggaggcaggtcccgagccccctgtccttcccacggccactgcagtcaccccgtctgcgccgctgtgctgttgtctgccgtgagagcccaatcactgcctatacccctcatcacacgtcacaatgtcccgaattcccagcctcaccaccccttctcagtaatgaccctggttggttgcaggaggtacctactccatactgagggtgaaattaagggaaggcaaagtccaggcacaagagtgggaccccagcctctcactctcagttccactcatccaactgggaccctcaccacgaatctcatgatctgattcggttccctgtctcctcctcccgtcacagatgtgagccagggcactgctcagctgtgaccctaggtgtttctgccttgttgacatggagagagccctttcccctgagaaggcctggccccttcctgtgctgagcccacagcagcaggctgggtgtcttggttgtcagtggtggcaccaggatggaagggcaaggcacccagggcaggcccacagtcccgctgtcccccacttgcaccctagcttgtagctgccaacctcccagacagcccagcccgctgctcagctccacatgcatagtatcagccctccacacccgacaaaggggaacacacccccttggaaatggttcttttcccccagtcccagctggaagccatgctgtctgttctgctggagcagctgaacatatacatagatgttgccctgccctccccatctgcaccctgttgagttgtagttggatttgtctgtttatgcttggattcaccagagtgactatgatagtgaaaagaaaaaaaaaaaaaaaaaaggacgcatgtatcttgaaatgcttgtaaagaggtttctaacccaccctcacgaggtgtctctcacccccacactgggactcgtgtggcctgtgtggtgccaccctgctggggcctcccaagttttgaaaggctttcctcagcacctgggacccaacagagaccagcttctagcagctaaggaggccgttcagctgtgacgaaggcctgaagcacaggattaggactgaagcgatgatgtccccttccctacttccccttggggctccctgtgtcagggcacagactaggtcttgtggctggtctggcttgcggcgcgaggatggttctctctggtcatagcccgaagtctcatggcagtcccaaaggaggcttacaactcctgcatcacaagaaaaaggaagccactgccagctggggggatctgcagctcccagaagctccgtgagcctcagccacccctcagactgggttcctctccaagctcgccctctggaggggcagcgcagcctcccaccaagggccctgcgaccacagcagggattgggatgaattgcctgtcctggatctgctctagaggcccaagctgcctgcctgaggaaggatgacttgacaagtcaggagacactgttcccaaagccttgaccagagcacctcagcccgctgaccttgcacaaactccatctgctgccatgagaaaagggaagccgcctttgcaaaacattgctgcctaaagaaactcagcagcctcaggcccaattctgccacttctggtttgggtacagttaaaggcaaccctgagggacttggcagtagaaatccagggcctcccctggggctggcagcttcgtgtgcagctagagctttacctgaaaggaagtctctgggcccagaactctccaccaagagcctccctgccgttcgctgagtcccagcaattctcctaagttgaagggatctgagaaggagaaggaaatgtggggtagatttggtggtggttagagatatgcccccctcattactgccaacagtttcggctgcatttcttcacgcacctcggttcctcttcctgaagttcttgtgccctgctcttcagcaccatgggccttcttatacggaaggctctgggatctcccccttgtggggcaggctcttggggccagcctaagatcatggtttagggtgatcagtgctggcagataaattgaaaaggcacgctggcttgtgatcttaaatgaggacaatccccccagggctgggcactcctcccctcccctcacttctcccacctgcagagccagtgtccttgggtgggctagataggatatactgtatgccggctccttcaagctgctgactcactttatcaatagttccatttaaattgacttcagtggtgagactgtatcctgtttgctattgcttgttgtgctatggggggaggggggaggaatgtgtaagatagttaacatgggcaaagggagatcttggggtgcagcacttaaactgcctcgtaacccttttcatgatttcaaccacatttgctagagggagggagcagccacggagttagaggcccttggggtttctcttttccactgacaggctttcccaggcagctggctagttcattccctccccagccaggtgcaggcgtaggaatatggacatctggttgctttggcctgctgccctctttcaggggtcctaagcccacaatcatgcctccctaagaccttggcatccttccctctaagccgttggcacctctgtgccacctctcacactggctccagacacacagcctgtgcttttggagctgagatcactcgcttcaccctcctcatctttgttctccaagtaaagccacgaggtcggggcgagggcagaggtgatcacctgcgtgtcccatctacagacctgcagcttcataaaacttctgatttctcttcagctttgaaaagggttaccctgggcactggcctagagcctcacctcctaatagacttagccccatgagtttgccatgttgagcaggactatttctggcacttgcaagtcccatgatttcttcggtaattctgagggtggggggagggacatgaaatcatcttagcttagctttctgtctgtgaatgtctatatagtgtattgtgtgttttaacaaatgatttacactgactgttgctgtaaaagtgaatttggaaataaagttattactctgattaaa

SEQ ID NO: 18128 - DNA, 2363 bp, Homo sapiens
  source 1..2363: mol_type = unassigned DNA
tcgcctctgtcgactatcaggtgaactttgaaccaggatggctgagccccgccaggagttcgaagtgatggaagatcacgctgggacgtacgggttgggggacaggaaagatcaggggggctacaccatgcaccaagaccaagagggtgacacggacgctggcctgaaagctgaagaagcaggcattggagacacccccagcctggaagacgaagctgctggtcacgtgacccaagctcgcatggtcagtaaaagcaaagacgggactggaagcgatgacaaaaaagccaagggggctgatggtaaaacgaagatcgccacaccgcggggagcagcccctccaggccagaagggccaggccaacgccaccaggattccagcaaaaaccccgcccgctccaaagacaccacccagctctggtgaacctccaaaatcaggggatcgcagcggctacagcagccccggctccccaggcactcccggcagccgctcccgcaccccgtcccttccaaccccacccacccgggagcccaagaaggtggcagtggtccgtactccacccaagtcgccgtcttccgccaagagccgcctgcagacagcccccgtgcccatgccagacctgaagaatgtcaagtccaagatcggctccactgagaacctgaagcaccagccgggaggcgggaaggtgcagataattaataagaagctggatcttagcaacgtccagtccaagtgtggctcaaaggataatatcaaacacgtcccgggaggcggcagtgtgcaaatagtctacaaaccagttgacctgagcaaggtgacctccaagtgtggctcattaggcaacatccatcataaaccaggaggtggccaggtggaagtaaaatctgagaagcttgacttcaaggacagagtccagtcgaagattgggtccctggacaatatcacccacgtccctggcggaggaaataaaaagattgaaacccacaagctgaccttccgcgagaacgccaaagccaagacagaccacggggcggagatcgtgtacaagtcgccagtggtgtctggggacacgtctccacggcatctcagcaatgtctcctccaccggcagcatcgacatggtagactcgccccagctcgccacgctagctgacgaggtgtctgcctccctggccaagcagggtttgtgatcaggcccctggggcggtcaataattgtggagaggagagaatgagagagtgtggaaaaaaaaagaataatgacccggcccccgccctctgcccccagctgctcctcgcagttcggttaattggttaatcacttaacctgcttttgtcactcggctttggctcgggacttcaaaatcagtgatgggagtaagagcaaatttcatctttccaaattgatgggtgggctagtaataaaatatttaaaaaaaaacattcaaaaacatggccacatccaacatttcctcaggcaattccttttgattcttttttcttccccctccatgtagaagagggagaaggagaggctctgaaagctgcttctgggggatttcaagggactgggggtgccaaccacctctggccctgttgtgggggtgtcacagaggcagtggcagcaacaaaggatttgaaacttggtgtgttcgtggagccacaggcagacgatgtcaaccttgtgtgagtgtgacgggggttggggtggggcgggaggccacgggggaggccgaggcaggggctgggcagaggggagaggaagcacaagaagtgggagtgggagaggaagccacgtgctggagagtagacatccccctccttgccgctgggagagccaaggcctatgccacctgcagcgtctgagcggccgcctgtccttggtggccgggggtgggggcctgctgtgggtcagtgtgccaccctctgcagggcagcctgtgggagaagggacagcgggtaaaaagagaaggcaagctggcaggagggtggcacttcgtggatgacctccttagaaaagactgaccttgatgtcttgagagcgctggcctcttcctccctccctgcagggtagggggcctgagttgaggggcttccctctgctccacagaaaccctgttttattgagttctgaaggttggaactgctgccatgattttggccactttgcagacctgggactttagggctaaccagttctctttgtaaggacttgtgcctcttgggagacgtccacccgtttccaagcctgggccactggcatctctggagtgtgtgggggtctgggaggcaggtcccgagccccctgtccttcccacggccactgcagtcaccccgtctgcgccgctgtgctgttgtctgccgt

SEQ ID NO: 18129 - DNA, 5724 bp, Homo sapiens
  source 1..5724: mol_type = unassigned DNA
ggacggccgagcggcagggcgctcgcgcgcgcccactagtggccggaggagaaggctcccgcggaggccgcgctgcccgccccctcccctggggaggctcgcgttcccgctgctcgcgcctgcgccgcccgccggcctcaggaacgcgccctcttcgccggcgcgcgccctcgcagtcaccgccacccaccagctccggcaccaacagcagcgccgctgccaccgcccaccttctgccgccgccaccacagccaccttctcctcctccgctgtcctctcccgtcctcgcctctgtcgactatcaggtgaactttgaaccaggatggctgagccccgccaggagttcgaagtgatggaagatcacgctgggacgtacgggttgggggacaggaaagatcaggggggctacaccatgcaccaagaccaagagggtgacacggacgctggcctgaaagaatctcccctgcagacccccactgaggacggatctgaggaaccgggctctgaaacctctgatgctaagagcactccaacagcggaagctgaagaagcaggcattggagacacccccagcctggaagacgaagctgctggtcacgtgacccaagctcgcatggtcagtaaaagcaaagacgggactggaagcgatgacaaaaaagccaagggggctgatggtaaaacgaagatcgccacaccgcggggagcagcccctccaggccagaagggccaggccaacgccaccaggattccagcaaaaaccccgcccgctccaaagacaccacccagctctggtgaacctccaaaatcaggggatcgcagcggctacagcagccccggctccccaggcactcccggcagccgctcccgcaccccgtcccttccaaccccacccacccgggagcccaagaaggtggcagtggtccgtactccacccaagtcgccgtcttccgccaagagccgcctgcagacagcccccgtgcccatgccagacctgaagaatgtcaagtccaagatcggctccactgagaacctgaagcaccagccgggaggcgggaaggtgcagataattaataagaagctggatcttagcaacgtccagtccaagtgtggctcaaaggataatatcaaacacgtcccgggaggcggcagtgtgcaaatagtctacaaaccagttgacctgagcaaggtgacctccaagtgtggctcattaggcaacatccatcataaaccaggaggtggccaggtggaagtaaaatctgagaagcttgacttcaaggacagagtccagtcgaagattgggtccctggacaatatcacccacgtccctggcggaggaaataaaaagattgaaacccacaagctgaccttccgcgagaacgccaaagccaagacagaccacggggcggagatcgtgtacaagtcgccagtggtgtctggggacacgtctccacggcatctcagcaatgtctcctccaccggcagcatcgacatggtagactcgccccagctcgccacgctagctgacgaggtgtctgcctccctggccaagcagggtttgtgatcaggcccctggggcggtcaataattgtggagaggagagaatgagagagtgtggaaaaaaaaagaataatgacccggcccccgccctctgcccccagctgctcctcgcagttcggttaattggttaatcacttaacctgcttttgtcactcggctttggctcgggacttcaaaatcagtgatgggagtaagagcaaatttcatctttccaaattgatgggtgggctagtaataaaatatttaaaaaaaaacattcaaaaacatggccacatccaacatttcctcaggcaattccttttgattcttttttcttccccctccatgtagaagagggagaaggagaggctctgaaagctgcttctgggggatttcaagggactgggggtgccaaccacctctggccctgttgtgggggtgtcacagaggcagtggcagcaacaaaggatttgaaacttggtgtgttcgtggagccacaggcagacgatgtcaaccttgtgtgagtgtgacgggggttggggtggggcgggaggccacgggggaggccgaggcaggggctgggcagaggggagaggaagcacaagaagtgggagtgggagaggaagccacgtgctggagagtagacatccccctccttgccgctgggagagccaaggcctatgccacctgcagcgtctgagcggccgcctgtccttggtggccgggggtgggggcctgctgtgggtcagtgtgccaccctctgcagggcagcctgtgggagaagggacagcgggtaaaaagagaaggcaagctggcaggagggtggcacttcgtggatgacctccttagaaaagactgaccttgatgtcttgagagcgctggcctcttcctccctccctgcagggtagggggcctgagttgaggggcttccctctgctccacagaaaccctgttttattgagttctgaaggttggaactgctgccatgattttggccactttgcagacctgggactttagggctaaccagttctctttgtaaggacttgtgcctcttgggagacgtccacccgtttccaagcctgggccactggcatctctggagtgtgtgggggtctgggaggcaggtcccgagccccctgtccttcccacggccactgcagtcaccccgtctgcgccgctgtgctgttgtctgccgtgagagcccaatcactgcctatacccctcatcacacgtcacaatgtcccgaattcccagcctcaccaccccttctcagtaatgaccctggttggttgcaggaggtacctactccatactgagggtgaaattaagggaaggcaaagtccaggcacaagagtgggaccccagcctctcactctcagttccactcatccaactgggaccctcaccacgaatctcatgatctgattcggttccctgtctcctcctcccgtcacagatgtgagccagggcactgctcagctgtgaccctaggtgtttctgccttgttgacatggagagagccctttcccctgagaaggcctggccccttcctgtgctgagcccacagcagcaggctgggtgtcttggttgtcagtggtggcaccaggatggaagggcaaggcacccagggcaggcccacagtcccgctgtcccccacttgcaccctagcttgtagctgccaacctcccagacagcccagcccgctgctcagctccacatgcatagtatcagccctccacacccgacaaaggggaacacacccccttggaaatggttcttttcccccagtcccagctggaagccatgctgtctgttctgctggagcagctgaacatatacatagatgttgccctgccctccccatctgcaccctgttgagttgtagttggatttgtctgtttatgcttggattcaccagagtgactatgatagtgaaaagaaaaaaaaaaaaaaaaaaggacgcatgtatcttgaaatgcttgtaaagaggtttctaacccaccctcacgaggtgtctctcacccccacactgggactcgtgtggcctgtgtggtgccaccctgctggggcctcccaagttttgaaaggctttcctcagcacctgggacccaacagagaccagcttctagcagctaaggaggccgttcagctgtgacgaaggcctgaagcacaggattaggactgaagcgatgatgtccccttccctacttccccttggggctccctgtgtcagggcacagactaggtcttgtggctggtctggcttgcggcgcgaggatggttctctctggtcatagcccgaagtctcatggcagtcccaaaggaggcttacaactcctgcatcacaagaaaaaggaagccactgccagctggggggatctgcagctcccagaagctccgtgagcctcagccacccctcagactgggttcctctccaagctcgccctctggaggggcagcgcagcctcccaccaagggccctgcgaccacagcagggattgggatgaattgcctgtcctggatctgctctagaggcccaagctgcctgcctgaggaaggatgacttgacaagtcaggagacactgttcccaaagccttgaccagagcacctcagcccgctgaccttgcacaaactccatctgctgccatgagaaaagggaagccgcctttgcaaaacattgctgcctaaagaaactcagcagcctcaggcccaattctgccacttctggtttgggtacagttaaaggcaaccctgagggacttggcagtagaaatccagggcctcccctggggctggcagcttcgtgtgcagctagagctttacctgaaaggaagtctctgggcccagaactctccaccaagagcctccctgccgttcgctgagtcccagcaattctcctaagttgaagggatctgagaaggagaaggaaatgtggggtagatttggtggtggttagagatatgcccccctcattactgccaacagtttcggctgcatttcttcacgcacctcggttcctcttcctgaagttcttgtgccctgctcttcagcaccatgggccttcttatacggaaggctctgggatctcccccttgtggggcaggctcttggggccagcctaagatcatggtttagggtgatcagtgctggcagataaattgaaaaggcacgctggcttgtgatcttaaatgaggacaatccccccagggctgggcactcctcccctcccctcacttctcccacctgcagagccagtgtccttgggtgggctagataggatatactgtatgccggctccttcaagctgctgactcactttatcaatagttccatttaaattgacttcagtggtgagactgtatcctgtttgctattgcttgttgtgctatggggggaggggggaggaatgtgtaagatagttaacatgggcaaagggagatcttggggtgcagcacttaaactgcctcgtaacccttttcatgatttcaaccacatttgctagagggagggagcagccacggagttagaggcccttggggtttctcttttccactgacaggctttcccaggcagctggctagttcattccctccccagccaggtgcaggcgtaggaatatggacatctggttgctttggcctgctgccctctttcaggggtcctaagcccacaatcatgcctccctaagaccttggcatccttccctctaagccgttggcacctctgtgccacctctcacactggctccagacacacagcctgtgcttttggagctgagatcactcgcttcaccctcctcatctttgttctccaagtaaagccacgaggtcggggcgagggcagaggtgatcacctgcgtgtcccatctacagacctgcagcttcataaaacttctgatttctcttcagctttgaaaagggttaccctgggcactggcctagagcctcacctcctaatagacttagccccatgagtttgccatgttgagcaggactatttctggcacttgcaagtcccatgatttcttcggtaattctgagggtggggggagggacatgaaatcatcttagcttagctttctgtctgtgaatgtctatatagtgtattgtgtgttttaacaaatgatttacactgactgttgctgtaaaagtgaatttggaaataaagttattactctgattaaa

SEQ ID NO: 18130 - DNA, 6816 bp, Homo sapiens
  source 1..6816: mol_type = unassigned DNA
ggacggccgagcggcagggcgctcgcgcgcgcccactagtggccggaggagaaggctcccgcggaggccgcgctgcccgccccctcccctggggaggctcgcgttcccgctgctcgcgcctgcgccgcccgccggcctcaggaacgcgccctcttcgccggcgcgcgccctcgcagtcaccgccacccaccagctccggcaccaacagcagcgccgctgccaccgcccaccttctgccgccgccaccacagccaccttctcctcctccgctgtcctctcccgtcctcgcctctgtcgactatcaggtgaactttgaaccaggatggctgagccccgccaggagttcgaagtgatggaagatcacgctgggacgtacgggttgggggacaggaaagatcaggggggctacaccatgcaccaagaccaagagggtgacacggacgctggcctgaaagaatctcccctgcagacccccactgaggacggatctgaggaaccgggctctgaaacctctgatgctaagagcactccaacagcggaagatgtgacagcacccttagtggatgagggagctcccggcaagcaggctgccgcgcagccccacacggagatcccagaaggaaccacagctgaagaagcaggcattggagacacccccagcctggaagacgaagctgctggtcacgtgacccaagagcctgaaagtggtaaggtggtccaggaaggcttcctccgagagccaggccccccaggtctgagccaccagctcatgtccggcatgcctggggctcccctcctgcctgagggccccagagaggccacacgccaaccttcggggacaggacctgaggacacagagggcggccgccacgcccctgagctgctcaagcaccagcttctaggagacctgcaccaggaggggccgccgctgaagggggcagggggcaaagagaggccggggagcaaggaggaggtggatgaagaccgcgacgtcgatgagtcctccccccaagactcccctccctccaaggcctccccagcccaagatgggcggcctccccagacagccgccagagaagccaccagcatcccaggcttcccagcggagggtgccatccccctccctgtggatttcctctccaaagtttccacagagatcccagcctcagagcccgacgggcccagtgtagggcgggccaaagggcaggatgcccccctggagttcacgtttcacgtggaaatcacacccaacgtgcagaaggagcaggcgcactcggaggagcatttgggaagggctgcatttccaggggcccctggagaggggccagaggcccggggcccctctttgggagaggacacaaaagaggctgaccttccagagccctctgaaaagcagcctgctgctgctccgcgggggaagcccgtcagccgggtccctcaactcaaagctcgcatggtcagtaaaagcaaagacgggactggaagcgatgacaaaaaagccaagacatccacacgttcctctgctaaaaccttgaaaaataggccttgccttagccccaaacaccccactcctggtagctcagaccctctgatccaaccctccagccctgctgtgtgcccagagccaccttcctctcctaaatacgtctcttctgtcacttcccgaactggcagttctggagcaaaggagatgaaactcaagggggctgatggtaaaacgaagatcgccacaccgcggggagcagcccctccaggccagaagggccaggccaacgccaccaggattccagcaaaaaccccgcccgctccaaagacaccacccagctctgcgactaagcaagtccagagaagaccaccccctgcagggcccagatctgagagaggtgaacctccaaaatcaggggatcgcagcggctacagcagccccggctccccaggcactcccggcagccgctcccgcaccccgtcccttccaaccccacccacccgggagcccaagaaggtggcagtggtccgtactccacccaagtcgccgtcttccgccaagagccgcctgcagacagcccccgtgcccatgccagacctgaagaatgtcaagtccaagatcggctccactgagaacctgaagcaccagccgggaggcgggaaggtgcagataattaataagaagctggatcttagcaacgtccagtccaagtgtggctcaaaggataatatcaaacacgtcccgggaggcggcagtgtgcaaatagtctacaaaccagttgacctgagcaaggtgacctccaagtgtggctcattaggcaacatccatcataaaccaggaggtggccaggtggaagtaaaatctgagaagcttgacttcaaggacagagtccagtcgaagattgggtccctggacaatatcacccacgtccctggcggaggaaataaaaagattgaaacccacaagctgaccttccgcgagaacgccaaagccaagacagaccacggggcggagatcgtgtacaagtcgccagtggtgtctggggacacgtctccacggcatctcagcaatgtctcctccaccggcagcatcgacatggtagactcgccccagctcgccacgctagctgacgaggtgtctgcctccctggccaagcagggtttgtgatcaggcccctggggcggtcaataattgtggagaggagagaatgagagagtgtggaaaaaaaaagaataatgacccggcccccgccctctgcccccagctgctcctcgcagttcggttaattggttaatcacttaacctgcttttgtcactcggctttggctcgggacttcaaaatcagtgatgggagtaagagcaaatttcatctttccaaattgatgggtgggctagtaataaaatatttaaaaaaaaacattcaaaaacatggccacatccaacatttcctcaggcaattccttttgattcttttttcttccccctccatgtagaagagggagaaggagaggctctgaaagctgcttctgggggatttcaagggactgggggtgccaaccacctctggccctgttgtgggggtgtcacagaggcagtggcagcaacaaaggatttgaaacttggtgtgttcgtggagccacaggcagacgatgtcaaccttgtgtgagtgtgacgggggttggggtggggcgggaggccacgggggaggccgaggcaggggctgggcagaggggagaggaagcacaagaagtgggagtgggagaggaagccacgtgctggagagtagacatccccctccttgccgctgggagagccaaggcctatgccacctgcagcgtctgagcggccgcctgtccttggtggccgggggtgggggcctgctgtgggtcagtgtgccaccctctgcagggcagcctgtgggagaagggacagcgggtaaaaagagaaggcaagctggcaggagggtggcacttcgtggatgacctccttagaaaagactgaccttgatgtcttgagagcgctggcctcttcctccctccctgcagggtagggggcctgagttgaggggcttccctctgctccacagaaaccctgttttattgagttctgaaggttggaactgctgccatgattttggccactttgcagacctgggactttagggctaaccagttctctttgtaaggacttgtgcctcttgggagacgtccacccgtttccaagcctgggccactggcatctctggagtgtgtgggggtctgggaggcaggtcccgagccccctgtccttcccacggccactgcagtcaccccgtctgcgccgctgtgctgttgtctgccgtgagagcccaatcactgcctatacccctcatcacacgtcacaatgtcccgaattcccagcctcaccaccccttctcagtaatgaccctggttggttgcaggaggtacctactccatactgagggtgaaattaagggaaggcaaagtccaggcacaagagtgggaccccagcctctcactctcagttccactcatccaactgggaccctcaccacgaatctcatgatctgattcggttccctgtctcctcctcccgtcacagatgtgagccagggcactgctcagctgtgaccctaggtgtttctgccttgttgacatggagagagccctttcccctgagaaggcctggccccttcctgtgctgagcccacagcagcaggctgggtgtcttggttgtcagtggtggcaccaggatggaagggcaaggcacccagggcaggcccacagtcccgctgtcccccacttgcaccctagcttgtagctgccaacctcccagacagcccagcccgctgctcagctccacatgcatagtatcagccctccacacccgacaaaggggaacacacccccttggaaatggttcttttcccccagtcccagctggaagccatgctgtctgttctgctggagcagctgaacatatacatagatgttgccctgccctccccatctgcaccctgttgagttgtagttggatttgtctgtttatgcttggattcaccagagtgactatgatagtgaaaagaaaaaaaaaaaaaaaaaaggacgcatgtatcttgaaatgcttgtaaagaggtttctaacccaccctcacgaggtgtctctcacccccacactgggactcgtgtggcctgtgtggtgccaccctgctggggcctcccaagttttgaaaggctttcctcagcacctgggacccaacagagaccagcttctagcagctaaggaggccgttcagctgtgacgaaggcctgaagcacaggattaggactgaagcgatgatgtccccttccctacttccccttggggctccctgtgtcagggcacagactaggtcttgtggctggtctggcttgcggcgcgaggatggttctctctggtcatagcccgaagtctcatggcagtcccaaaggaggcttacaactcctgcatcacaagaaaaaggaagccactgccagctggggggatctgcagctcccagaagctccgtgagcctcagccacccctcagactgggttcctctccaagctcgccctctggaggggcagcgcagcctcccaccaagggccctgcgaccacagcagggattgggatgaattgcctgtcctggatctgctctagaggcccaagctgcctgcctgaggaaggatgacttgacaagtcaggagacactgttcccaaagccttgaccagagcacctcagcccgctgaccttgcacaaactccatctgctgccatgagaaaagggaagccgcctttgcaaaacattgctgcctaaagaaactcagcagcctcaggcccaattctgccacttctggtttgggtacagttaaaggcaaccctgagggacttggcagtagaaatccagggcctcccctggggctggcagcttcgtgtgcagctagagctttacctgaaaggaagtctctgggcccagaactctccaccaagagcctccctgccgttcgctgagtcccagcaattctcctaagttgaagggatctgagaaggagaaggaaatgtggggtagatttggtggtggttagagatatgcccccctcattactgccaacagtttcggctgcatttcttcacgcacctcggttcctcttcctgaagttcttgtgccctgctcttcagcaccatgggccttcttatacggaaggctctgggatctcccccttgtggggcaggctcttggggccagcctaagatcatggtttagggtgatcagtgctggcagataaattgaaaaggcacgctggcttgtgatcttaaatgaggacaatccccccagggctgggcactcctcccctcccctcacttctcccacctgcagagccagtgtccttgggtgggctagataggatatactgtatgccggctccttcaagctgctgactcactttatcaatagttccatttaaattgacttcagtggtgagactgtatcctgtttgctattgcttgttgtgctatggggggaggggggaggaatgtgtaagatagttaacatgggcaaagggagatcttggggtgcagcacttaaactgcctcgtaacccttttcatgatttcaaccacatttgctagagggagggagcagccacggagttagaggcccttggggtttctcttttccactgacaggctttcccaggcagctggctagttcattccctccccagccaggtgcaggcgtaggaatatggacatctggttgctttggcctgctgccctctttcaggggtcctaagcccacaatcatgcctccctaagaccttggcatccttccctctaagccgttggcacctctgtgccacctctcacactggctccagacacacagcctgtgcttttggagctgagatcactcgcttcaccctcctcatctttgttctccaagtaaagccacgaggtcggggcgagggcagaggtgatcacctgcgtgtcccatctacagacctgcagcttcataaaacttctgatttctcttcagctttgaaaagggttaccctgggcactggcctagagcctcacctcctaatagacttagccccatgagtttgccatgttgagcaggactatttctggcacttgcaagtcccatgatttcttcggtaattctgagggtggggggagggacatgaaatcatcttagcttagctttctgtctgtgaatgtctatatagtgtattgtgtgttttaacaaatgatttacactgactgttgctgtaaaagtgaatttggaaataaagttattactctgattaaa

SEQ ID NO: 18131 - DNA, 5629 bp, Homo sapiens
  source 1..5629: mol_type = unassigned DNA
ggacggccgagcggcagggcgctcgcgcgcgcccactagtggccggaggagaaggctcccgcggaggccgcgctgcccgccccctcccctggggaggctcgcgttcccgctgctcgcgcctgcgccgcccgccggcctcaggaacgcgccctcttcgccggcgcgcgccctcgcagtcaccgccacccaccagctccggcaccaacagcagcgccgctgccaccgcccaccttctgccgccgccaccacagccaccttctcctcctccgctgtcctctcccgtcctcgcctctgtcgactatcaggtgaactttgaaccaggatggctgagccccgccaggagttcgaagtgatggaagatcacgctgggacgtacgggttgggggacaggaaagatcaggggggctacaccatgcaccaagaccaagagggtgacacggacgctggcctgaaagaatctcccctgcagacccccactgaggacggatctgaggaaccgggctctgaaacctctgatgctaagagcactccaacagcggaagcgtgaagcaggcattggagacacccccagcctggaagacgaagctgctggtcacgtgacccaagctcgcatggtcagtaaaagcaaagacgggactggaagcgatgacaaaaaagccaagggggctgatggtaaaacgaagatcgccacaccgcggggagcagcccctccaggccagaagggccaggccaacgccaccaggattccagcaaaaaccccgcccgctccaaagacaccacccagctctggtgaacctccaaaatcaggggatcgcagcggctacagcagccccggctccccaggcactcccggcagccgctcccgcaccccgtcccttccaaccccacccacccgggagcccaagaaggtggcagtggtccgtactccacccaagtcgccgtcttccgccaagagccgcctgcagacagcccccgtgcccatgccagacctgaagaatgtcaagtccaagatcggctccactgagaacctgaagcaccagccgggaggcgggaaggtgcaaatagtctacaaaccagttgacctgagcaaggtgacctccaagtgtggctcattaggcaacatccatcataaaccaggaggtggccaggtggaagtaaaatctgagaagcttgacttcaaggacagagtccagtcgaagattgggtccctggacaatatcacccacgtccctggcggaggaaataaaaagattgaaacccacaagctgaccttccgcgagaacgccaaagccaagacagaccacggggcggagatcgtgtacaagtcgccagtggtgtctggggacacgtctccacggcatctcagcaatgtctcctccaccggcagcatcgacatggtagactcgccccagctcgccacgctagctgacgaggtgtctgcctccctggccaagcagggtttgtgatcaggcccctggggcggtcaataattgtggagaggagagaatgagagagtgtggaaaaaaaaagaataatgacccggcccccgccctctgcccccagctgctcctcgcagttcggttaattggttaatcacttaacctgcttttgtcactcggctttggctcgggacttcaaaatcagtgatgggagtaagagcaaatttcatctttccaaattgatgggtgggctagtaataaaatatttaaaaaaaaacattcaaaaacatggccacatccaacatttcctcaggcaattccttttgattcttttttcttccccctccatgtagaagagggagaaggagaggctctgaaagctgcttctgggggatttcaagggactgggggtgccaaccacctctggccctgttgtgggggtgtcacagaggcagtggcagcaacaaaggatttgaaacttggtgtgttcgtggagccacaggcagacgatgtcaaccttgtgtgagtgtgacgggggttggggtggggcgggaggccacgggggaggccgaggcaggggctgggcagaggggagaggaagcacaagaagtgggagtgggagaggaagccacgtgctggagagtagacatccccctccttgccgctgggagagccaaggcctatgccacctgcagcgtctgagcggccgcctgtccttggtggccgggggtgggggcctgctgtgggtcagtgtgccaccctctgcagggcagcctgtgggagaagggacagcgggtaaaaagagaaggcaagctggcaggagggtggcacttcgtggatgacctccttagaaaagactgaccttgatgtcttgagagcgctggcctcttcctccctccctgcagggtagggggcctgagttgaggggcttccctctgctccacagaaaccctgttttattgagttctgaaggttggaactgctgccatgattttggccactttgcagacctgggactttagggctaaccagttctctttgtaaggacttgtgcctcttgggagacgtccacccgtttccaagcctgggccactggcatctctggagtgtgtgggggtctgggaggcaggtcccgagccccctgtccttcccacggccactgcagtcaccccgtctgcgccgctgtgctgttgtctgccgtgagagcccaatcactgcctatacccctcatcacacgtcacaatgtcccgaattcccagcctcaccaccccttctcagtaatgaccctggttggttgcaggaggtacctactccatactgagggtgaaattaagggaaggcaaagtccaggcacaagagtgggaccccagcctctcactctcagttccactcatccaactgggaccctcaccacgaatctcatgatctgattcggttccctgtctcctcctcccgtcacagatgtgagccagggcactgctcagctgtgaccctaggtgtttctgccttgttgacatggagagagccctttcccctgagaaggcctggccccttcctgtgctgagcccacagcagcaggctgggtgtcttggttgtcagtggtggcaccaggatggaagggcaaggcacccagggcaggcccacagtcccgctgtcccccacttgcaccctagcttgtagctgccaacctcccagacagcccagcccgctgctcagctccacatgcatagtatcagccctccacacccgacaaaggggaacacacccccttggaaatggttcttttcccccagtcccagctggaagccatgctgtctgttctgctggagcagctgaacatatacatagatgttgccctgccctccccatctgcaccctgttgagttgtagttggatttgtctgtttatgcttggattcaccagagtgactatgatagtgaaaagaaaaaaaaaaaaaaaaaaggacgcatgtatcttgaaatgcttgtaaagaggtttctaacccaccctcacgaggtgtctctcacccccacactgggactcgtgtggcctgtgtggtgccaccctgctggggcctcccaagttttgaaaggctttcctcagcacctgggacccaacagagaccagcttctagcagctaaggaggccgttcagctgtgacgaaggcctgaagcacaggattaggactgaagcgatgatgtccccttccctacttccccttggggctccctgtgtcagggcacagactaggtcttgtggctggtctggcttgcggcgcgaggatggttctctctggtcatagcccgaagtctcatggcagtcccaaaggaggcttacaactcctgcatcacaagaaaaaggaagccactgccagctggggggatctgcagctcccagaagctccgtgagcctcagccacccctcagactgggttcctctccaagctcgccctctggaggggcagcgcagcctcccaccaagggccctgcgaccacagcagggattgggatgaattgcctgtcctggatctgctctagaggcccaagctgcctgcctgaggaaggatgacttgacaagtcaggagacactgttcccaaagccttgaccagagcacctcagcccgctgaccttgcacaaactccatctgctgccatgagaaaagggaagccgcctttgcaaaacattgctgcctaaagaaactcagcagcctcaggcccaattctgccacttctggtttgggtacagttaaaggcaaccctgagggacttggcagtagaaatccagggcctcccctggggctggcagcttcgtgtgcagctagagctttacctgaaaggaagtctctgggcccagaactctccaccaagagcctccctgccgttcgctgagtcccagcaattctcctaagttgaagggatctgagaaggagaaggaaatgtggggtagatttggtggtggttagagatatgcccccctcattactgccaacagtttcggctgcatttcttcacgcacctcggttcctcttcctgaagttcttgtgccctgctcttcagcaccatgggccttcttatacggaaggctctgggatctcccccttgtggggcaggctcttggggccagcctaagatcatggtttagggtgatcagtgctggcagataaattgaaaaggcacgctggcttgtgatcttaaatgaggacaatccccccagggctgggcactcctcccctcccctcacttctcccacctgcagagccagtgtccttgggtgggctagataggatatactgtatgccggctccttcaagctgctgactcactttatcaatagttccatttaaattgacttcagtggtgagactgtatcctgtttgctattgcttgttgtgctatggggggaggggggaggaatgtgtaagatagttaacatgggcaaagggagatcttggggtgcagcacttaaactgcctcgtaacccttttcatgatttcaaccacatttgctagagggagggagcagccacggagttagaggcccttggggtttctcttttccactgacaggctttcccaggcagctggctagttcattccctccccagccaggtgcaggcgtaggaatatggacatctggttgctttggcctgctgccctctttcaggggtcctaagcccacaatcatgcctccctaagaccttggcatccttccctctaagccgttggcacctctgtgccacctctcacactggctccagacacacagcctgtgcttttggagctgagatcactcgcttcaccctcctcatctttgttctccaagtaaagccacgaggtcggggcgagggcagaggtgatcacctgcgtgtcccatctacagacctgcagcttcataaaacttctgatttctcttcagctttgaaaagggttaccctgggcactggcctagagcctcacctcctaatagacttagccccatgagtttgccatgttgagcaggactatttctggcacttgcaagtcccatgatttcttcggtaattctgagggtggggggagggacatgaaatcatcttagcttagctttctgtctgtgaatgtctatatagtgtattgtgtgttttaacaaatgatttacactgactgttgctgtaaaagtgaatttggaaataaagttattactctgattaaa

SEQ ID NO: 18132 - DNA, 5811 bp, Homo sapiens
  source 1..5811: mol_type = unassigned DNA
ggacggccgagcggcagggcgctcgcgcgcgcccactagtggccggaggagaaggctcccgcggaggccgcgctgcccgccccctcccctggggaggctcgcgttcccgctgctcgcgcctgcgccgcccgccggcctcaggaacgcgccctcttcgccggcgcgcgccctcgcagtcaccgccacccaccagctccggcaccaacagcagcgccgctgccaccgcccaccttctgccgccgccaccacagccaccttctcctcctccgctgtcctctcccgtcctcgcctctgtcgactatcaggtgaactttgaaccaggatggctgagccccgccaggagttcgaagtgatggaagatcacgctgggacgtacgggttgggggacaggaaagatcaggggggctacaccatgcaccaagaccaagagggtgacacggacgctggcctgaaagaatctcccctgcagacccccactgaggacggatctgaggaaccgggctctgaaacctctgatgctaagagcactccaacagcggaagatgtgacagcacccttagtggatgagggagctcccggcaagcaggctgccgcgcagccccacacggagatcccagaaggaaccacagctgaagaagcaggcattggagacacccccagcctggaagacgaagctgctggtcacgtgacccaagctcgcatggtcagtaaaagcaaagacgggactggaagcgatgacaaaaaagccaagggggctgatggtaaaacgaagatcgccacaccgcggggagcagcccctccaggccagaagggccaggccaacgccaccaggattccagcaaaaaccccgcccgctccaaagacaccacccagctctggtgaacctccaaaatcaggggatcgcagcggctacagcagccccggctccccaggcactcccggcagccgctcccgcaccccgtcccttccaaccccacccacccgggagcccaagaaggtggcagtggtccgtactccacccaagtcgccgtcttccgccaagagccgcctgcagacagcccccgtgcccatgccagacctgaagaatgtcaagtccaagatcggctccactgagaacctgaagcaccagccgggaggcgggaaggtgcagataattaataagaagctggatcttagcaacgtccagtccaagtgtggctcaaaggataatatcaaacacgtcccgggaggcggcagtgtgcaaatagtctacaaaccagttgacctgagcaaggtgacctccaagtgtggctcattaggcaacatccatcataaaccaggaggtggccaggtggaagtaaaatctgagaagcttgacttcaaggacagagtccagtcgaagattgggtccctggacaatatcacccacgtccctggcggaggaaataaaaagattgaaacccacaagctgaccttccgcgagaacgccaaagccaagacagaccacggggcggagatcgtgtacaagtcgccagtggtgtctggggacacgtctccacggcatctcagcaatgtctcctccaccggcagcatcgacatggtagactcgccccagctcgccacgctagctgacgaggtgtctgcctccctggccaagcagggtttgtgatcaggcccctggggcggtcaataattgtggagaggagagaatgagagagtgtggaaaaaaaaagaataatgacccggcccccgccctctgcccccagctgctcctcgcagttcggttaattggttaatcacttaacctgcttttgtcactcggctttggctcgggacttcaaaatcagtgatgggagtaagagcaaatttcatctttccaaattgatgggtgggctagtaataaaatatttaaaaaaaaacattcaaaaacatggccacatccaacatttcctcaggcaattccttttgattcttttttcttccccctccatgtagaagagggagaaggagaggctctgaaagctgcttctgggggatttcaagggactgggggtgccaaccacctctggccctgttgtgggggtgtcacagaggcagtggcagcaacaaaggatttgaaacttggtgtgttcgtggagccacaggcagacgatgtcaaccttgtgtgagtgtgacgggggttggggtggggcgggaggccacgggggaggccgaggcaggggctgggcagaggggagaggaagcacaagaagtgggagtgggagaggaagccacgtgctggagagtagacatccccctccttgccgctgggagagccaaggcctatgccacctgcagcgtctgagcggccgcctgtccttggtggccgggggtgggggcctgctgtgggtcagtgtgccaccctctgcagggcagcctgtgggagaagggacagcgggtaaaaagagaaggcaagctggcaggagggtggcacttcgtggatgacctccttagaaaagactgaccttgatgtcttgagagcgctggcctcttcctccctccctgcagggtagggggcctgagttgaggggcttccctctgctccacagaaaccctgttttattgagttctgaaggttggaactgctgccatgattttggccactttgcagacctgggactttagggctaaccagttctctttgtaaggacttgtgcctcttgggagacgtccacccgtttccaagcctgggccactggcatctctggagtgtgtgggggtctgggaggcaggtcccgagccccctgtccttcccacggccactgcagtcaccccgtctgcgccgctgtgctgttgtctgccgtgagagcccaatcactgcctatacccctcatcacacgtcacaatgtcccgaattcccagcctcaccaccccttctcagtaatgaccctggttggttgcaggaggtacctactccatactgagggtgaaattaagggaaggcaaagtccaggcacaagagtgggaccccagcctctcactctcagttccactcatccaactgggaccctcaccacgaatctcatgatctgattcggttccctgtctcctcctcccgtcacagatgtgagccagggcactgctcagctgtgaccctaggtgtttctgccttgttgacatggagagagccctttcccctgagaaggcctggccccttcctgtgctgagcccacagcagcaggctgggtgtcttggttgtcagtggtggcaccaggatggaagggcaaggcacccagggcaggcccacagtcccgctgtcccccacttgcaccctagcttgtagctgccaacctcccagacagcccagcccgctgctcagctccacatgcatagtatcagccctccacacccgacaaaggggaacacacccccttggaaatggttcttttcccccagtcccagctggaagccatgctgtctgttctgctggagcagctgaacatatacatagatgttgccctgccctccccatctgcaccctgttgagttgtagttggatttgtctgtttatgcttggattcaccagagtgactatgatagtgaaaagaaaaaaaaaaaaaaaaaaggacgcatgtatcttgaaatgcttgtaaagaggtttctaacccaccctcacgaggtgtctctcacccccacactgggactcgtgtggcctgtgtggtgccaccctgctggggcctcccaagttttgaaaggctttcctcagcacctgggacccaacagagaccagcttctagcagctaaggaggccgttcagctgtgacgaaggcctgaagcacaggattaggactgaagcgatgatgtccccttccctacttccccttggggctccctgtgtcagggcacagactaggtcttgtggctggtctggcttgcggcgcgaggatggttctctctggtcatagcccgaagtctcatggcagtcccaaaggaggcttacaactcctgcatcacaagaaaaaggaagccactgccagctggggggatctgcagctcccagaagctccgtgagcctcagccacccctcagactgggttcctctccaagctcgccctctggaggggcagcgcagcctcccaccaagggccctgcgaccacagcagggattgggatgaattgcctgtcctggatctgctctagaggcccaagctgcctgcctgaggaaggatgacttgacaagtcaggagacactgttcccaaagccttgaccagagcacctcagcccgctgaccttgcacaaactccatctgctgccatgagaaaagggaagccgcctttgcaaaacattgctgcctaaagaaactcagcagcctcaggcccaattctgccacttctggtttgggtacagttaaaggcaaccctgagggacttggcagtagaaatccagggcctcccctggggctggcagcttcgtgtgcagctagagctttacctgaaaggaagtctctgggcccagaactctccaccaagagcctccctgccgttcgctgagtcccagcaattctcctaagttgaagggatctgagaaggagaaggaaatgtggggtagatttggtggtggttagagatatgcccccctcattactgccaacagtttcggctgcatttcttcacgcacctcggttcctcttcctgaagttcttgtgccctgctcttcagcaccatgggccttcttatacggaaggctctgggatctcccccttgtggggcaggctcttggggccagcctaagatcatggtttagggtgatcagtgctggcagataaattgaaaaggcacgctggcttgtgatcttaaatgaggacaatccccccagggctgggcactcctcccctcccctcacttctcccacctgcagagccagtgtccttgggtgggctagataggatatactgtatgccggctccttcaagctgctgactcactttatcaatagttccatttaaattgacttcagtggtgagactgtatcctgtttgctattgcttgttgtgctatggggggaggggggaggaatgtgtaagatagttaacatgggcaaagggagatcttggggtgcagcacttaaactgcctcgtaacccttttcatgatttcaaccacatttgctagagggagggagcagccacggagttagaggcccttggggtttctcttttccactgacaggctttcccaggcagctggctagttcattccctccccagccaggtgcaggcgtaggaatatggacatctggttgctttggcctgctgccctctttcaggggtcctaagcccacaatcatgcctccctaagaccttggcatccttccctctaagccgttggcacctctgtgccacctctcacactggctccagacacacagcctgtgcttttggagctgagatcactcgcttcaccctcctcatctttgttctccaagtaaagccacgaggtcggggcgagggcagaggtgatcacctgcgtgtcccatctacagacctgcagcttcataaaacttctgatttctcttcagctttgaaaagggttaccctgggcactggcctagagcctcacctcctaatagacttagccccatgagtttgccatgttgagcaggactatttctggcacttgcaagtcccatgatttcttcggtaattctgagggtggggggagggacatgaaatcatcttagcttagctttctgtctgtgaatgtctatatagtgtattgtgtgttttaacaaatgatttacactgactgttgctgtaaaagtgaatttggaaataaagttattactctgattaaa

SEQ ID NO: 18133 - DNA, 1499 bp, Homo sapiens
  source 1..1499: mol_type = unassigned DNA
ttcgccggcgcgcgccctcgcagtcaccgccacccaccagctccggcaccaacagcagcgccgctgccaccgcccaccttctgccgccgccaccacagccaccttctcctcctccgctgtcctctcccgtcctcgcctctgtcgactatcaggtgaactttgaaccaggatggctgagccccgccaggagttcgaagtgatggaagatcacgctgggacgtacgggttgggggacaggaaagatcaggggggctacaccatgcaccaagaccaagagggtgacacggacgctggcctgaaagaatctcccctgcagacccccactgaggacggatctgaggaaccgggctctgaaacctctgatgctaagagcactccaacagcggaagctcgcatggtcagtaaaagcaaagacgggactggaagcgatgacaaaaaagccaagggggctgatggtaaaacgaagatcgccacaccgcggggagcagcccctccaggccagaagggccaggccaacgccaccaggattccagcaaaaaccccgcccgctccaaagacaccacccagctctggtgaacctccaaaatcaggggatcgcagcggctacagcagccccggctccccaggcactcccggcagccgctcccgcaccccgtcccttccaaccccacccacccgggagcccaagaaggtggcagtggtccgtactccacccaagtcgccgtcttccgccaagagccgcctgcagacagcccccgtgcccatgccagacctgaagaatgtcaagtccaagatcggctccactgagaacctgaagcaccagccgggaggcgggaaggtgcaaatagtctacaaaccagttgacctgagcaaggtgacctccaagtgtggctcattaggcaacatccatcataaaccaggaggtggccaggtggaagtaaaatctgagaagcttgacttcaaggacagagtccagtcgaagattgggtccctggacaatatcacccacgtccctggcggaggaaataaaaagattgaaacccacaagctgaccttccgcgagaacgccaaagccaagacagaccacggggcggagatcgtgtacaagtcgccagtggtgtctggggacacgtctccacggcatctcagcaatgtctcctccaccggcagcatcgacatggtagactcgccccagctcgccacgctagctgacgaggtgtctgcctccctggccaagcagggtttgtgatcaggcccctggggcggtcaataattgtggagaggagagaatgagagagtgtggaaaaaaaaagaataatgacccggcccccgccctctgcccccagctgctcctcgcagttcggttaattggttaatcacttaacctgcttttgtcactcggctttggctcgggacttcaaaatcagtgatgggagtaagagcaaatttcatctttccaaattgatgggtgggctagtaataaaatatttaaaaaaaaa

SEQ ID NO: 18134 - DNA, 2331 bp, Homo sapiens
  source 1..2331: mol_type = unassigned DNA
atggctgagccccgccaggagttcgaagtgatggaagatcacgctgggacgtacgggttgggggacaggaaagatcaggggggctacaccatgcaccaagaccaagagggtgacacggacgctggcctgaaagaatctcccctgcagacccccactgaggacggatctgaggaaccgggctctgaaacctctgatgctaagagcactccaacagcggaagatgtgacagcacccttagtggatgagggagctcccggcaagcaggctgccgcgcagccccacacggagatcccagaaggaaccacagctgaagaagcaggcattggagacacccccagcctggaagacgaagctgctggtcacgtgacccaagagcctgaaagtggtaaggtggtccaggaaggcttcctccgagagccaggccccccaggtctgagccaccagctcatgtccggcatgcctggggctcccctcctgcctgagggccccagagaggccacacgccaaccttcggggacaggacctgaggacacagagggcggccgccacgcccctgagctgctcaagcaccagcttctaggagacctgcaccaggaggggccgccgctgaagggggcagggggcaaagagaggccggggagcaaggaggaggtggatgaagaccgcgacgtcgatgagtcctccccccaagactcccctccctccaaggcctccccagcccaagatgggcggcctccccagacagccgccagagaagccaccagcatcccaggcttcccagcggagggtgccatccccctccctgtggatttcctctccaaagtttccacagagatcccagcctcagagcccgacgggcccagtgtagggcgggccaaagggcaggatgcccccctggagttcacgtttcacgtggaaatcacacccaacgtgcagaaggagcaggcgcactcggaggagcatttgggaagggctgcatttccaggggcccctggagaggggccagaggcccggggcccctctttgggagaggacacaaaagaggctgaccttccagagccctctgaaaagcagcctgctgctgctccgcgggggaagcccgtcagccgggtccctcaactcaaagctcgcatggtcagtaaaagcaaagacgggactggaagcgatgacaaaaaagccaagacatccacacgttcctctgctaaaaccttgaaaaataggccttgccttagccccaaacaccccactcctggtagctcagaccctctgatccaaccctccagccctgctgtgtgcccagagccaccttcctctcctaaatacgtctcttctgtcacttcccgaactggcagttctggagcaaaggagatgaaactcaagggggctgatggtaaaacgaagatcgccacaccgcggggagcagcccctccaggccagaagggccaggccaacgccaccaggattccagcaaaaaccccgcccgctccaaagacaccacccagctctgcgactaagcaagtccagagaagaccaccccctgcagggcccagatctgagagaggtgaacctccaaaatcaggggatcgcagcggctacagcagccccggctccccaggcactcccggcagccgctcccgcaccccgtcccttccaaccccacccacccgggagcccaagaaggtggcagtggtccgtactccacccaagtcgccgtcttccgccaagagccgcctgcagacagcccccgtgcccatgccagacctgaagaatgtcaagtccaagatcggctccactgagaacctgaagcaccagccgggaggcgggaaggtgcagataattaataagaagctggatcttagcaacgtccagtccaagtgtggctcaaaggataatatcaaacacgtcccgggaggcggcagtgtgcaaatagtctacaaaccagttgacctgagcaaggtgacctccaagtgtggctcattaggcaacatccatcataaaccaggaggtggccaggtggaagtaaaatctgagaagcttgacttcaaggacagagtccagtcgaagattgggtccctggacaatatcacccacgtccctggcggaggaaataaaaagattgaaacccacaagctgaccttccgcgagaacgccaaagccaagacagaccacggggcggagatcgtgtacaagtcgccagtggtgtctggggacacgtctccacggcatctcagcaatgtctcctccaccggcagcatcgacatggtagactcgccccagctcgccacgctagctgacgaggtgtctgcctccctggccaagcagggtttgtga

SEQ ID NO: 18135 - DNA, 1239 bp, Homo sapiens
  source 1..1239: mol_type = unassigned DNA
atggctgagccccgccaggagttcgaagtgatggaagatcacgctgggacgtacgggttgggggacaggaaagatcaggggggctacaccatgcaccaagaccaagagggtgacacggacgctggcctgaaagaatctcccctgcagacccccactgaggacggatctgaggaaccgggctctgaaacctctgatgctaagagcactccaacagcggaagctgaagaagcaggcattggagacacccccagcctggaagacgaagctgctggtcacgtgacccaagctcgcatggtcagtaaaagcaaagacgggactggaagcgatgacaaaaaagccaagggggctgatggtaaaacgaagatcgccacaccgcggggagcagcccctccaggccagaagggccaggccaacgccaccaggattccagcaaaaaccccgcccgctccaaagacaccacccagctctggtgaacctccaaaatcaggggatcgcagcggctacagcagccccggctccccaggcactcccggcagccgctcccgcaccccgtcccttccaaccccacccacccgggagcccaagaaggtggcagtggtccgtactccacccaagtcgccgtcttccgccaagagccgcctgcagacagcccccgtgcccatgccagacctgaagaatgtcaagtccaagatcggctccactgagaacctgaagcaccagccgggaggcgggaaggtgcagataattaataagaagctggatcttagcaacgtccagtccaagtgtggctcaaaggataatatcaaacacgtcccgggaggcggcagtgtgcaaatagtctacaaaccagttgacctgagcaaggtgacctccaagtgtggctcattaggcaacatccatcataaaccaggaggtggccaggtggaagtaaaatctgagaagcttgacttcaaggacagagtccagtcgaagattgggtccctggacaatatcacccacgtccctggcggaggaaataaaaagattgaaacccacaagctgaccttccgcgagaacgccaaagccaagacagaccacggggcggagatcgtgtacaagtcgccagtggtgtctggggacacgtctccacggcatctcagcaatgtctcctccaccggcagcatcgacatggtagactcgccccagctcgccacgctagctgacgaggtgtctgcctccctggccaagcagggtttgtga

SEQ ID NO: 18136 - DNA, 4958 bp, Homo sapiens
  source 1..4958: mol_type = unassigned DNA
actcgggaggctgagggggctgatggtaaaacgaagatcgccacaccgaagggccaggccaacgccaccaggattccagcaaaaaccccgcccgctccaaagacaccacccagctctggtgaacctccaaaatcaggggatcgcagcggctacagcagccccggctccccaggcactcccggcagccgctcccgcaccccgtcccttccaaccccacccacccgggagcccaagaaggtggcagtggtccgtactccacccaagtcgccgtcttccgccaagagccgcctgcagacagcccccgtgcccatgccagacctgaagaatgtcaagtccaagatcggctccactgagaacctgaagcaccagccgggaggcgggaaggtgcaaatagtctacaaaccagttgacctgagcaaggtgacctccaagtgtggctcattaggcaacatccatcataaaccaggaggtggccaggtggaagtaaaatctgagaagcttgacttcaaggacagagtccagtcgaagattgggtccctggacaatatcacccacgtccctggcggaggaaataaaaagattgaaacccacaagctgaccttccgcgagaacgccaaagccaagacagaccacggggcggagatcgtgtacaagtcgccagtggtgtctggggacacgtctccacggcatctcagcaatgtctcctccaccggcagcatcgacatggtagactcgccccagctcgccacgctagctgacgaggtgtctgcctccctggccaagcagggtttgtgatcaggcccctggggcggtcaataattgtggagaggagagaatgagagagtgtggaaaaaaaaagaataatgacccggcccccgccctctgcccccagctgctcctcgcagttcggttaattggttaatcacttaacctgcttttgtcactcggctttggctcgggacttcaaaatcagtgatgggagtaagagcaaatttcatctttccaaattgatgggtgggctagtaataaaatatttaaaaaaaaacattcaaaaacatggccacatccaacatttcctcaggcaattccttttgattcttttttcttccccctccatgtagaagagggagaaggagaggctctgaaagctgcttctgggggatttcaagggactgggggtgccaaccacctctggccctgttgtgggggtgtcacagaggcagtggcagcaacaaaggatttgaaacttggtgtgttcgtggagccacaggcagacgatgtcaaccttgtgtgagtgtgacgggggttggggtggggcgggaggccacgggggaggccgaggcaggggctgggcagaggggagaggaagcacaagaagtgggagtgggagaggaagccacgtgctggagagtagacatccccctccttgccgctgggagagccaaggcctatgccacctgcagcgtctgagcggccgcctgtccttggtggccgggggtgggggcctgctgtgggtcagtgtgccaccctctgcagggcagcctgtgggagaagggacagcgggtaaaaagagaaggcaagctggcaggagggtggcacttcgtggatgacctccttagaaaagactgaccttgatgtcttgagagcgctggcctcttcctccctccctgcagggtagggggcctgagttgaggggcttccctctgctccacagaaaccctgttttattgagttctgaaggttggaactgctgccatgattttggccactttgcagacctgggactttagggctaaccagttctctttgtaaggacttgtgcctcttgggagacgtccacccgtttccaagcctgggccactggcatctctggagtgtgtgggggtctgggaggcaggtcccgagccccctgtccttcccacggccactgcagtcaccccgtctgcgccgctgtgctgttgtctgccgtgagagcccaatcactgcctatacccctcatcacacgtcacaatgtcccgaattcccagcctcaccaccccttctcagtaatgaccctggttggttgcaggaggtacctactccatactgagggtgaaattaagggaaggcaaagtccaggcacaagagtgggaccccagcctctcactctcagttccactcatccaactgggaccctcaccacgaatctcatgatctgattcggttccctgtctcctcctcccgtcacagatgtgagccagggcactgctcagctgtgaccctaggtgtttctgccttgttgacatggagagagccctttcccctgagaaggcctggccccttcctgtgctgagcccacagcagcaggctgggtgtcttggttgtcagtggtggcaccaggatggaagggcaaggcacccagggcaggcccacagtcccgctgtcccccacttgcaccctagcttgtagctgccaacctcccagacagcccagcccgctgctcagctccacatgcatagtatcagccctccacacccgacaaaggggaacacacccccttggaaatggttcttttcccccagtcccagctggaagccatgctgtctgttctgctggagcagctgaacatatacatagatgttgccctgccctccccatctgcaccctgttgagttgtagttggatttgtctgtttatgcttggattcaccagagtgactatgatagtgaaaagaaaaaaaaaaaaaaaaaaggacgcatgtatcttgaaatgcttgtaaagaggtttctaacccaccctcacgaggtgtctctcacccccacactgggactcgtgtggcctgtgtggtgccaccctgctggggcctcccaagttttgaaaggctttcctcagcacctgggacccaacagagaccagcttctagcagctaaggaggccgttcagctgtgacgaaggcctgaagcacaggattaggactgaagcgatgatgtccccttccctacttccccttggggctccctgtgtcagggcacagactaggtcttgtggctggtctggcttgcggcgcgaggatggttctctctggtcatagcccgaagtctcatggcagtcccaaaggaggcttacaactcctgcatcacaagaaaaaggaagccactgccagctggggggatctgcagctcccagaagctccgtgagcctcagccacccctcagactgggttcctctccaagctcgccctctggaggggcagcgcagcctcccaccaagggccctgcgaccacagcagggattgggatgaattgcctgtcctggatctgctctagaggcccaagctgcctgcctgaggaaggatgacttgacaagtcaggagacactgttcccaaagccttgaccagagcacctcagcccgctgaccttgcacaaactccatctgctgccatgagaaaagggaagccgcctttgcaaaacattgctgcctaaagaaactcagcagcctcaggcccaattctgccacttctggtttgggtacagttaaaggcaaccctgagggacttggcagtagaaatccagggcctcccctggggctggcagcttcgtgtgcagctagagctttacctgaaaggaagtctctgggcccagaactctccaccaagagcctccctgccgttcgctgagtcccagcaattctcctaagttgaagggatctgagaaggagaaggaaatgtggggtagatttggtggtggttagagatatgcccccctcattactgccaacagtttcggctgcatttcttcacgcacctcggttcctcttcctgaagttcttgtgccctgctcttcagcaccatgggccttcttatacggaaggctctgggatctcccccttgtggggcaggctcttggggccagcctaagatcatggtttagggtgatcagtgctggcagataaattgaaaaggcacgctggcttgtgatcttaaatgaggacaatccccccagggctgggcactcctcccctcccctcacttctcccacctgcagagccagtgtccttgggtgggctagataggatatactgtatgccggctccttcaagctgctgactcactttatcaatagttccatttaaattgacttcagtggtgagactgtatcctgtttgctattgcttgttgtgctatggggggaggggggaggaatgtgtaagatagttaacatgggcaaagggagatcttggggtgcagcacttaaactgcctcgtaacccttttcatgatttcaaccacatttgctagagggagggagcagccacggagttagaggcccttggggtttctcttttccactgacaggctttcccaggcagctggctagttcattccctccccagccaggtgcaggcgtaggaatatggacatctggttgctttggcctgctgccctctttcaggggtcctaagcccacaatcatgcctccctaagaccttggcatccttccctctaagccgttggcacctctgtgccacctctcacactggctccagacacacagcctgtgcttttggagctgagatcactcgcttcaccctcctcatctttgttctccaagtaaagccacgaggtcggggcgagggcagaggtgatcacctgcgtgtcccatctacagacctgcagcttcataaaacttctgatttctcttcagctttgaaaagggttaccctgggcactggcctagagcctcacctcctaatagacttagccccatgagtttgccatgttgagcaggactatttctggcacttgcaagtcccatgatttcttcggtaattctgagggtggggggagggacatgaaatcatcttagcttagctttctgtctgtgaatgtctatatagtgtattgtgtgttttaacaaatgatttacactgactgttgctgtaaaagtgaatttggaaataaagttattactctgattaaa

SEQ ID NO: 18137 - DNA, 5362 bp, Homo sapiens
  source 1..5362: mol_type = unassigned DNA
cccaccagctccggcaccaacagcagcgccgctgccaccgcccaccttctgccgccgccaccacagccaccttctcctcctccgctgtcctctcccgtcctcgcctctgtcgactatcaggtgaactttgaaccaggatggctgagccccgccaggagttcgaagtgatggaagatcacgctgggacgtacgggttgggggacaggaaagatcaggggggctacaccatgcaccaagaccaagagggtgacacggacgctggcctgaaagctgaagaagcaggcattggagacacccccagcctggaagacgaagctgctggtcacgtgacccaagctcgcatggtcagtaaaagcaaagacgggactggaagcgatgacaaaaaagccaagggggctgatggtaaaacgaagatcgccacaccgcggggagcagcccctccaggccagaagggccaggccaacgccaccaggattccagcaaaaaccccgcccgctccaaagacaccacccagctctggtgaacctccaaaatcaggggatcgcagcggctacagcagccccggctccccaggcactcccggcagccgctcccgcaccccgtcccttccaaccccacccacccgggagcccaagaaggtggcagtggtccgtactccacccaagtcgccgtcttccgccaagagccgcctgcagacagcccccgtgcccatgccagacctgaagaatgtcaagtccaagatcggctccactgagaacctgaagcaccagccgggaggcgggaaggtgcaaatagtctacaaaccagttgacctgagcaaggtgacctccaagtgtggctcattaggcaacatccatcataaaccaggaggtggccaggtggaagtaaaatctgagaagcttgacttcaaggacagagtccagtcgaagattgggtccctggacaatatcacccacgtccctggcggaggaaataaaaagattgaaacccacaagctgaccttccgcgagaacgccaaagccaagacagaccacggggcggagatcgtgtacaagtcgccagtggtgtctggggacacgtctccacggcatctcagcaatgtctcctccaccggcagcatcgacatggtagactcgccccagctcgccacgctagctgacgaggtgtctgcctccctggccaagcagggtttgtgatcaggcccctggggcggtcaataattgtggagaggagagaatgagagagtgtggaaaaaaaaagaataatgacccggcccccgccctctgcccccagctgctcctcgcagttcggttaattggttaatcacttaacctgcttttgtcactcggctttggctcgggacttcaaaatcagtgatgggagtaagagcaaatttcatctttccaaattgatgggtgggctagtaataaaatatttaaaaaaaaacattcaaaaacatggccacatccaacatttcctcaggcaattccttttgattcttttttcttccccctccatgtagaagagggagaaggagaggctctgaaagctgcttctgggggatttcaagggactgggggtgccaaccacctctggccctgttgtgggggtgtcacagaggcagtggcagcaacaaaggatttgaaacttggtgtgttcgtggagccacaggcagacgatgtcaaccttgtgtgagtgtgacgggggttggggtggggcgggaggccacgggggaggccgaggcaggggctgggcagaggggagaggaagcacaagaagtgggagtgggagaggaagccacgtgctggagagtagacatccccctccttgccgctgggagagccaaggcctatgccacctgcagcgtctgagcggccgcctgtccttggtggccgggggtgggggcctgctgtgggtcagtgtgccaccctctgcagggcagcctgtgggagaagggacagcgggtaaaaagagaaggcaagctggcaggagggtggcacttcgtggatgacctccttagaaaagactgaccttgatgtcttgagagcgctggcctcttcctccctccctgcagggtagggggcctgagttgaggggcttccctctgctccacagaaaccctgttttattgagttctgaaggttggaactgctgccatgattttggccactttgcagacctgggactttagggctaaccagttctctttgtaaggacttgtgcctcttgggagacgtccacccgtttccaagcctgggccactggcatctctggagtgtgtgggggtctgggaggcaggtcccgagccccctgtccttcccacggccactgcagtcaccccgtctgcgccgctgtgctgttgtctgccgtgagagcccaatcactgcctatacccctcatcacacgtcacaatgtcccgaattcccagcctcaccaccccttctcagtaatgaccctggttggttgcaggaggtacctactccatactgagggtgaaattaagggaaggcaaagtccaggcacaagagtgggaccccagcctctcactctcagttccactcatccaactgggaccctcaccacgaatctcatgatctgattcggttccctgtctcctcctcccgtcacagatgtgagccagggcactgctcagctgtgaccctaggtgtttctgccttgttgacatggagagagccctttcccctgagaaggcctggccccttcctgtgctgagcccacagcagcaggctgggtgtcttggttgtcagtggtggcaccaggatggaagggcaaggcacccagggcaggcccacagtcccgctgtcccccacttgcaccctagcttgtagctgccaacctcccagacagcccagcccgctgctcagctccacatgcatagtatcagccctccacacccgacaaaggggaacacacccccttggaaatggttcttttcccccagtcccagctggaagccatgctgtctgttctgctggagcagctgaacatatacatagatgttgccctgccctccccatctgcaccctgttgagttgtagttggatttgtctgtttatgcttggattcaccagagtgactatgatagtgaaaagaaaaaaaaaaaaaaaaaaggacgcatgtatcttgaaatgcttgtaaagaggtttctaacccaccctcacgaggtgtctctcacccccacactgggactcgtgtggcctgtgtggtgccaccctgctggggcctcccaagttttgaaaggctttcctcagcacctgggacccaacagagaccagcttctagcagctaaggaggccgttcagctgtgacgaaggcctgaagcacaggattaggactgaagcgatgatgtccccttccctacttccccttggggctccctgtgtcagggcacagactaggtcttgtggctggtctggcttgcggcgcgaggatggttctctctggtcatagcccgaagtctcatggcagtcccaaaggaggcttacaactcctgcatcacaagaaaaaggaagccactgccagctggggggatctgcagctcccagaagctccgtgagcctcagccacccctcagactgggttcctctccaagctcgccctctggaggggcagcgcagcctcccaccaagggccctgcgaccacagcagggattgggatgaattgcctgtcctggatctgctctagaggcccaagctgcctgcctgaggaaggatgacttgacaagtcaggagacactgttcccaaagccttgaccagagcacctcagcccgctgaccttgcacaaactccatctgctgccatgagaaaagggaagccgcctttgcaaaacattgctgcctaaagaaactcagcagcctcaggcccaattctgccacttctggtttgggtacagttaaaggcaaccctgagggacttggcagtagaaatccagggcctcccctggggctggcagcttcgtgtgcagctagagctttacctgaaaggaagtctctgggcccagaactctccaccaagagcctccctgccgttcgctgagtcccagcaattctcctaagttgaagggatctgagaaggagaaggaaatgtggggtagatttggtggtggttagagatatgcccccctcattactgccaacagtttcggctgcatttcttcacgcacctcggttcctcttcctgaagttcttgtgccctgctcttcagcaccatgggccttcttatacggaaggctctgggatctcccccttgtggggcaggctcttggggccagcctaagatcatggtttagggtgatcagtgctggcagataaattgaaaaggcacgctggcttgtgatcttaaatgaggacaatccccccagggctgggcactcctcccctcccctcacttctcccacctgcagagccagtgtccttgggtgggctagataggatatactgtatgccggctccttcaagctgctgactcactttatcaatagttccatttaaattgacttcagtggtgagactgtatcctgtttgctattgcttgttgtgctatggggggaggggggaggaatgtgtaagatagttaacatgggcaaagggagatcttggggtgcagcacttaaactgcctcgtaacccttttcatgatttcaaccacatttgctagagggagggagcagccacggagttagaggcccttggggtttctcttttccactgacaggctttcccaggcagctggctagttcattccctccccagccaggtgcaggcgtaggaatatggacatctggttgctttggcctgctgccctctttcaggggtcctaagcccacaatcatgcctccctaagaccttggcatccttccctctaagccgttggcacctctgtgccacctctcacactggctccagacacacagcctgtgcttttggagctgagatcactcgcttcaccctcctcatctttgttctccaagtaaagccacgaggtcggggcgagggcagaggtgatcacctgcgtgtcccatctacagacctgcagcttcataaaacttctgatttctcttcagctttgaaaagggttaccctgggcactggcctagagcctcacctcctaatagacttagccccatgagtttgccatgttgagcaggactatttctggcacttgcaagtcccatgatttcttcggtaattctgagggtggggggagggacatgaaatcatcttagcttagctttctgtctgtgaatgtctatatagtgtattgtgtgttttaacaaatgatttacactgactgttgctgtaaaagtgaatttggaaataaagttattactctgattaaataa

SEQ ID NO: 18138 - DNA, 5718 bp, Homo sapiens
  source 1..5718: mol_type = unassigned DNA
ggacggccgagcggcagggcgctcgcgcgcgcccactagtggccggaggagaaggctcccgcggaggccgcgctgcccgccccctcccctggggaggctcgcgttcccgctgctcgcgcctgcgccgcccgccggcctcaggaacgcgccctcttcgccggcgcgcgccctcgcagtcaccgccacccaccagctccggcaccaacagcagcgccgctgccaccgcccaccttctgccgccgccaccacagccaccttctcctcctccgctgtcctctcccgtcctcgcctctgtcgactatcaggtgaactttgaaccaggatggctgagccccgccaggagttcgaagtgatggaagatcacgctgggacgtacgggttgggggacaggaaagatcaggggggctacaccatgcaccaagaccaagagggtgacacggacgctggcctgaaagaatctcccctgcagacccccactgaggacggatctgaggaaccgggctctgaaacctctgatgctaagagcactccaacagcggaagatgtgacagcacccttagtggatgagggagctcccggcaagcaggctgccgcgcagccccacacggagatcccagaaggaaccacagctgaagaagcaggcattggagacacccccagcctggaagacgaagctgctggtcacgtgacccaagctcgcatggtcagtaaaagcaaagacgggactggaagcgatgacaaaaaagccaagggggctgatggtaaaacgaagatcgccacaccgcggggagcagcccctccaggccagaagggccaggccaacgccaccaggattccagcaaaaaccccgcccgctccaaagacaccacccagctctggtgaacctccaaaatcaggggatcgcagcggctacagcagccccggctccccaggcactcccggcagccgctcccgcaccccgtcccttccaaccccacccacccgggagcccaagaaggtggcagtggtccgtactccacccaagtcgccgtcttccgccaagagccgcctgcagacagcccccgtgcccatgccagacctgaagaatgtcaagtccaagatcggctccactgagaacctgaagcaccagccgggaggcgggaaggtgcaaatagtctacaaaccagttgacctgagcaaggtgacctccaagtgtggctcattaggcaacatccatcataaaccaggaggtggccaggtggaagtaaaatctgagaagcttgacttcaaggacagagtccagtcgaagattgggtccctggacaatatcacccacgtccctggcggaggaaataaaaagattgaaacccacaagctgaccttccgcgagaacgccaaagccaagacagaccacggggcggagatcgtgtacaagtcgccagtggtgtctggggacacgtctccacggcatctcagcaatgtctcctccaccggcagcatcgacatggtagactcgccccagctcgccacgctagctgacgaggtgtctgcctccctggccaagcagggtttgtgatcaggcccctggggcggtcaataattgtggagaggagagaatgagagagtgtggaaaaaaaaagaataatgacccggcccccgccctctgcccccagctgctcctcgcagttcggttaattggttaatcacttaacctgcttttgtcactcggctttggctcgggacttcaaaatcagtgatgggagtaagagcaaatttcatctttccaaattgatgggtgggctagtaataaaatatttaaaaaaaaacattcaaaaacatggccacatccaacatttcctcaggcaattccttttgattcttttttcttccccctccatgtagaagagggagaaggagaggctctgaaagctgcttctgggggatttcaagggactgggggtgccaaccacctctggccctgttgtgggggtgtcacagaggcagtggcagcaacaaaggatttgaaacttggtgtgttcgtggagccacaggcagacgatgtcaaccttgtgtgagtgtgacgggggttggggtggggcgggaggccacgggggaggccgaggcaggggctgggcagaggggagaggaagcacaagaagtgggagtgggagaggaagccacgtgctggagagtagacatccccctccttgccgctgggagagccaaggcctatgccacctgcagcgtctgagcggccgcctgtccttggtggccgggggtgggggcctgctgtgggtcagtgtgccaccctctgcagggcagcctgtgggagaagggacagcgggtaaaaagagaaggcaagctggcaggagggtggcacttcgtggatgacctccttagaaaagactgaccttgatgtcttgagagcgctggcctcttcctccctccctgcagggtagggggcctgagttgaggggcttccctctgctccacagaaaccctgttttattgagttctgaaggttggaactgctgccatgattttggccactttgcagacctgggactttagggctaaccagttctctttgtaaggacttgtgcctcttgggagacgtccacccgtttccaagcctgggccactggcatctctggagtgtgtgggggtctgggaggcaggtcccgagccccctgtccttcccacggccactgcagtcaccccgtctgcgccgctgtgctgttgtctgccgtgagagcccaatcactgcctatacccctcatcacacgtcacaatgtcccgaattcccagcctcaccaccccttctcagtaatgaccctggttggttgcaggaggtacctactccatactgagggtgaaattaagggaaggcaaagtccaggcacaagagtgggaccccagcctctcactctcagttccactcatccaactgggaccctcaccacgaatctcatgatctgattcggttccctgtctcctcctcccgtcacagatgtgagccagggcactgctcagctgtgaccctaggtgtttctgccttgttgacatggagagagccctttcccctgagaaggcctggccccttcctgtgctgagcccacagcagcaggctgggtgtcttggttgtcagtggtggcaccaggatggaagggcaaggcacccagggcaggcccacagtcccgctgtcccccacttgcaccctagcttgtagctgccaacctcccagacagcccagcccgctgctcagctccacatgcatagtatcagccctccacacccgacaaaggggaacacacccccttggaaatggttcttttcccccagtcccagctggaagccatgctgtctgttctgctggagcagctgaacatatacatagatgttgccctgccctccccatctgcaccctgttgagttgtagttggatttgtctgtttatgcttggattcaccagagtgactatgatagtgaaaagaaaaaaaaaaaaaaaaaaggacgcatgtatcttgaaatgcttgtaaagaggtttctaacccaccctcacgaggtgtctctcacccccacactgggactcgtgtggcctgtgtggtgccaccctgctggggcctcccaagttttgaaaggctttcctcagcacctgggacccaacagagaccagcttctagcagctaaggaggccgttcagctgtgacgaaggcctgaagcacaggattaggactgaagcgatgatgtccccttccctacttccccttggggctccctgtgtcagggcacagactaggtcttgtggctggtctggcttgcggcgcgaggatggttctctctggtcatagcccgaagtctcatggcagtcccaaaggaggcttacaactcctgcatcacaagaaaaaggaagccactgccagctggggggatctgcagctcccagaagctccgtgagcctcagccacccctcagactgggttcctctccaagctcgccctctggaggggcagcgcagcctcccaccaagggccctgcgaccacagcagggattgggatgaattgcctgtcctggatctgctctagaggcccaagctgcctgcctgaggaaggatgacttgacaagtcaggagacactgttcccaaagccttgaccagagcacctcagcccgctgaccttgcacaaactccatctgctgccatgagaaaagggaagccgcctttgcaaaacattgctgcctaaagaaactcagcagcctcaggcccaattctgccacttctggtttgggtacagttaaaggcaaccctgagggacttggcagtagaaatccagggcctcccctggggctggcagcttcgtgtgcagctagagctttacctgaaaggaagtctctgggcccagaactctccaccaagagcctccctgccgttcgctgagtcccagcaattctcctaagttgaagggatctgagaaggagaaggaaatgtggggtagatttggtggtggttagagatatgcccccctcattactgccaacagtttcggctgcatttcttcacgcacctcggttcctcttcctgaagttcttgtgccctgctcttcagcaccatgggccttcttatacggaaggctctgggatctcccccttgtggggcaggctcttggggccagcctaagatcatggtttagggtgatcagtgctggcagataaattgaaaaggcacgctggcttgtgatcttaaatgaggacaatccccccagggctgggcactcctcccctcccctcacttctcccacctgcagagccagtgtccttgggtgggctagataggatatactgtatgccggctccttcaagctgctgactcactttatcaatagttccatttaaattgacttcagtggtgagactgtatcctgtttgctattgcttgttgtgctatggggggaggggggaggaatgtgtaagatagttaacatgggcaaagggagatcttggggtgcagcacttaaactgcctcgtaacccttttcatgatttcaaccacatttgctagagggagggagcagccacggagttagaggcccttggggtttctcttttccactgacaggctttcccaggcagctggctagttcattccctccccagccaggtgcaggcgtaggaatatggacatctggttgctttggcctgctgccctctttcaggggtcctaagcccacaatcatgcctccctaagaccttggcatccttccctctaagccgttggcacctctgtgccacctctcacactggctccagacacacagcctgtgcttttggagctgagatcactcgcttcaccctcctcatctttgttctccaagtaaagccacgaggtcggggcgagggcagaggtgatcacctgcgtgtcccatctacagacctgcagcttcataaaacttctgatttctcttcagctttgaaaagggttaccctgggcactggcctagagcctcacctcctaatagacttagccccatgagtttgccatgttgagcaggactatttctggcacttgcaagtcccatgatttcttcggtaattctgagggtggggggagggacatgaaatcatcttagcttagctttctgtctgtgaatgtctatatagtgtattgtgtgttttaacaaatgatttacactgactgttgctgtaaaagtgaatttggaaataaagttattactctgattaaa

SEQ ID NO: 18139 - DNA, 2623 bp, Homo sapiens
  source 1..2623: mol_type = unassigned DNA
ctttacgtcggcgcgtaacgagggggtgcgtgtgaggtcatcgcgcgggcgggcgggcggggtctggcggtttgaacgagacgaagacggaaccggagccggttgcgggcagtggacgcggttctgccgagagccgaagatggcagtgaacgtatactcaacgtcagtgaccagtgataacctaagtcgacatgacatgctggcctggatcaatgagtctctgcagttgaatctgacaaagatcgaacagttgtgctcaggggctgcgtattgtcagtttatggacatgctgttccctggctccattgccttgaagaaagtgaaattccaagctaagctagaacacgagtacatccagaacttcaaaatactacaagcaggttttaagagaatgggtgttgacaaaataattcctgtggacaaattagtaaaaggaaagtttcaggacaattttgaattcgttcagtggttcaagaagtttttcgatgcaaactatgatggaaaagactatgaccctgtggctgccagacaaggtcaagaaactgcagtggctccttcccttgttgctccagctctgaataaaccgaagaaacctctcacttctagcagtgcagctccccagaggcccatctcaacacagagaaccgctgcggctcctaaggctggccctggtgtggtgcgaaagaaccctggtgtgggcaacggagacgacgaggcagctgagttgatgcagcaggtcaacgtattgaaacttactgttgaagacttggagaaagagagggatttctacttcggaaagctacggaacattgaattgatttgccaggagaacgagggggaaaacgaccctgtattgcagaggattgtagacattctgtatgccacagatgaaggctttgtgatacctgatgaagggggcccacaggaggagcaagaagagtattaacagcctggaccagcagagcaacatcggaattcttcactccaaatcatgtgcttaactgtaaaatactcccttttgttatccttagaggactcactggtttcttttcataagcaaaaagtacctcttcttaaagtgcactttgcagacgtttcactccttttccaataagtttgagttaggagcttttaccttgtagcagagcagtattaacacctagttggttcacctggaaaacagagaggctgaccgtggggctcaccatgcggatgcgggtcacactgaatgctggagagatgttatgtaatatgctgaggtggcgacctcagtggagaaatgtaaagactgaattgaattttaagctaatgtgaaatcagagaatgttgtaataagtaaatgccttaagagtatttaaaatatgcttccacatttcaaaatataaaatgtaacatgacaagagattttgcgtttgacattgtgtctgggaaggaagggccagaccttggaacctttggaacctgctgtcaacaggtcttacagggctgcttgaaccctcataggcctaggctttggtctaaaaggaacatttaaaaagttgccctgtaaagttatttggtgtcattgaccaattgcatcccagctaaaaagcaagaggcatcgttgcctggataatagaggatgtgtttcagccctgagatgttacagttgaagagcttggttttcattgagcatttctctatttttccagttatccccgaaatttctatgtattatattttttggggaagtgaggtgtgcccagttttttaatctaacaactacttttggggacttgcccacatctctgggatttgaatggggattgtatcccattttactgtcttttaggtttacatttaccacgtttctcttctctgctccccttgcccactggggactcctctttggctccttgaagtttgctgcttagagttggaagtgcagcaggcaggtgatcatgctgcaagttctttctggacctctggcaaagggagtggtcagtgaaggccatcgttaccttgggatctgccaggctggggtgttttcggtatctgctgttcacagctctccactgtaatccgaatactttgccagtgcactaatctctttggagataaaattcattagtgtgttactaaatgttaattttcttttgcggaaaatacagtaccgtgtctgaattaattattaatatttaaaatacttcattccttaactctccctcatttgctttgcccacagcctattcagttcctttgtttggcaggattctgcaaaatgtgtctcacccactactgagattgttcagcccctgatgtatttgtattgatttgtttctggtggtagcttgtcctgaaatgtgtgtagaaagcaagtattttatgataaaaatgttgtgtagtgcatgctctgtgtggaattcagaggaaaacccagattcagtgattaacaatgccaaaaaatgcaagtaactagccattgttcaaatgacagtggtgctatttctcttttgtggccttttagacttttgttgccctaaaattccattttattgggaacccattttccacctggtctttcttgacagggtttttttctactttaaacagtttctaaataaaattctgtatttcaagagta

SEQ ID NO: 18140 - DNA, 6202 bp, Homo sapiens
  source 1..6202: mol_type = unassigned DNA
agagggcggggccgcaggagggcggggcgcgagcgagagctgggagaaggcagtgagcgagcaggcggcaggcacggtccgtgcggagcaggcgagcgagcgggaagacgcagccaccttcctcaccagccagcccacagcggtttgttccccttctcgggagtgcgccaatgcctgggccgacccaaaccctgtccccaaatggcgagaacaacaacgacatcatccaggataataacgggaccatcattcctttccggaagcacacagtgcgcggggagcgttcctacagttggggaatggcggtcaatgtgtattctacctcgataacccaagagactatgagcagacatgacatcattgcatgggttaatgacatagtatctttaaactacacaaaagtggaacagctttgttcaggagcggcctattgccaattcatggacatgctcttccctggctgcattagtttgaagaaagtaaaatttcaagcaaagctggaacatgaatatattcacaattttaaacttctgcaagcatcatttaagcgaatgaacgttgataaggtaattccagtggagaagctagtgaaaggacgtttccaggacaacctggattttattcaatggtttaagaaattctatgatgctaactacgatgggaaggagtatgatcctgtagaggcacgacaagggcaagatgcaattcctcctcctgaccctggtgaacagatcttcaacctgccaaaaaagtctcaccatgcaaactcccccacagcaggtgcagctaaatcaagtccagcagctaaaccaggatccacaccttctcgaccctcatcagccaaaagggcttcttccagtggctcagcatccaaatccgataaagatttagaaacgcaggtcatacagcttaatgaacaggtacattcattaaaacttgcccttgaaggcgtggaaaaggaaagggatttctactttgggaagttgagagagatcgagctactctgccaagaacacgggcaggaaaatgatgacctcgtgcagagactaatggacatcctgtatgcttcagaagaacacgagggccacacagaagagccggaagcagaggagcaagcccacgaacagcagcccccgcagcaggaagagtactgacccaccccggctgctcttgacacttccattgtgtgtgggaacgtttcttctggagaattggaacatgtgtggccccaagctcaacagaaaccagttgttcccaatctgccgttaccatcaacgcactgttgcatatgccagccactgcgcttggttcccattttctttgccaaggtgtattagcggacggccctctggccacctacccgagagatcgtagggtcacatacatccaacttcaccacttggctgcttgagattggttctgctcttttcttcatttctttccagaacaactctttcccaccccaacaccactgccaccacccctctttttatcctggtgtgaaacaatggtaatttgatatatggtatttatattggcatttttcaacccagtgtcactagatgtcacacacatttgtggtgctttgatgtttgcaagtctaacctctgaacataaatttggtcaaataattggaacaaagggaaacagatacttgatatgaaagccataatgacggtgacttgtgtcgtgggggaaaacataaggtcattttctccctctactcacaatactaaagggaaaaaatggattcaaagctaggatttcagggcccagcagtgttcctccatcagcatgttagacaactacacagtatgttgttagttttgaaagacattcactcaaggaaaacaccatctcaactttgcccgctcaccatgtcccttgcccccatgtagcccatttcccaggttatgctcttttctttctcagggtcctctttggtgggcagccactccccgagatgttgccatcagttttctgcagtccaaagagggtatggttaggtacgggtcttcctgcctcattcctcttcctctttgtgtaggtttcagccacaaaactgtcattcactctaggggacccctactaaagggtaacttcaggtgtgcagccctgagctccaaggctctgcaccatgccacacacttgctgtaaggctagaagtgaagaccttattaataggagcataattgcgagggagaatcatggttctgcagtctggtgtagacactggaataacagcacagaaaaatctatgactcccaatatcttctagaataaagaattttccctctttaacacaagggccctccttgtcattgaccttagctaaaccatggcaattcataaatagaggaaacattaatgaattaaaagcattccttattttttaactaatatttgtacattttcttagtctctttccaagtctttgcctcttttttttctttatttttattttttcctttgacagatggtatcccttcctggatcattcatttcaccttggtttctaactttaggtttactttcacttgttatttgacttagcaggtgcaacaaaaacaagaaacaaatgtgcccaccccactttccgcttaactgaaaagcttaaaataaatttctgaattatgtatcctgaagctttgaaatttctttattaatcgatgaaatatgaattctaaattctagcattgaagcttttcaccaaaagaagtctctccaaaataaatcttttgcagcaaagtgatatttattgagttatgtggaaaagatggcttgtatttttcagattattacaacacactgtgcagaattagacagatgttccgtggtgtttggtttccctttcttctctctcctgctcactctgcattatagcagcagcttatttctctaaggctggacagcctggctctcggcagtgacgtcctcccacacctggtcacaagtagtagtggctgtgctatacccagcatcatgcttaacagcgtgttgcccttctgagcctgttgtactcactgatctctttaaaaacaaaaaatagctcttgtaaaaggtcacaataactctatgcacctgatactgcagtggttcctaggccattcttcatctgctctggacatctcagtcatacccaatgctcagtggatcatgaccaaactcctgtcatgtggatgcacgtgagtgggtagcagggagtcaggatcctgccttctccagcaaccccttactgctgtataacttgcataagcctccctggtgactcttgcaggaaccactccattgccctccagctccccagccttctcagttataaacatgctggccagatctcttagcctgcaaagagaactttccccagtcaccatagaccattctccttcctgaaggcttggggcagaccattcgtttatttagagaagagctatacattcttctttctggtcccatcttaaacgtcttctgttgtgctgcaccccagatggtgtctcagatgctttggggaatctttaacagctgaatttgagtcagtcctcttaggctgcacctccagcctctgcagatcccccctcatttcccatggatggtgggaccccattattctctcatctcggcattcagggaacagtttccttagcggcccctggtcacatgtcatcgggctgggcaggaagcgtccctgattgcgtgctccacttctccctctcaggaagcccagtttcatccttagtaccccccctcgtgcccgctgtcggctggttatagcacttccactgctactgtcagataggaagtgatcgaagcagggggcaaagagaaagcccatatttgttctaagcagaaaagcaggaaaaaaaaaaaaaaaaaagaaagaaaaacacctgttgacctgagagaagtaaattccagaagggaaccaagaactcttcccttccctggtgagtatttccattattccgttaaggtttaatatgcattcagattacttttactaaataggacaccataaagcttttgttatatattaaatgtaaactgaaaggaatgtaaacatatgtattgttaattataaatatagataagtaatgacataatagatgaaaaagtcttattcagatgtatcacattcattttacattacccacctattgtcgcatggtagaatagttttttgtctctgaatatgtgaataacttgacttgcattgatctttttacatatttaataaaaaaaaaagtatatgttaaaatctgcctggagttacagattcttaaatttttatgctgaagcttcccttttcagtcagcatgtgaataggaatagatttgtgtggatttacacatctacccacattttattatgatttccccggggcgggggttgtctttgtttttattgatggccaatgttgttaacaagagttacagactcgtatttgatatcaaatgtagcagctataataccttttaaaaactttaccaaaaaaaaaaaaaaaaagacataaagagaaaacattcccttgggaaacattccacctgcaagcaaacagaatcctagctcctgcaggtccagcatactccatctggacaagacagtgctgggcaaataggaaactgtgggagaagcaggcagatgtttctaagtacagctttgtggcagaatgacctgcttgacaaaaaccctttgaataagtgtttgttgactttaaacggcaatgatttatcgacatgagctataattgtaataacaatttaacagatacaggaataggtgaaaagagaaatgtatttcaactggcccagtaatcacctgtggagactgcagagcaggccacactgggatgcagacgttaccctggagcctgcaggttactgggcttcagctaatacccttttcaccgtgaagagtgccagccttccctacgctgcttccaagcaccacctagaggccagtttggtttctctactgtcctttggccactattttccagtcacttgcctttaggcacatttctattaaaataagtgggaaaataacagaaagcaaagatgttacccctcttctccatctacattcatttcctcccaaggtacaccacttgtgacagaagtttgtgagccattacctgggtttgaaatttcatgctcaaagtacatgtgtgtttcccatttaatccacgaactctggggttttaaacacttgatcttagacatttgtgcacagacaaaaatacatgtgattcatcttacaaaatgtacactggtggactctagtaaatctgtcactgatggttcaaaggtggcgaaataacatgcttgttctattttattaaatctgacatcatttctaaaaatttgttgcttctggtactatggataggctcaagtccagagacaccccttctcaaaaaagttaatggaattccattgaatttgagttacaaaatgccagttctctaaaacacacacagacaacttggtttctgacttgttttattccttttaactgctagaacacaactatgatcattaattaaggctgctatcactagtaataacttttactgacccagtttctcagcactgaggcaatgttgccaaatagcacaaatgatggataaaaacatctccgtggatgtctaatagctcctgtcttgccaaactaggaactcataaaagatgttttccactcattagaggaatcctggctttatttgcctaaaggaaagcaaagctgaggagaaaatccattgatccctggaggaccctcacgtggcattggtactttggatcacaagactgccccacgggcagaccccccaactctgagccagaccccatgtcttgtatagattacgagtacacagaaggtgcatttactgaggctgtgcttctgttttgggtttacaaatgtcatcaaaatggaagacccagctgaagttaatttgttggatgcctttttctctcaattcactggaaaaaaaaaatgtttaactttttagcttccaagttttaatttctaaaacaggtttcttgtggtattttgcaacgattttatcatcaagcctggtgataaattgtttttaaagggtaatgatgtattaatgtacctttgaatttacgattctcagtaggaaactaacccaagacctaaatgttttcttttctagagaataaaaaagttaagtacatgtttc

SEQ ID NO: 18141 - DNA, 3121 bp, Homo sapiens
  source 1..3121: mol_type = unassigned DNA
ctctcgggtggactcccggagcggcggcggcggcggcggtggcagactgcgagtcacgtgcgacagaggaggcggagcacggcggccgggtgggtggagaaaacaaagcccccagctgtcagcagaggaaggaggcgacagcgccggagcagtgtcctgtttcccagaggaacagttcatttcaacagccagggagaaagcctggatgctcaagttggggaatggcggtcaatgtgtattctacctcgataacccaagagactatgagcagacatgacatcattgcatgggttaatgacatagtatctttaaactacacaaaagtggaacagctttgttcaggagcggcctattgccaattcatggacatgctcttccctggctgcattagtttgaagaaagtaaaatttcaagcaaagctggaacatgaatatattcacaattttaaacttctgcaagcatcatttaagcgaatgaacgttgataaggtaattccagtggagaagctagtgaaaggacgtttccaggacaacctggattttattcaatggtttaagaaattctatgatgctaactacgatgggaaggagtatgatcctgtagaggcacgacaagggcaagatgcaattcctcctcctgaccctggtgaacagatcttcaacctgccaaaaaagtctcaccatgcaaactcccccacagcaggtgcagctaaatcaagtccagcagctaaaccaggatccacaccttctcgaccctcatcagccaaaagggcttcttccagtggctcagcatccaaatccgataaagatttagaaacgcaggtcatacagcttaatgaacaggtacattcattaaaacttgcccttgaaggcgtggaaaaggaaagggatttctactttgggaagttgagagagatcgagctactctgccaagaacacgggcaggaaaatgatgacctcgtgcagagactaatggacatcctgtatgcttcagaagaacacgagggccacacagaagagccggaagcagaggagcaagcccacgaacagcagcccccgcagcaggaagagtactgacccaccccggctgctcttgacacttccattgtgtgtgggaacgtttcttctggagaattggaacatgtgtggccccaagctcaacagaaaccagttgttcccaatctgccgttaccatcaacgcactgttgcatatgccagccactgcgcttggttcccattttctttgccaaggtgtattagcggacggccctctggccacctacccgagagatcgtagggtcacatacatccaacttcaccacttggctgcttgagattggttctgctcttttcttcatttctttccagaacaactctttcccaccccaacaccactgccaccacccctctttttatcctggtgtgaaacaatggtaatttgatatatggtatttatattggcatttttcaacccagtgtcactagatgtcacacacatttgtggtgctttgatgtttgcaagtctaacctctgaacataaatttggtcaaataattggaacaaagggaaacagatacttgatatgaaagccataatgacggtgacttgtgtcgtgggggaaaacataaggtcattttctccctctactcacaatactaaagggaaaaaatggattcaaagctaggatttcagggcccagcagtgttcctccatcagcatgttagacaactacacagtatgttgttagttttgaaagacattcactcaaggaaaacaccatctcaactttgcccgctcaccatgtcccttgcccccatgtagcccatttcccaggttatgctcttttctttctcagggtcctctttggtgggcagccactccccgagatgttgccatcagttttctgcagtccaaagagggtatggttaggtacgggtcttcctgcctcattcctcttcctctttgtgtaggtttcagccacaaaactgtcattcactctaggggacccctactaaagggtaacttcaggtgtgcagccctgagctccaaggctctgcaccatgccacacacttgctgtaaggctagaagtgaagaccttattaataggagcataattgcgagggagaatcatggttctgcagtctggtgtagacactggaataacagcacagaaaaatctatgactcccaatatcttctagaataaagaattttccctctttaacacaagggccctccttgtcattgaccttagctaaaccatggcaattcataaatagaggaaacattaatgaattaaaagcattccttattttttaactaatatttgtacattttcttagtctctttccaagtctttgcctcttttttttctttatttttattttttcctttgacagatggtatcccttcctggatcattcatttcaccttggtttctaactttaggtttactttcacttgttatttgacttagcaggtgcaacaaaaacaagaaacaaatgtgcccaccccactttccgcttaactgaaaagcttaaaataaatttctgaattatgtatcctgaagctttgaaatttctttattaatcgatgaaatatgaattctaaattctagcattgaagcttttcaccaaaagaagtctctccaaaataaatcttttgcagcaaagtgatatttattgagttatgtggaaaagatggcttgtatttttcagattattacaacacactgtgcagaattagacagatgttccgtggtgtttggtttccctttcttctctctcctgctcactctgcattatagcagcagcttatttctctaaggctggacagcctggctctcggcagtgacgtcctcccacacctggtcacaagtagtagtggctgtgctatacccagcatcatgcttaacagcgtgttgcccttctgagcctgttgtactcactgatctctttaaaaacaaaaaatagctcttgtaaaaggtcacaataactctatgcacctgatactgcagtggttcctaggccattcttcatctgctctggacatctcagtcatacccaatgctcagtggatcatgaccaaactcctgtcatgtggatgcacgtgagtgggtagca

SEQ ID NO: 18142 - DNA, 3267 bp, Homo sapiens
  source 1..3267: mol_type = unassigned DNA
gtagacccgctaggcaggaagaggtcactaaaaatactatcgtgctgtcaatgtagaatgaagggttaagcgctcaaacccgcgcccgcgcgcaccgaaacggaagaacttccttgattagcatagtatcgaccctggggccgcgctgcgaggcggaggttcggtcccagctggggtgaagtgtgcagaccggttgcgattgtggtcagacgcagcacctacttctaatctgaggacccgcgatttacacttttgctgaataggacactgtggaatgaaacagaacagagatcaaaagtgtcctgtttcccagaggaacagttcatttcaacagccagggagaaagcctggatgctcaagttggggaatggcggtcaatgtgtattctacctcgataacccaagagactatgagcagacatgacatcattgcatgggttaatgacatagtatctttaaactacacaaaagtggaacagctttgttcaggagcggcctattgccaattcatggacatgctcttccctggctgcattagtttgaagaaagtaaaatttcaagcaaagctggaacatgaatatattcacaattttaaacttctgcaagcatcatttaagcgaatgaacgttgataaggtaattccagtggagaagctagtgaaaggacgtttccaggacaacctggattttattcaatggtttaagaaattctatgatgctaactacgatgggaaggagtatgatcctgtagaggcacgacaagggcaagatgcaattcctcctcctgaccctggtgaacagatcttcaacctgccaaaaaagtctcaccatgcaaactcccccacagcaggtgcagctaaatcaagtccagcagctaaaccaggatccacaccttctcgaccctcatcagccaaaagggcttcttccagtggctcagcatccaaatccgataaagatttagaaacgcaggtcatacagcttaatgaacaggtacattcattaaaacttgcccttgaaggcgtggaaaaggaaagggatttctactttgggaagttgagagagatcgagctactctgccaagaacacgggcaggaaaatgatgacctcgtgcagagactaatggacatcctgtatgcttcagaagaacacgagggccacacagaagagccggaagcagaggagcaagcccacgaacagcagcccccgcagcaggaagagtactgacccaccccggctgctcttgacacttccattgtgtgtgggaacgtttcttctggagaattggaacatgtgtggccccaagctcaacagaaaccagttgttcccaatctgccgttaccatcaacgcactgttgcatatgccagccactgcgcttggttcccattttctttgccaaggtgtattagcggacggccctctggccacctacccgagagatcgtagggtcacatacatccaacttcaccacttggctgcttgagattggttctgctcttttcttcatttctttccagaacaactctttcccaccccaacaccactgccaccacccctctttttatcctggtgtgaaacaatggtaatttgatatatggtatttatattggcatttttcaacccagtgtcactagatgtcacacacatttgtggtgctttgatgtttgcaagtctaacctctgaacataaatttggtcaaataattggaacaaagggaaacagatacttgatatgaaagccataatgacggtgacttgtgtcgtgggggaaaacataaggtcattttctccctctactcacaatactaaagggaaaaaatggattcaaagctaggatttcagggcccagcagtgttcctccatcagcatgttagacaactacacagtatgttgttagttttgaaagacattcactcaaggaaaacaccatctcaactttgcccgctcaccatgtcccttgcccccatgtagcccatttcccaggttatgctcttttctttctcagggtcctctttggtgggcagccactccccgagatgttgccatcagttttctgcagtccaaagagggtatggttaggtacgggtcttcctgcctcattcctcttcctctttgtgtaggtttcagccacaaaactgtcattcactctaggggacccctactaaagggtaacttcaggtgtgcagccctgagctccaaggctctgcaccatgccacacacttgctgtaaggctagaagtgaagaccttattaataggagcataattgcgagggagaatcatggttctgcagtctggtgtagacactggaataacagcacagaaaaatctatgactcccaatatcttctagaataaagaattttccctctttaacacaagggccctccttgtcattgaccttagctaaaccatggcaattcataaatagaggaaacattaatgaattaaaagcattccttattttttaactaatatttgtacattttcttagtctctttccaagtctttgcctcttttttttctttatttttattttttcctttgacagatggtatcccttcctggatcattcatttcaccttggtttctaactttaggtttactttcacttgttatttgacttagcaggtgcaacaaaaacaagaaacaaatgtgcccaccccactttccgcttaactgaaaagcttaaaataaatttctgaattatgtatcctgaagctttgaaatttctttattaatcgatgaaatatgaattctaaattctagcattgaagcttttcaccaaaagaagtctctccaaaataaatcttttgcagcaaagtgatatttattgagttatgtggaaaagatggcttgtatttttcagattattacaacacactgtgcagaattagacagatgttccgtggtgtttggtttccctttcttctctctcctgctcactctgcattatagcagcagcttatttctctaaggctggacagcctggctctcggcagtgacgtcctcccacacctggtcacaagtagtagtggctgtgctatacccagcatcatgcttaacagcgtgttgcccttctgagcctgttgtactcactgatctctttaaaaacaaaaaatagctcttgtaaaaggtcacaataactctatgcacctgatactgcagtggttcctaggccattcttcatctgctctggacatctcagtcatacccaatgctcagtggatcatgaccaaactcctgtcatgtggatgcacgtgagtgggtagca

SEQ ID NO: 18143 - DNA, 2401 bp, Homo sapiens
  source 1..2401: mol_type = unassigned DNA
gagagctgggagaaggcagtgagcgagcaggcggcaggcacggtccgtgcggagcaggcgagcgagcgggaagacgcagccaccttcctcaccagccagcccacagcggtttgttccccttctcgggagtgcgccaatgcctgggccgacccaaaccctgtccccaaatggcgagaacaacaacgacatcatccaggataataacgggaccatcattcctttccggaagcacacagtgcgcggggagcgttcctacaggagcggcctattgccaattcatggacatgctcttccctggctgcattagtttgaagaaagtaaaatttcaagcaaagctggaacatgaatatattcacaattttaaacttctgcaagcatcatttaagcgaatgaacgttgataaggtaattccagtggagaagctagtgaaaggacgtttccaggacaacctggattttattcaatggtttaagaaattctatgatgctaactacgatgggaaggagtatgatcctgtagaggcacgacaagggcaagatgcaattcctcctcctgaccctggtgaacagatcttcaacctgccaaaaaagtctcaccatgcaaactcccccacagcaggtgcagctaaatcaagtccagcagctaaaccaggatccacaccttctcgaccctcatcagccaaaagggcttcttccagtggctcagcatccaaatccgataaagatttagaaacgcaggtcatacagcttaatgaacaggtacattcattaaaacttgcccttgaaggcgtggaaaaggaaagggatttctactttgggaagttgagagagatcgagctactctgccaagaacacgggcaggaaaatgatgacctcgtgcagagactaatggacatcctgtatgcttcagaagaacacgagggccacacagaagagccggaagcagaggagcaagcccacgaacagcagcccccgcagcaggaagagtactgacccaccccggctgctcttgacacttccattgtgtgtgggaacgtttcttctggagaattggaacatgtgtggccccaagctcaacagaaaccagttgttcccaatctgccgttaccatcaacgcactgttgcatatgccagccactgcgcttggttcccattttctttgccaaggtgtattagcggacggccctctggccacctacccgagagatcgtagggtcacatacatccaacttcaccacttggctgcttgagattggttctgctcttttcttcatttctttccagaacaactctttcccaccccaacaccactgccaccacccctctttttatcctggtgtgaaacaatggtaatttgatatatggtatttatattggcatttttcaacccagtgtcactagatgtcacacacatttgtggtgctttgatgtttgcaagtctaacctctgaacataaatttggtcaaataattggaacaaagggaaacagatacttgatatgaaagccataatgacggtgacttgtgtcgtgggggaaaacataaggtcattttctccctctactcacaatactaaagggaaaaaatggattcaaagctaggatttcagggcccagcagtgttcctccatcagcatgttagacaactacacagtatgttgttagttttgaaagacattcactcaaggaaaacaccatctcaactttgcccgctcaccatgtcccttgcccccatgtagcccatttcccaggttatgctcttttctttctcagggtcctctttggtgggcagccactccccgagatgttgccatcagttttctgcagtccaaagagggtatggttaggtacgggtcttcctgcctcattcctcttcctctttgtgtaggtttcagccacaaaactgtcattcactctaggggacccctactaaagggtaacttcaggtgtgcagccctgagctccaaggctctgcaccatgccacacacttgctgtaaggctagaagtgaagaccttattaataggagcataattgcgagggagaatcatggttctgcagtctggtgtagacactggaataacagcacagaaaaatctatgactcccaatatcttctagaataaagaattttccctctttaacacaagggccctccttgtcattgaccttagctaaaccatggcaattcataaatagaggaaacattaatgaattaaaagcattccttattttttaactaatatttgtacattttcttagtctctttccaagtctttgcctcttttttttctttatttttattttttcctttgacagatggtatcccttcctggatcattcatttcaccttggtttctaactttaggtttactttcacttgttatttgacttagcaggtgcaac

SEQ ID NO: 18144 - DNA, 1892 bp, Homo sapiens
  source 1..1892: mol_type = unassigned DNA
agcggcggccgcatcgcgcctgcgcagtgccctcgtcccccgcagtctctgtgcgttgaagccggagaccgcggcggcctcagcgaggaccctccgccccggagccgccggccggagccgcagcctctgccgcagcgcccccgccacctgtcccctccccctccgcctccgccggagccgcctcgtgcactctggggtatggccgtcaatgtgtactccacatctgtgaccagtgaaaatctgagtcgccatgatatgcttgcatgggtcaacgactccctgcacctcaactataccaagatagaacagctttgttcaggggcagcctactgccagttcatggacatgctcttccccggctgtgtgcacttgaggaaagtgaagttccaggccaaactagagcacgaatacatccacaacttcaaggtgctgcaagcagctttcaagaagatgggtgttgacaaaatcattcctgtagagaaattagtgaaaggaaaattccaagataattttgagtttattcagtggtttaagaaattctttgacgcaaactatgatggaaaggattacaaccctctgctggcgcggcagggccaggacgtagcgccacctcctaacccaggtgatcagatcttcaacaaatccaagaaactcattggcacagcagttccacagaggacgtcccccacaggcccaaaaaacatgcagacctctggccggctgagcaatgtggcccccccctgcattctccggaagaatcctccatcagcccgaaatggcggccatgagactgatgcccaaattcttgaactcaaccaacagctggtggacttgaagctgacagtggatgggctggagaaggaacgtgacttctacttcagcaaacttcgtgacatcgagctcatctgccaggagcatgaaagtgaaaacagccctgttatctcaggcatcattggcatcctctatgccacagaggaaggattcgcaccccctgaggacgatgagattgaagagcatcaacaagaagaccaggacgagtactgagggcggccgcagccctggctgactgcacagcttccccgtgcctccctccctgctccactcccacattatagtcctttcctaacacggtcggccgggtgctttgtgtcagtgctgcagcactggggagccaggcgaggggggcttgggggcatggggccggaaagcaggcagaagcccgtcctgggtggtgctggcccagttggtgggacccctgtccacacccaccctatttatttccgttgtctctctgctgtgtcgcccaacacttcccagggtgctgctgccacccgccccagccagccacctgctcctgacagccagcagctgtgtatttgacaaagtcattggtatatttttacttactggattctccttgcactttacctgttcttttccagagctgacagcacgggctccggcgcagtgtgcctggcttggcttcccttccccatggctgggggctggggtaggactcacccattctaatttattttgtcttttggcttctcagtagctaaggggaaggctgatgtcaggagagggagagggggctgaggaggtagtgctgtaggcccagggggtcagggaaagggaggggggcatgtgagggatggaaatgacctcctggcaccaggctcacccacccaaggccccctgccccagcactgaatcccagcgctgccctgaggcccccagccactccctccagcagcctggttcaccacacaaactctgcctggaccccattgtctgtctgcttcccacctgccctccccaccccctgcccctcgggcaccagcctgcatatgtgttcacttttatttaaataaacttgtgtggtaaaagta

SEQ ID NO: 18145 - DNA, 1001 bp, Homo sapiens
  source 1..1001: mol_type = unassigned DNA
caggggtaggggtagcaattttgcagattttccaaacaggtgacttcagcccccgggcctgggcaggaaggggtagcccagtgacaatgggcatagtcccacttcaggaacgggaaacgtgttggctggctctgtggagttctctctcttctgatcccacagcatctgttccagttgtcttggccgctggggtatggccgtcaatgtgtactccacatctgtgaccagtgaaaatctgagtcgccatgatatgcttgcatgggtcaacgactccctgcacctcaactataccaagatagaacagctttgttcaggggcagcctactgccagttcatggacatgctcttccccggctgtgtgcacttgaggaaagtgaagttccaggccaaactagagcacgaatacatccacaacttcaaggtgctgcaagcagctttcaagaagatgggtgttgacaaaatcattcctgtagagaaattagtgaaaggaaaattccaagataattttgagtttattcagtggtttaagaaattctttgacgcaaactatgatggaaaggattacaaccctctgctggcgcggcagggccaggacgtagcgccacctcctaacccagttccacagaggacgtcccccacaggcccaaaaaacatgcagacctctggccggctgagcaatgtggcccccccctgcattctccggaagaatcctccatcagcccgaaatggcggccatgagactgatgcccaaattcttgaactcaaccaacagctggtggacttgaagctgacagtggatgggctggagaaggaacgtgacttctacttcagcaaacttcgtgacatcgagctcatctgccaggagcatgaaagtgaaaacagccctgttatctcaggcatcattggcatcctctatgccacagaggaaggattcgcaccccctgaggacgatgagattgaagagcatcaacaagaagaccaggacgagtactgagggcggc

SEQ ID NO: 18146 - DNA, 1801 bp, Homo sapiens
  source 1..1801: mol_type = unassigned DNA
ctctgtgcgttgaagccggagaccgcggcggcctcagcgaggaccctccgccccggagccgccggccggagccgcagcctctgccgcagcgcccccgccacctgtcccctccccctccgcctccgccggagccgcctcgtgcactctggggtatggccgtcaatgtgtactccacatctgtgaccagtgaaaatctgagtcgccatgatatgcttgcatgggtcaacgactccctgcacctcaactataccaagatagaacagctttgttcaggggcagcctactgccagttcatggacatgctcttccccggctgtgtgcacttgaggaaagtgaagttccaggccaaactagagcacgaatacatccacaacttcaaggtgctgcaagcagctttcaagaagatgggtgttgacaaaatcattcctgtagagaaattagtgaaaggaaaattccaagataattttgagtttattcagtggtttaagaaattctttgacgcaaactatgatggaaaggattacaaccctctgctggcgcggcagggccaggacgtagcgccacctcctaacccagttccacagaggacgtcccccacaggcccaaaaaacatgcagacctctggccggctgagcaatgtggcccccccctgcattctccggaagaatcctccatcagcccgaaatggcggccatgagactgatgcccaaattcttgaactcaaccaacagctggtggacttgaagctgacagtggatgggctggagaaggaacgtgacttctacttcagcaaacttcgtgacatcgagctcatctgccaggagcatgaaagtgaaaacagccctgttatctcaggcatcattggcatcctctatgccacagaggaaggattcgcaccccctgaggacgatgagattgaagagcatcaacaagaagaccaggacgagtactgagggcggccgcagccctggctgactgcacagcttccccgtgcctccctccctgctccactcccacattatagtcctttcctaacacggtcggccgggtgctttgtgtcagtgctgcagcactggggagccaggcgaggggggcttgggggcatggggccggaaagcaggcagaagcccgtcctgggtggtgctggcccagttggtgggacccctgtccacacccaccctatttatttccgttgtctctctgctgtgtcgcccaacacttcccagggtgctgctgccacccgccccagccagccacctgctcctgacagccagcagctgtgtatttgacaaagtcattggtatatttttacttactggattctccttgcactttacctgttcttttccagagctgacagcacgggctccggcgcagtgtgcctggcttggcttcccttccccatggctgggggctggggtaggactcacccattctaatttattttgtcttttggcttctcagtagctaaggggaaggctgatgtcaggagagggagagggggctgaggaggtagtgctgtaggcccagggggtcagggaaagggaggggggcatgtgagggatggaaatgacctcctggcaccaggctcacccacccaaggccccctgccccagcactgaatcccagcgctgccctgaggcccccagccactccctccagcagcctggttcaccacacaaactctgcctggaccccattgtctgtctgcttcccacctgccctccccaccccctgcccctcgggcaccagcctgcatatgtgttcacttttatttaaataaacttgtgtggtaaaagta

SEQ ID NO: 18147 - DNA, 878 bp, Homo sapiens
  source 1..878: mol_type = unassigned DNA
caagcccagaataacctggatgtgtgactcacaggggtaggggtagcaattttgcagattttccaaacaggtgacttcagcccccgggcctgggcaggaaggggtagcccagtgacaatgggcatagtcccacttcaggaacgggaaacgtgttggctggctctgtggagttctctctcttctgatcccacagcatctgttccagttgtcttggccgctggggtatggccgtcaatgtgtactccacatctgtgaccagtgaaaatctgagtcgccatgatatgcttgcatgggtcaacgactccctgcacctcaactataccaagatagaacagctttgttcaggggcagcctactgccagttcatggacatgctcttccccggctgtgtgcacttgaggaaagtgaagttccaggccaaactagagcacgaatacatccacaacttcaaggtgctgcaagcagctttcaagaagatgggtgttgacaaaatcattcctgtagagaaattagtgaaaggaaaattccaagataattttgagtttattcagtggtttaagaaattctttgacgcaaactatgatggaaaggattacaaccctctgctggcgcggcagggccaggacgtagcgccacctcctaacccaggtgatcagatcttcaacaaatccaagaaactcattggcacagcagttccacagaggacgtcccccacaggcccaaaaaacatgcagacctctggccggctgagcaatgtggcccccccctgcattctccggaagaatcctccatcagcccgaaatggcggccatgagactgatgcccaaattcttgaactcaaccaacagctggtggacttgaagctgacagtggatggg

SEQ ID NO: 18148 - DNA, 6463 bp, Homo sapiens
  source 1..6463: mol_type = unassigned DNA
gattggcgaagctcctccgcggcccaagccagccacctacaacgtctctgagaactgatttgaaataagagccaggcggtcctcgcttccctgcgaccgacttttcataggctgggggagaaaaggttgagaaacttgacattgtctcgagcagagtgcgtgtagcaacagatcaaagaaaaagaggacgaaaacgtgctctttgctgcccgtagatttcgccgggttgcttttgtcttgcgggctcctgtcgggttcggtgtttccgctctgaagactgcgacgcgggctccgatgcagctcgctccctgccggatgggtcatgggattctaaacatgaggcagatagctgatcagcttccttgggttttgctgatgacacaagagagctttgcctgaagatggaaacactggagtcagaactgacctgccctatttgtctggagctctttgaggaccctcttctactgccctgcgcacacagcctctgcttcaactgcgcccaccgcatcctagtatcacactgtgccaccaacgagtctgtggagtccatcaccgccttccagtgccccacctgccggcatgtcatcaccctcagccagcgaggtctagacgggctcaagcgcaacgtcaccctacagaacatcatcgacaggttccagaaagcatcagtgagcgggcccaactctcccagcgagacccgtcgggagcgggcctttgacgccaacaccatgacctccgccgagaaggtcctctgccagttttgtgaccaggatcctgcccaggacgctgtgaagacctgtgtcacttgtgaagtatcctactgtgacgagtgcctgaaagccactcacccgaataagaagccctttacaggccatcgtctgattgagccaattccggactctcacatccgggggctgatgtgcttggagcatgaggatgagaaggtgaatatgtactgtgtgaccgatgaccagttaatctgtgccttgtgtaaactggttgggcggcaccgcgatcatcaggtggcagctttgagtgagcgctatgacaaattgaagcaaaacttagagagtaacctcaccaaccttattaagaggaacacagaactggagacccttttggctaaactcatccaaacctgtcaacatgttgaagtcaatgcatcacgtcaagaagccaaattgacagaggagtgtgatcttctcattgagatcattcagcaaagacgacagattattggaaccaagatcaaagaagggaaggtgatgaggcttcgcaaactggctcagcagattgcaaactgcaaacagtgcattgagcggtcagcatcactcatctcccaagcggaacactctctgaaggagaatgatcatgcgcgtttcctacagactgctaagaatatcaccgagagagtctccatggcaactgcatcctcccaggttctaattcctgaaatcaacctcaatgacacatttgacacctttgccttagatttttcccgagagaagaaactgctagaatgtctggattaccttacagctcccaaccctcccacaattagagaagagctctgcacagcttcatatgacaccatcactgtgcattggacctccgatgatgagttcagcgtggtctcctacgagctccagtacaccatattcaccggacaagccaacgtcgttagtctgtgtaattcggctgatagctggatgatagtacccaacatcaagcagaaccactacacggtgcacggtctgcagagcggcaccaagtacatcttcatggtcaaggccatcaaccaggcgggcagccgcagcagtgagcctgggaagttgaagacaaacagccaaccatttaaactggatcccaaatctgctcatcgaaaactgaaggtgtcccatgataacttgacagtagaacgtgatgagtcatcatccaagaagagtcacacacctgaacgcttcaccagccaggggagctatggagtagctggaaatgtgtttattgatagtggccggcattattgggaagtggtcataagtggaagcacatggtatgccattggtcttgcttacaaatcagccccgaagcatgaatggattgggaagaactctgcttcctgggcgctctgccgctgcaacaataactgggtggtgagacacaatagcaaggaaatccccattgagcctgccccccacctccggcgcgtgggcatcctgctggactatgataacggctctatcgccttttatgatgctttgaactccatccacctctacaccttcgacgtcgcatttgcgcagcctgtttgccccaccttcaccgtgtggaacaagtgtctgacgattatcactgggctccctatcccagaccatttggactgcacagagcagctgccgtgagcgtctggccacatggagctgctttctggggaacagtaaggttcaggccactatttaggggactgagaaagcacaggcttcatgagtgtaatgaaatctcaccagaagtgtcccgaaatcggctcagatagggctcaaaacaagagattcctctccttttactgtgtcttgtattaagtacgggctttaataatttctttaatttttttgtatttagaggaaaatctatagattatttataagagaaacataatcaggattacaacttttaggaattacttggttttgcacattaagaggcccataagtttatcagctatttacaaccttcatttcatcacaatctgtgggcttacaaaaaaacaaaaacttttgtagttttgtatgttactcatcttcttacctgatatcccatgatgatcccatggtaggtcttctcacctcgatggtgcataacaggatgtgtttgaacctagtaggggaggaaacaggctttcttactctggtttaatttgaagtgttttaattgtgatgtcaaaaagttgtatcagatcaactaaaatggagagcaagacagagaatgaaaagagttgattttggacctcggaccttgccgtggctaaatctttaccttctcatagctgatgggataatgttggaaagaaaggttctgaatcctttggccacattttgccctgcttctctcagggttaagggttctggaagaacattaagaatgagattgcaattgaaaatagtcattttgaatcctattgattattcaaaaattcaggctgatttgtcttttatcagaggtaggattctgttttatagtatagaatctactttatccttccttttaatagttcctttagacctgtgaaatttcttcactacatttaatagttctcctatttcccgctcccccatatcaattttccttttgtctccggggctgagtaaataaacatgttctgtcacaaatagcagcaccactttggattgattttgctctccaggacatcagcacatggccctgatcagcactaccacatccaaacataagtcactgaaaaacacttaatatttatgagttggtaatgacaagggacattgtataaagtactatttgctagattcatgcctcaaaagttattataaacagacctttattaaacacatcttgaaagatgtagaagtccctctatagtctagtatagtttacaatagagttgtaagaccaaaaaaaaaaaaaaaaaattcaaactcgttattcaggaacctgcttataaaatgtcagctgggattctttgcatgccaatctgatgcgttggaatggtccatgaattaaggctttcttgagcagttcttggcccagaactctggcattggttctagtttgatgaagggcatgacctctataaatggtttcaattgctaaaatatttacctgggatactgggtcagccattttgactgagcagactagtggatttagacattgtttttagttattttgtttttaaccaaatcaaccaactgcctccctgaaataagtcaatgaactcattgtttcagcatcacgtggccaaaggtcatgtgattgcaaatctggatttcaagggaggccaagccagcttcctgggtccttccatcctcttccctagcagacactctcctttttcttaacagatagattctatatatttactatattatttatacccagatgaatattttgatagatacctaagacaatttcacatctaaaagatggacgcctcaatggaaaaaaaacaatctttctctggaaaccttataggtttttctttttattacaatataaaagcaatgtgtgtttgccttctctgagtaaactgaaagggttgtctcagtaatttttacatacattttgggtaactggataatggatattttaatgcactttgtacactaacaggttctaaataaaagggtctaaaactcagcttctgagtttttaaaatcacggtctccaggtaccaataaatgctacagtttgccttatgatgttaacataaaacacttagtagaaggacaatatttccatgaaaataatgtttttcaatattaagaagttactactcaaattttcacagtaagccatttagggtatgtttggctatttttataaggacatgagagattatgtcataattttgttgtggaagtctcactcttggctaacttaaaagcattgtggatagtagcagttactagttccaggttgtcatatttacaggaaaatatgtatatggtgaaaggccaccgtgtttaattactataatgatgtagaaaagattcccgtgtgaattttttttttgaaagtctaaaaaatgtatgctgtaaaaatttgctgcagtgtaattttgcattctctttaaactgattgaggtcacagtattttattatttggggtcctcaccacaggaaacactgcgatacaggggcaaaagagatggcagtgccaattaaattaatacaacaaaatcaatgcagcaccaaccaagactgccaggtctggtgtcatgggtatgcccagagcccaggagttcagaagggccctaagcctgatttaatgctctgctgttgatgtcttgaaattcttaacaatttttgaacaaggggcctgcgttttcacttcgcactgggccttgcaaattacatagcgagtgctcataaaagaactcagaaacgtggtacctctcttcctggtggatacaaataaagaaatctggatccaaagttgaaagttgctggcgatatcattcaagtaggactctaaatagtggattaagatgagggtgggcctgggtgaagattctttccagctttaaaagaaagtgacttcaaaaactgactgcaaatattgacgatggtttctgctggaggaaaagaaacagcttgaatacagacaggcttttttattacggtactgatatattgaccttaaacttgctgaggaactgaactaacgtcctccagtgaccgtggaattccatctcagctccaggaacatgcagatacctgcaaagagacacgcatatatgctggcatacatgtgcatttggtgttgggaagttgaccatctggtctatcttaataaaatggtaaaaagcacaccaagacaatgatgggggcaggaggatgtttttgaaaacagcgcttctcaaccagtgctcgattttgccccccaggagacatttggcaatgcaatggcaacttttggttgtcgcagccggggaagggaagctaccagcatctagtgcgtagaggtcatggacgccgttaaacatcctacagtgcaagcgcagcccccgaccacgaagagttgtcttgctcaaatatcaacagtgctgcagtgtagaaacttgatcgttggttttcttttaatgcaaaactctcataaaaacctttcacttttcctgtcattgattatatgcttgatacacccaaaaagaaaaggggaggggcaccaattcacctacactccagtggctccatcacctttaaaaatatttataaaatagttccaaaaatctgatatctgaaaagcaatccaagcctgtgtaaatgggaatcactgataagtatcatcatctgtatcagcttggcttggacatgaaaaattgattctctttatgtcactccttgcacctggacaaattcaatccccggtacttaagtcacactgccaagccctcggccctgactattgtcttgattgctgttcctttctggttcaaaataaaatcatttttgtggcaccaagaccctctgtctctgcctgtctctgttgccttttcatcattttgtgtttttgcagttatgatgttgacaaatatttattcaacatctaccatttattcatactactttatgacatataattcattttcttttactgtctctcatccactatttgcctttccctattcaaaatacaattcttttgcaacactcaaaatattctccagggaatttttaaaacacaataaaagaaagcctatatagaagtg

SEQ ID NO: 18149 - DNA, 6044 bp, Homo sapiens
  source 1..6044: mol_type = unassigned DNA
gaccgattttcctgttgtgtttcactgttgacgcactcacagacacacaggaccgctccagcactgcctgccacccaccgtctggtctcggtggcctgtctatcatttcgtgggtccccatcctctgcctacggcgatgtttcttcaaaaagaactagtgtgcagtccattgatagctgatcagcttccttgggttttgctgatgacacaagagagctttgcctgaagatggaaacactggagtcagaactgacctgccctatttgtctggagctctttgaggaccctcttctactgccctgcgcacacagcctctgcttcaactgcgcccaccgcatcctagtatcacactgtgccaccaacgagtctgtggagtccatcaccgccttccagtgccccacctgccggcatgtcatcaccctcagccagcgaggtctagacgggctcaagcgcaacgtcaccctacagaacatcatcgacaggttccagaaagcatcagtgagcgggcccaactctcccagcgagacccgtcgggagcgggcctttgacgccaacaccatgacctccgccgagaaggtcctctgccagttttgtgaccaggatcctgcccaggacgctgtgaagacctgtgtcacttgtgaagtatcctactgtgacgagtgcctgaaagccactcacccgaataagaagccctttacaggccatcgtctgattgagccaattccggactctcacatccgggggctgatgtgcttggagcatgaggatgagaaggtgaatatgtactgtgtgaccgatgaccagttaatctgtgccttgtgtaaactggttgggcggcaccgcgatcatcaggtggcagctttgagtgagcgctatgacaaattgaagcaaaacttagagagtaacctcaccaaccttattaagaggaacacagaactggagacccttttggctaaactcatccaaacctgtcaacatgttgaagtcaatgcatcacgtcaagaagccaaattgacagaggagtgtgatcttctcattgagatcattcagcaaagacgacagattattggaaccaagatcaaagaagggaaggtgatgaggcttcgcaaactggctcagcagattgcaaactgcaaacagtgcattgagcggtcagcatcactcatctcccaagcggaacactctctgaaggagaatgatcatgcgcgtttcctacagactgctaagaatatcaccgagagagtctccatggcaactgcatcctcccaggttctaattcctgaaatcaacctcaatgacacatttgacacctttgccttagatttttcccgagagaagaaactgctagaatgtctggattaccttacagctcccaaccctcccacaattagagaagagctctgcacagcttcatatgacaccatcactgtgcattggacctccgatgatgagttcagcgtggtctcctacgagctccagtacaccatattcaccggacaagccaacgtcgttagtctgtgtaattcggctgatagctggatgatagtacccaacatcaagcagaaccactacacggtgcacggtctgcagagcggcaccaagtacatcttcatggtcaaggccatcaaccaggcgggcagccgcagcagtgagcctgggaagttgaagacaaacagccaaccatttaaactggatcccaaatctgctcatcgaaaactgaaggtgtcccatgataacttgacagtagaacgtgatgagtcatcatccaagaagagtcacacacctgaacgcttcaccagccaggggagctatggagtagctggaaatgtgtttattgatagtggccggcattattgggaagtggtcataagtggaagcacatggtatgccattggtcttgcttacaaatcagccccgaagcatgaatggattgggaagaactctgcttcctgggcgctctgccgctgcaacaataactgggtggtgagacacaatagcaaggaaatccccattgagcctgccccccacctccggcgcgtgggcatcctgctggactatgataacggctctatcgccttttatgatgctttgaactccatccacctctacaccttcgacgtcgcatttgcgcagcctgtttgccccaccttcaccgtgtggaacaagtgtctgacgattatcactgggctccctatcccagaccatttggactgcacagagcagctgccgtgagcgtctggccacatggagctgctttctggggaacagtaaggttcaggccactatttaggggactgagaaagcacaggcttcatgagtgtaatgaaatctcaccagaagtgtcccgaaatcggctcagatagggctcaaaacaagagattcctctccttttactgtgtcttgtattaagtacgggctttaataatttctttaatttttttgtatttagaggaaaatctatagattatttataagagaaacataatcaggattacaacttttaggaattacttggttttgcacattaagaggcccataagtttatcagctatttacaaccttcatttcatcacaatctgtgggcttacaaaaaaacaaaaacttttgtagttttgtatgttactcatcttcttacctgatatcccatgatgatcccatggtaggtcttctcacctcgatggtgcataacaggatgtgtttgaacctagtaggggaggaaacaggctttcttactctggtttaatttgaagtgttttaattgtgatgtcaaaaagttgtatcagatcaactaaaatggagagcaagacagagaatgaaaagagttgattttggacctcggaccttgccgtggctaaatctttaccttctcatagctgatgggataatgttggaaagaaaggttctgaatcctttggccacattttgccctgcttctctcagggttaagggttctggaagaacattaagaatgagattgcaattgaaaatagtcattttgaatcctattgattattcaaaaattcaggctgatttgtcttttatcagaggtaggattctgttttatagtatagaatctactttatccttccttttaatagttcctttagacctgtgaaatttcttcactacatttaatagttctcctatttcccgctcccccatatcaattttccttttgtctccggggctgagtaaataaacatgttctgtcacaaatagcagcaccactttggattgattttgctctccaggacatcagcacatggccctgatcagcactaccacatccaaacataagtcactgaaaaacacttaatatttatgagttggtaatgacaagggacattgtataaagtactatttgctagattcatgcctcaaaagttattataaacagacctttattaaacacatcttgaaagatgtagaagtccctctatagtctagtatagtttacaatagagttgtaagaccaaaaaaaaaaaaaaaaaattcaaactcgttattcaggaacctgcttataaaatgtcagctgggattctttgcatgccaatctgatgcgttggaatggtccatgaattaaggctttcttgagcagttcttggcccagaactctggcattggttctagtttgatgaagggcatgacctctataaatggtttcaattgctaaaatatttacctgggatactgggtcagccattttgactgagcagactagtggatttagacattgtttttagttattttgtttttaaccaaatcaaccaactgcctccctgaaataagtcaatgaactcattgtttcagcatcacgtggccaaaggtcatgtgattgcaaatctggatttcaagggaggccaagccagcttcctgggtccttccatcctcttccctagcagacactctcctttttcttaacagatagattctatatatttactatattatttatacccagatgaatattttgatagatacctaagacaatttcacatctaaaagatggacgcctcaatggaaaaaaaacaatctttctctggaaaccttataggtttttctttttattacaatataaaagcaatgtgtgtttgccttctctgagtaaactgaaagggttgtctcagtaatttttacatacattttgggtaactggataatggatattttaatgcactttgtacactaacaggttctaaataaaagggtctaaaactcagcttctgagtttttaaaatcacggtctccaggtaccaataaatgctacagtttgccttatgatgttaacataaaacacttagtagaaggacaatatttccatgaaaataatgtttttcaatattaagaagttactactcaaattttcacagtaagccatttagggtatgtttggctatttttataaggacatgagagattatgtcataattttgttgtggaagtctcactcttggctaacttaaaagcattgtggatagtagcagttactagttccaggttgtcatatttacaggaaaatatgtatatggtgaaaggccaccgtgtttaattactataatgatgtagaaaagattcccgtgtgaattttttttttgaaagtctaaaaaatgtatgctgtaaaaatttgctgcagtgtaattttgcattctctttaaactgattgaggtcacagtattttattatttggggtcctcaccacaggaaacactgcgatacaggggcaaaagagatggcagtgccaattaaattaatacaacaaaatcaatgcagcaccaaccaagactgccaggtctggtgtcatgggtatgcccagagcccaggagttcagaagggccctaagcctgatttaatgctctgctgttgatgtcttgaaattcttaacaatttttgaacaaggggcctgcgttttcacttcgcactgggccttgcaaattacatagcgagtgctcataaaagaactcagaaacgtggtacctctcttcctggtggatacaaataaagaaatctggatccaaagttgaaagttgctggcgatatcattcaagtaggactctaaatagtggattaagatgagggtgggcctgggtgaagattctttccagctttaaaagaaagtgacttcaaaaactgactgcaaatattgacgatggtttctgctggaggaaaagaaacagcttgaatacagacaggcttttttattacggtactgatatattgaccttaaacttgctgaggaactgaactaacgtcctccagtgaccgtggaattccatctcagctccaggaacatgcagatacctgcaaagagacacgcatatatgctggcatacatgtgcatttggtgttgggaagttgaccatctggtctatcttaataaaatggtaaaaagcacaccaagacaatgatgggggcaggaggatgtttttgaaaacagcgcttctcaaccagtgctcgattttgccccccaggagacatttggcaatgcaatggcaacttttggttgtcgcagccggggaagggaagctaccagcatctagtgcgtagaggtcatggacgccgttaaacatcctacagtgcaagcgcagcccccgaccacgaagagttgtcttgctcaaatatcaacagtgctgcagtgtagaaacttgatcgttggttttcttttaatgcaaaactctcataaaaacctttcacttttcctgtcattgattatatgcttgatacacccaaaaagaaaaggggaggggcaccaattcacctacactccagtggctccatcacctttaaaaatatttataaaatagttccaaaaatctgatatctgaaaagcaatccaagcctgtgtaaatgggaatcactgataagtatcatcatctgtatcagcttggcttggacatgaaaaattgattctctttatgtcactccttgcacctggacaaattcaatccccggtacttaagtcacactgccaagccctcggccctgactattgtcttgattgctgttcctttctggttcaaaataaaatcatttttgtggcaccaaga

SEQ ID NO: 18150 - DNA, 6195 bp, Homo sapiens
  source 1..6195: mol_type = unassigned DNA
ccctttcttctttatctcggtgtctgaggagttttgtctgcggcttgtcttgctacatttcttggttccctgaccaggaagcgaggtgattaacagacggttgaggcagctccttaggtggctttagcctgccctgtggaacatccctgcgggggactccaaccagccggagcgacgcggatcctgagagcgctcccgggtaggcatttgcccaggtgggacgcctcgccagagccgtgtgtggcaggcccccgtggaggatcaacgcagtggctgaacactgggaaggaactggcacttggagtccagacatctaaaacttgatagctgatcagcttccttgggttttgctgatgacacaagagagctttgcctgaagatggaaacactggagtcagaactgacctgccctatttgtctggagctctttgaggaccctcttctactgccctgcgcacacagcctctgcttcaactgcgcccaccgcatcctagtatcacactgtgccaccaacgagtctgtggagtccatcaccgccttccagtgccccacctgccggcatgtcatcaccctcagccagcgaggtctagacgggctcaagcgcaacgtcaccctacagaacatcatcgacaggttccagaaagcatcagtgagcgggcccaactctcccagcgagacccgtcgggagcgggcctttgacgccaacaccatgacctccgccgagaaggtcctctgccagttttgtgaccaggatcctgcccaggacgctgtgaagacctgtgtcacttgtgaagtatcctactgtgacgagtgcctgaaagccactcacccgaataagaagccctttacaggccatcgtctgattgagccaattccggactctcacatccgggggctgatgtgcttggagcatgaggatgagaaggtgaatatgtactgtgtgaccgatgaccagttaatctgtgccttgtgtaaactggttgggcggcaccgcgatcatcaggtggcagctttgagtgagcgctatgacaaattgaagcaaaacttagagagtaacctcaccaaccttattaagaggaacacagaactggagacccttttggctaaactcatccaaacctgtcaacatgttgaagtcaatgcatcacgtcaagaagccaaattgacagaggagtgtgatcttctcattgagatcattcagcaaagacgacagattattggaaccaagatcaaagaagggaaggtgatgaggcttcgcaaactggctcagcagattgcaaactgcaaacagtgcattgagcggtcagcatcactcatctcccaagcggaacactctctgaaggagaatgatcatgcgcgtttcctacagactgctaagaatatcaccgagagagtctccatggcaactgcatcctcccaggttctaattcctgaaatcaacctcaatgacacatttgacacctttgccttagatttttcccgagagaagaaactgctagaatgtctggattaccttacagctcccaaccctcccacaattagagaagagctctgcacagcttcatatgacaccatcactgtgcattggacctccgatgatgagttcagcgtggtctcctacgagctccagtacaccatattcaccggacaagccaacgtcgttagtctgtgtaattcggctgatagctggatgatagtacccaacatcaagcagaaccactacacggtgcacggtctgcagagcggcaccaagtacatcttcatggtcaaggccatcaaccaggcgggcagccgcagcagtgagcctgggaagttgaagacaaacagccaaccatttaaactggatcccaaatctgctcatcgaaaactgaaggtgtcccatgataacttgacagtagaacgtgatgagtcatcatccaagaagagtcacacacctgaacgcttcaccagccaggggagctatggagtagctggaaatgtgtttattgatagtggccggcattattgggaagtggtcataagtggaagcacatggtatgccattggtcttgcttacaaatcagccccgaagcatgaatggattgggaagaactctgcttcctgggcgctctgccgctgcaacaataactgggtggtgagacacaatagcaaggaaatccccattgagcctgccccccacctccggcgcgtgggcatcctgctggactatgataacggctctatcgccttttatgatgctttgaactccatccacctctacaccttcgacgtcgcatttgcgcagcctgtttgccccaccttcaccgtgtggaacaagtgtctgacgattatcactgggctccctatcccagaccatttggactgcacagagcagctgccgtgagcgtctggccacatggagctgctttctggggaacagtaaggttcaggccactatttaggggactgagaaagcacaggcttcatgagtgtaatgaaatctcaccagaagtgtcccgaaatcggctcagatagggctcaaaacaagagattcctctccttttactgtgtcttgtattaagtacgggctttaataatttctttaatttttttgtatttagaggaaaatctatagattatttataagagaaacataatcaggattacaacttttaggaattacttggttttgcacattaagaggcccataagtttatcagctatttacaaccttcatttcatcacaatctgtgggcttacaaaaaaacaaaaacttttgtagttttgtatgttactcatcttcttacctgatatcccatgatgatcccatggtaggtcttctcacctcgatggtgcataacaggatgtgtttgaacctagtaggggaggaaacaggctttcttactctggtttaatttgaagtgttttaattgtgatgtcaaaaagttgtatcagatcaactaaaatggagagcaagacagagaatgaaaagagttgattttggacctcggaccttgccgtggctaaatctttaccttctcatagctgatgggataatgttggaaagaaaggttctgaatcctttggccacattttgccctgcttctctcagggttaagggttctggaagaacattaagaatgagattgcaattgaaaatagtcattttgaatcctattgattattcaaaaattcaggctgatttgtcttttatcagaggtaggattctgttttatagtatagaatctactttatccttccttttaatagttcctttagacctgtgaaatttcttcactacatttaatagttctcctatttcccgctcccccatatcaattttccttttgtctccggggctgagtaaataaacatgttctgtcacaaatagcagcaccactttggattgattttgctctccaggacatcagcacatggccctgatcagcactaccacatccaaacataagtcactgaaaaacacttaatatttatgagttggtaatgacaagggacattgtataaagtactatttgctagattcatgcctcaaaagttattataaacagacctttattaaacacatcttgaaagatgtagaagtccctctatagtctagtatagtttacaatagagttgtaagaccaaaaaaaaaaaaaaaaaattcaaactcgttattcaggaacctgcttataaaatgtcagctgggattctttgcatgccaatctgatgcgttggaatggtccatgaattaaggctttcttgagcagttcttggcccagaactctggcattggttctagtttgatgaagggcatgacctctataaatggtttcaattgctaaaatatttacctgggatactgggtcagccattttgactgagcagactagtggatttagacattgtttttagttattttgtttttaaccaaatcaaccaactgcctccctgaaataagtcaatgaactcattgtttcagcatcacgtggccaaaggtcatgtgattgcaaatctggatttcaagggaggccaagccagcttcctgggtccttccatcctcttccctagcagacactctcctttttcttaacagatagattctatatatttactatattatttatacccagatgaatattttgatagatacctaagacaatttcacatctaaaagatggacgcctcaatggaaaaaaaacaatctttctctggaaaccttataggtttttctttttattacaatataaaagcaatgtgtgtttgccttctctgagtaaactgaaagggttgtctcagtaatttttacatacattttgggtaactggataatggatattttaatgcactttgtacactaacaggttctaaataaaagggtctaaaactcagcttctgagtttttaaaatcacggtctccaggtaccaataaatgctacagtttgccttatgatgttaacataaaacacttagtagaaggacaatatttccatgaaaataatgtttttcaatattaagaagttactactcaaattttcacagtaagccatttagggtatgtttggctatttttataaggacatgagagattatgtcataattttgttgtggaagtctcactcttggctaacttaaaagcattgtggatagtagcagttactagttccaggttgtcatatttacaggaaaatatgtatatggtgaaaggccaccgtgtttaattactataatgatgtagaaaagattcccgtgtgaattttttttttgaaagtctaaaaaatgtatgctgtaaaaatttgctgcagtgtaattttgcattctctttaaactgattgaggtcacagtattttattatttggggtcctcaccacaggaaacactgcgatacaggggcaaaagagatggcagtgccaattaaattaatacaacaaaatcaatgcagcaccaaccaagactgccaggtctggtgtcatgggtatgcccagagcccaggagttcagaagggccctaagcctgatttaatgctctgctgttgatgtcttgaaattcttaacaatttttgaacaaggggcctgcgttttcacttcgcactgggccttgcaaattacatagcgagtgctcataaaagaactcagaaacgtggtacctctcttcctggtggatacaaataaagaaatctggatccaaagttgaaagttgctggcgatatcattcaagtaggactctaaatagtggattaagatgagggtgggcctgggtgaagattctttccagctttaaaagaaagtgacttcaaaaactgactgcaaatattgacgatggtttctgctggaggaaaagaaacagcttgaatacagacaggcttttttattacggtactgatatattgaccttaaacttgctgaggaactgaactaacgtcctccagtgaccgtggaattccatctcagctccaggaacatgcagatacctgcaaagagacacgcatatatgctggcatacatgtgcatttggtgttgggaagttgaccatctggtctatcttaataaaatggtaaaaagcacaccaagacaatgatgggggcaggaggatgtttttgaaaacagcgcttctcaaccagtgctcgattttgccccccaggagacatttggcaatgcaatggcaacttttggttgtcgcagccggggaagggaagctaccagcatctagtgcgtagaggtcatggacgccgttaaacatcctacagtgcaagcgcagcccccgaccacgaagagttgtcttgctcaaatatcaacagtgctgcagtgtagaaacttgatcgttggttttcttttaatgcaaaactctcataaaaacctttcacttttcctgtcattgattatatgcttgatacacccaaaaagaaaaggggaggggcaccaattcacctacactccagtggctccatcacctttaaaaatatttataaaatagttccaaaaatctgatatctgaaaagcaatccaagcctgtgtaaatgggaatcactgataagtatcatcatctgtatcagcttggcttggacatgaaaaattgattctctttatgtcactccttgcacctggacaaattcaatccccggtacttaagtcacactgccaagccctcggccctgactattgtcttgattgctgttcctttctggttcaaaataaaatcatttttgtggcaccaaga

SEQ ID NO: 18151 - DNA, 5902 bp, Homo sapiens
  source 1..5902: mol_type = unassigned DNA
atttcgccgggttgcttttgtcttgcgggctcctgtcgggttcggtgtttccgctctgaagactgcgacgcgggctccgatgcagctcgctccctgccggatgggtcatgggattctaaacatgaggcagatagctgatcagcttccttgggttttgctgatgacacaagagagctttgcctgaagatggaaacactggagtcagaactgacctgccctatttgtctggagctctttgaggaccctcttctactgccctgcgcacacagcctctgcttcaactgcgcccaccgcatcctagtatcacactgtgccaccaacgagtctgtggagtccatcaccgccttccagtgccccacctgccggcatgtcatcaccctcagccagcgaggtctagacgggctcaagcgcaacgtcaccctacagaacatcatcgacaggttccagaaagcatcagtgagcgggcccaactctcccagcgagacccgtcgggagcgggcctttgacgccaacaccatgacctccgccgagaaggtcctctgccagttttgtgaccaggatcctgcccaggacgctgtgaagacctgtgtcacttgtgaagtatcctactgtgacgagtgcctgaaagccactcacccgaataagaagccctttacaggccatcgtctgattgagccaattccggactctcacatccgggggctgatgtgcttggagcatgaggatgagaaggtgaatatgtactgtgtgaccgatgaccagttaatctgtgccttgtgtaaactggttgggcggcaccgcgatcatcaggtggcagctttgagtgagcgctatgacaaattgaagcaaaacttagagagtaacctcaccaaccttattaagaggaacacagaactggagacccttttggctaaactcatccaaacctgtcaacatgttgaagtcaatgcatcacgtcaagaagccaaattgacagaggagtgtgatcttctcattgagatcattcagcaaagacgacagattattggaaccaagatcaaagaagggaaggtgatgaggcttcgcaaactggctcagcagattgcaaactgcaaacagtgcattgagcggtcagcatcactcatctcccaagcggaacactctctgaaggagaatgatcatgcgcgtttcctacagactgctaagaatatcaccgagagagtctccatggcaactgcatcctcccaggttctaattcctgaaatcaacctcaatgacacatttgacacctttgccttagatttttcccgagagaagaaactgctagaatgtctggattaccttacagctcccaaccctcccacaattagagaagagctctgcacagcttcatatgacaccatcactgtgcattggacctccgatgatgagttcagcgtggtctcctacgagctccagtacaccatattcaccggacaagccaacgtcgttagtctgtgtaattcggctgatagctggatgatagtacccaacatcaagcagaaccactacacggtgcacggtctgcagagcggcaccaagtacatcttcatggtcaaggccatcaaccaggcgggcagccgcagcagtgagcctgggaagttgaagacaaacagccaaccatttaaactggatcccaaatctgctcatcgaaaactgaaggtgtcccatgataacttgacagtagaacgtgatgagtcatcatccaagaagagtcacacacctgaacgcttcaccagccaggggagctatggagtagctggaaatgtgtttattgatagtggccggcattattgggaagtggtcataagtggaagcacatggtgagacacaatagcaaggaaatccccattgagcctgccccccacctccggcgcgtgggcatcctgctggactatgataacggctctatcgccttttatgatgctttgaactccatccacctctacaccttcgacgtcgcatttgcgcagcctgtttgccccaccttcaccgtgtggaacaagtgtctgacgattatcactgggctccctatcccagaccatttggactgcacagagcagctgccgtgagcgtctggccacatggagctgctttctggggaacagtaaggttcaggccactatttaggggactgagaaagcacaggcttcatgagtgtaatgaaatctcaccagaagtgtcccgaaatcggctcagatagggctcaaaacaagagattcctctccttttactgtgtcttgtattaagtacgggctttaataatttctttaatttttttgtatttagaggaaaatctatagattatttataagagaaacataatcaggattacaacttttaggaattacttggttttgcacattaagaggcccataagtttatcagctatttacaaccttcatttcatcacaatctgtgggcttacaaaaaaacaaaaacttttgtagttttgtatgttactcatcttcttacctgatatcccatgatgatcccatggtaggtcttctcacctcgatggtgcataacaggatgtgtttgaacctagtaggggaggaaacaggctttcttactctggtttaatttgaagtgttttaattgtgatgtcaaaaagttgtatcagatcaactaaaatggagagcaagacagagaatgaaaagagttgattttggacctcggaccttgccgtggctaaatctttaccttctcatagctgatgggataatgttggaaagaaaggttctgaatcctttggccacattttgccctgcttctctcagggttaagggttctggaagaacattaagaatgagattgcaattgaaaatagtcattttgaatcctattgattattcaaaaattcaggctgatttgtcttttatcagaggtaggattctgttttatagtatagaatctactttatccttccttttaatagttcctttagacctgtgaaatttcttcactacatttaatagttctcctatttcccgctcccccatatcaattttccttttgtctccggggctgagtaaataaacatgttctgtcacaaatagcagcaccactttggattgattttgctctccaggacatcagcacatggccctgatcagcactaccacatccaaacataagtcactgaaaaacacttaatatttatgagttggtaatgacaagggacattgtataaagtactatttgctagattcatgcctcaaaagttattataaacagacctttattaaacacatcttgaaagatgtagaagtccctctatagtctagtatagtttacaatagagttgtaagaccaaaaaaaaaaaaaaaaaattcaaactcgttattcaggaacctgcttataaaatgtcagctgggattctttgcatgccaatctgatgcgttggaatggtccatgaattaaggctttcttgagcagttcttggcccagaactctggcattggttctagtttgatgaagggcatgacctctataaatggtttcaattgctaaaatatttacctgggatactgggtcagccattttgactgagcagactagtggatttagacattgtttttagttattttgtttttaaccaaatcaaccaactgcctccctgaaataagtcaatgaactcattgtttcagcatcacgtggccaaaggtcatgtgattgcaaatctggatttcaagggaggccaagccagcttcctgggtccttccatcctcttccctagcagacactctcctttttcttaacagatagattctatatatttactatattatttatacccagatgaatattttgatagatacctaagacaatttcacatctaaaagatggacgcctcaatggaaaaaaaacaatctttctctggaaaccttataggtttttctttttattacaatataaaagcaatgtgtgtttgccttctctgagtaaactgaaagggttgtctcagtaatttttacatacattttgggtaactggataatggatattttaatgcactttgtacactaacaggttctaaataaaagggtctaaaactcagcttctgagtttttaaaatcacggtctccaggtaccaataaatgctacagtttgccttatgatgttaacataaaacacttagtagaaggacaatatttccatgaaaataatgtttttcaatattaagaagttactactcaaattttcacagtaagccatttagggtatgtttggctatttttataaggacatgagagattatgtcataattttgttgtggaagtctcactcttggctaacttaaaagcattgtggatagtagcagttactagttccaggttgtcatatttacaggaaaatatgtatatggtgaaaggccaccgtgtttaattactataatgatgtagaaaagattcccgtgtgaattttttttttgaaagtctaaaaaatgtatgctgtaaaaatttgctgcagtgtaattttgcattctctttaaactgattgaggtcacagtattttattatttggggtcctcaccacaggaaacactgcgatacaggggcaaaagagatggcagtgccaattaaattaatacaacaaaatcaatgcagcaccaaccaagactgccaggtctggtgtcatgggtatgcccagagcccaggagttcagaagggccctaagcctgatttaatgctctgctgttgatgtcttgaaattcttaacaatttttgaacaaggggcctgcgttttcacttcgcactgggccttgcaaattacatagcgagtgctcataaaagaactcagaaacgtggtacctctcttcctggtggatacaaataaagaaatctggatccaaagttgaaagttgctggcgatatcattcaagtaggactctaaatagtggattaagatgagggtgggcctgggtgaagattctttccagctttaaaagaaagtgacttcaaaaactgactgcaaatattgacgatggtttctgctggaggaaaagaaacagcttgaatacagacaggcttttttattacggtactgatatattgaccttaaacttgctgaggaactgaactaacgtcctccagtgaccgtggaattccatctcagctccaggaacatgcagatacctgcaaagagacacgcatatatgctggcatacatgtgcatttggtgttgggaagttgaccatctggtctatcttaataaaatggtaaaaagcacaccaagacaatgatgggggcaggaggatgtttttgaaaacagcgcttctcaaccagtgctcgattttgccccccaggagacatttggcaatgcaatggcaacttttggttgtcgcagccggggaagggaagctaccagcatctagtgcgtagaggtcatggacgccgttaaacatcctacagtgcaagcgcagcccccgaccacgaagagttgtcttgctcaaatatcaacagtgctgcagtgtagaaacttgatcgttggttttcttttaatgcaaaactctcataaaaacctttcacttttcctgtcattgattatatgcttgatacacccaaaaagaaaaggggaggggcaccaattcacctacactccagtggctccatcacctttaaaaatatttataaaatagttccaaaaatctgatatctgaaaagcaatccaagcctgtgtaaatgggaatcactgataagtatcatcatctgtatcagcttggcttggacatgaaaaattgattctctttatgtcactccttgcacctggacaaattcaatccccggtacttaagtcacactgccaagccctcggccctgactattgtcttgattgctgttcctttctggttcaaaataaaatcatttttgtggcaccaaga

SEQ ID NO: 18152 - DNA, 6092 bp, Homo sapiens
  source 1..6092: mol_type = unassigned DNA
cccagcctgcttgaaggacctacaggtttgtctcttccagatcagaactgaggaacaaaaacccccatcctgggaaaaatggggaagctgatttcgccgggttgcttttgtcttgcgggctcctgtcgggttcggtgtttccgctctgaagactgcgacgcgggctccgatgcagctcgctccctgccggatgggtcatgggattctaaacatgaggcagatagctgatcagcttccttgggttttgctgatgacacaagagagctttgcctgaagatggaaacactggagtcagaactgacctgccctatttgtctggagctctttgaggaccctcttctactgccctgcgcacacagcctctgcttcaactgcgcccaccgcatcctagtatcacactgtgccaccaacgagtctgtggagtccatcaccgccttccagtgccccacctgccggcatgtcatcaccctcagccagcgaggtctagacgggctcaagcgcaacgtcaccctacagaacatcatcgacaggttccagaaagcatcagtgagcgggcccaactctcccagcgagacccgtcgggagcgggcctttgacgccaacaccatgacctccgccgagaaggtcctctgccagttttgtgaccaggatcctgcccaggacgctgtgaagacctgtgtcacttgtgaagtatcctactgtgacgagtgcctgaaagccactcacccgaataagaagccctttacaggccatcgtctgattgagccaattccggactctcacatccgggggctgatgtgcttggagcatgaggatgagaaggtgaatatgtactgtgtgaccgatgaccagttaatctgtgccttgtgtaaactggttgggcggcaccgcgatcatcaggtggcagctttgagtgagcgctatgacaaattgaagcaaaacttagagagtaacctcaccaaccttattaagaggaacacagaactggagacccttttggctaaactcatccaaacctgtcaacatgttgaagtcaatgcatcacgtcaagaagccaaattgacagaggagtgtgatcttctcattgagatcattcagcaaagacgacagattattggaaccaagatcaaagaagggaaggtgatgaggcttcgcaaactggctcagcagattgcaaactgcaaacagtgcattgagcggtcagcatcactcatctcccaagcggaacactctctgaaggagaatgatcatgcgcgtttcctacagactgctaagaatatcaccgagagagtctccatggcaactgcatcctcccaggttctaattcctgaaatcaacctcaatgacacatttgacacctttgccttagatttttcccgagagaagaaactgctagaatgtctggattaccttacagctcccaaccctcccacaattagagaagagctctgcacagcttcatatgacaccatcactgtgcattggacctccgatgatgagttcagcgtggtctcctacgagctccagtacaccatattcaccggacaagccaacgtcgttagtctgtgtaattcggctgatagctggatgatagtacccaacatcaagcagaaccactacacggtgcacggtctgcagagcggcaccaagtacatcttcatggtcaaggccatcaaccaggcgggcagccgcagcagtgagcctgggaagttgaagacaaacagccaaccatttaaactggatcccaaatctgctcatcgaaaactgaaggtgtcccatgataacttgacagtagaacgtgatgagtcatcatccaagaagagtcacacacctgaacgcttcaccagccaggggagctatggagtagctggaaatgtgtttattgatagtggccggcattattgggaagtggtcataagtggaagcacatggtatgccattggtcttgcttacaaatcagccccgaagcatgaatggattgggaagaactctgcttcctgggcgctctgccgctgcaacaataactgggtggtgagacacaatagcaaggaaatccccattgagcctgccccccacctccggcgcgtgggcatcctgctggactatgataacggctctatcgccttttatgatgctttgaactccatccacctctacaccttcgacgtcgcatttgcgcagcctgtttgccccaccttcaccgtgtggaacaagtgtctgacgattatcactgggctccctatcccagaccatttggactgcacagagcagctgccgtgagcgtctggccacatggagctgctttctggggaacagtaaggttcaggccactatttaggggactgagaaagcacaggcttcatgagtgtaatgaaatctcaccagaagtgtcccgaaatcggctcagatagggctcaaaacaagagattcctctccttttactgtgtcttgtattaagtacgggctttaataatttctttaatttttttgtatttagaggaaaatctatagattatttataagagaaacataatcaggattacaacttttaggaattacttggttttgcacattaagaggcccataagtttatcagctatttacaaccttcatttcatcacaatctgtgggcttacaaaaaaacaaaaacttttgtagttttgtatgttactcatcttcttacctgatatcccatgatgatcccatggtaggtcttctcacctcgatggtgcataacaggatgtgtttgaacctagtaggggaggaaacaggctttcttactctggtttaatttgaagtgttttaattgtgatgtcaaaaagttgtatcagatcaactaaaatggagagcaagacagagaatgaaaagagttgattttggacctcggaccttgccgtggctaaatctttaccttctcatagctgatgggataatgttggaaagaaaggttctgaatcctttggccacattttgccctgcttctctcagggttaagggttctggaagaacattaagaatgagattgcaattgaaaatagtcattttgaatcctattgattattcaaaaattcaggctgatttgtcttttatcagaggtaggattctgttttatagtatagaatctactttatccttccttttaatagttcctttagacctgtgaaatttcttcactacatttaatagttctcctatttcccgctcccccatatcaattttccttttgtctccggggctgagtaaataaacatgttctgtcacaaatagcagcaccactttggattgattttgctctccaggacatcagcacatggccctgatcagcactaccacatccaaacataagtcactgaaaaacacttaatatttatgagttggtaatgacaagggacattgtataaagtactatttgctagattcatgcctcaaaagttattataaacagacctttattaaacacatcttgaaagatgtagaagtccctctatagtctagtatagtttacaatagagttgtaagaccaaaaaaaaaaaaaaaaaattcaaactcgttattcaggaacctgcttataaaatgtcagctgggattctttgcatgccaatctgatgcgttggaatggtccatgaattaaggctttcttgagcagttcttggcccagaactctggcattggttctagtttgatgaagggcatgacctctataaatggtttcaattgctaaaatatttacctgggatactgggtcagccattttgactgagcagactagtggatttagacattgtttttagttattttgtttttaaccaaatcaaccaactgcctccctgaaataagtcaatgaactcattgtttcagcatcacgtggccaaaggtcatgtgattgcaaatctggatttcaagggaggccaagccagcttcctgggtccttccatcctcttccctagcagacactctcctttttcttaacagatagattctatatatttactatattatttatacccagatgaatattttgatagatacctaagacaatttcacatctaaaagatggacgcctcaatggaaaaaaaacaatctttctctggaaaccttataggtttttctttttattacaatataaaagcaatgtgtgtttgccttctctgagtaaactgaaagggttgtctcagtaatttttacatacattttgggtaactggataatggatattttaatgcactttgtacactaacaggttctaaataaaagggtctaaaactcagcttctgagtttttaaaatcacggtctccaggtaccaataaatgctacagtttgccttatgatgttaacataaaacacttagtagaaggacaatatttccatgaaaataatgtttttcaatattaagaagttactactcaaattttcacagtaagccatttagggtatgtttggctatttttataaggacatgagagattatgtcataattttgttgtggaagtctcactcttggctaacttaaaagcattgtggatagtagcagttactagttccaggttgtcatatttacaggaaaatatgtatatggtgaaaggccaccgtgtttaattactataatgatgtagaaaagattcccgtgtgaattttttttttgaaagtctaaaaaatgtatgctgtaaaaatttgctgcagtgtaattttgcattctctttaaactgattgaggtcacagtattttattatttggggtcctcaccacaggaaacactgcgatacaggggcaaaagagatggcagtgccaattaaattaatacaacaaaatcaatgcagcaccaaccaagactgccaggtctggtgtcatgggtatgcccagagcccaggagttcagaagggccctaagcctgatttaatgctctgctgttgatgtcttgaaattcttaacaatttttgaacaaggggcctgcgttttcacttcgcactgggccttgcaaattacatagcgagtgctcataaaagaactcagaaacgtggtacctctcttcctggtggatacaaataaagaaatctggatccaaagttgaaagttgctggcgatatcattcaagtaggactctaaatagtggattaagatgagggtgggcctgggtgaagattctttccagctttaaaagaaagtgacttcaaaaactgactgcaaatattgacgatggtttctgctggaggaaaagaaacagcttgaatacagacaggcttttttattacggtactgatatattgaccttaaacttgctgaggaactgaactaacgtcctccagtgaccgtggaattccatctcagctccaggaacatgcagatacctgcaaagagacacgcatatatgctggcatacatgtgcatttggtgttgggaagttgaccatctggtctatcttaataaaatggtaaaaagcacaccaagacaatgatgggggcaggaggatgtttttgaaaacagcgcttctcaaccagtgctcgattttgccccccaggagacatttggcaatgcaatggcaacttttggttgtcgcagccggggaagggaagctaccagcatctagtgcgtagaggtcatggacgccgttaaacatcctacagtgcaagcgcagcccccgaccacgaagagttgtcttgctcaaatatcaacagtgctgcagtgtagaaacttgatcgttggttttcttttaatgcaaaactctcataaaaacctttcacttttcctgtcattgattatatgcttgatacacccaaaaagaaaaggggaggggcaccaattcacctacactccagtggctccatcacctttaaaaatatttataaaatagttccaaaaatctgatatctgaaaagcaatccaagcctgtgtaaatgggaatcactgataagtatcatcatctgtatcagcttggcttggacatgaaaaattgattctctttatgtcactccttgcacctggacaaattcaatccccggtacttaagtcacactgccaagccctcggccctgactattgtcttgattgctgttcctttctggttcaaaataaaatcatttttgtggcaccaaga

SEQ ID NO: 18153 - DNA, 5973 bp, Homo sapiens
  source 1..5973: mol_type = unassigned DNA
acttgccccagcccagcctgcttgaaggacctacaggtttgtctcttccagatcagaactgaggaacaaaaacccccatcctgggaaaaatggggaagctgatagctgatcagcttccttgggttttgctgatgacacaagagagctttgcctgaagatggaaacactggagtcagaactgacctgccctatttgtctggagctctttgaggaccctcttctactgccctgcgcacacagcctctgcttcaactgcgcccaccgcatcctagtatcacactgtgccaccaacgagtctgtggagtccatcaccgccttccagtgccccacctgccggcatgtcatcaccctcagccagcgaggtctagacgggctcaagcgcaacgtcaccctacagaacatcatcgacaggttccagaaagcatcagtgagcgggcccaactctcccagcgagacccgtcgggagcgggcctttgacgccaacaccatgacctccgccgagaaggtcctctgccagttttgtgaccaggatcctgcccaggacgctgtgaagacctgtgtcacttgtgaagtatcctactgtgacgagtgcctgaaagccactcacccgaataagaagccctttacaggccatcgtctgattgagccaattccggactctcacatccgggggctgatgtgcttggagcatgaggatgagaaggtgaatatgtactgtgtgaccgatgaccagttaatctgtgccttgtgtaaactggttgggcggcaccgcgatcatcaggtggcagctttgagtgagcgctatgacaaattgaagcaaaacttagagagtaacctcaccaaccttattaagaggaacacagaactggagacccttttggctaaactcatccaaacctgtcaacatgttgaagtcaatgcatcacgtcaagaagccaaattgacagaggagtgtgatcttctcattgagatcattcagcaaagacgacagattattggaaccaagatcaaagaagggaaggtgatgaggcttcgcaaactggctcagcagattgcaaactgcaaacagtgcattgagcggtcagcatcactcatctcccaagcggaacactctctgaaggagaatgatcatgcgcgtttcctacagactgctaagaatatcaccgagagagtctccatggcaactgcatcctcccaggttctaattcctgaaatcaacctcaatgacacatttgacacctttgccttagatttttcccgagagaagaaactgctagaatgtctggattaccttacagctcccaaccctcccacaattagagaagagctctgcacagcttcatatgacaccatcactgtgcattggacctccgatgatgagttcagcgtggtctcctacgagctccagtacaccatattcaccggacaagccaacgtcgttagtctgtgtaattcggctgatagctggatgatagtacccaacatcaagcagaaccactacacggtgcacggtctgcagagcggcaccaagtacatcttcatggtcaaggccatcaaccaggcgggcagccgcagcagtgagcctgggaagttgaagacaaacagccaaccatttaaactggatcccaaatctgctcatcgaaaactgaaggtgtcccatgataacttgacagtagaacgtgatgagtcatcatccaagaagagtcacacacctgaacgcttcaccagccaggggagctatggagtagctggaaatgtgtttattgatagtggccggcattattgggaagtggtcataagtggaagcacatggtatgccattggtcttgcttacaaatcagccccgaagcatgaatggattgggaagaactctgcttcctgggcgctctgccgctgcaacaataactgggtggtgagacacaatagcaaggaaatccccattgagcctgccccccacctccggcgcgtgggcatcctgctggactatgataacggctctatcgccttttatgatgctttgaactccatccacctctacaccttcgacgtcgcatttgcgcagcctgtttgccccaccttcaccgtgtggaacaagtgtctgacgattatcactgggctccctatcccagaccatttggactgcacagagcagctgccgtgagcgtctggccacatggagctgctttctggggaacagtaaggttcaggccactatttaggggactgagaaagcacaggcttcatgagtgtaatgaaatctcaccagaagtgtcccgaaatcggctcagatagggctcaaaacaagagattcctctccttttactgtgtcttgtattaagtacgggctttaataatttctttaatttttttgtatttagaggaaaatctatagattatttataagagaaacataatcaggattacaacttttaggaattacttggttttgcacattaagaggcccataagtttatcagctatttacaaccttcatttcatcacaatctgtgggcttacaaaaaaacaaaaacttttgtagttttgtatgttactcatcttcttacctgatatcccatgatgatcccatggtaggtcttctcacctcgatggtgcataacaggatgtgtttgaacctagtaggggaggaaacaggctttcttactctggtttaatttgaagtgttttaattgtgatgtcaaaaagttgtatcagatcaactaaaatggagagcaagacagagaatgaaaagagttgattttggacctcggaccttgccgtggctaaatctttaccttctcatagctgatgggataatgttggaaagaaaggttctgaatcctttggccacattttgccctgcttctctcagggttaagggttctggaagaacattaagaatgagattgcaattgaaaatagtcattttgaatcctattgattattcaaaaattcaggctgatttgtcttttatcagaggtaggattctgttttatagtatagaatctactttatccttccttttaatagttcctttagacctgtgaaatttcttcactacatttaatagttctcctatttcccgctcccccatatcaattttccttttgtctccggggctgagtaaataaacatgttctgtcacaaatagcagcaccactttggattgattttgctctccaggacatcagcacatggccctgatcagcactaccacatccaaacataagtcactgaaaaacacttaatatttatgagttggtaatgacaagggacattgtataaagtactatttgctagattcatgcctcaaaagttattataaacagacctttattaaacacatcttgaaagatgtagaagtccctctatagtctagtatagtttacaatagagttgtaagaccaaaaaaaaaaaaaaaaaattcaaactcgttattcaggaacctgcttataaaatgtcagctgggattctttgcatgccaatctgatgcgttggaatggtccatgaattaaggctttcttgagcagttcttggcccagaactctggcattggttctagtttgatgaagggcatgacctctataaatggtttcaattgctaaaatatttacctgggatactgggtcagccattttgactgagcagactagtggatttagacattgtttttagttattttgtttttaaccaaatcaaccaactgcctccctgaaataagtcaatgaactcattgtttcagcatcacgtggccaaaggtcatgtgattgcaaatctggatttcaagggaggccaagccagcttcctgggtccttccatcctcttccctagcagacactctcctttttcttaacagatagattctatatatttactatattatttatacccagatgaatattttgatagatacctaagacaatttcacatctaaaagatggacgcctcaatggaaaaaaaacaatctttctctggaaaccttataggtttttctttttattacaatataaaagcaatgtgtgtttgccttctctgagtaaactgaaagggttgtctcagtaatttttacatacattttgggtaactggataatggatattttaatgcactttgtacactaacaggttctaaataaaagggtctaaaactcagcttctgagtttttaaaatcacggtctccaggtaccaataaatgctacagtttgccttatgatgttaacataaaacacttagtagaaggacaatatttccatgaaaataatgtttttcaatattaagaagttactactcaaattttcacagtaagccatttagggtatgtttggctatttttataaggacatgagagattatgtcataattttgttgtggaagtctcactcttggctaacttaaaagcattgtggatagtagcagttactagttccaggttgtcatatttacaggaaaatatgtatatggtgaaaggccaccgtgtttaattactataatgatgtagaaaagattcccgtgtgaattttttttttgaaagtctaaaaaatgtatgctgtaaaaatttgctgcagtgtaattttgcattctctttaaactgattgaggtcacagtattttattatttggggtcctcaccacaggaaacactgcgatacaggggcaaaagagatggcagtgccaattaaattaatacaacaaaatcaatgcagcaccaaccaagactgccaggtctggtgtcatgggtatgcccagagcccaggagttcagaagggccctaagcctgatttaatgctctgctgttgatgtcttgaaattcttaacaatttttgaacaaggggcctgcgttttcacttcgcactgggccttgcaaattacatagcgagtgctcataaaagaactcagaaacgtggtacctctcttcctggtggatacaaataaagaaatctggatccaaagttgaaagttgctggcgatatcattcaagtaggactctaaatagtggattaagatgagggtgggcctgggtgaagattctttccagctttaaaagaaagtgacttcaaaaactgactgcaaatattgacgatggtttctgctggaggaaaagaaacagcttgaatacagacaggcttttttattacggtactgatatattgaccttaaacttgctgaggaactgaactaacgtcctccagtgaccgtggaattccatctcagctccaggaacatgcagatacctgcaaagagacacgcatatatgctggcatacatgtgcatttggtgttgggaagttgaccatctggtctatcttaataaaatggtaaaaagcacaccaagacaatgatgggggcaggaggatgtttttgaaaacagcgcttctcaaccagtgctcgattttgccccccaggagacatttggcaatgcaatggcaacttttggttgtcgcagccggggaagggaagctaccagcatctagtgcgtagaggtcatggacgccgttaaacatcctacagtgcaagcgcagcccccgaccacgaagagttgtcttgctcaaatatcaacagtgctgcagtgtagaaacttgatcgttggttttcttttaatgcaaaactctcataaaaacctttcacttttcctgtcattgattatatgcttgatacacccaaaaagaaaaggggaggggcaccaattcacctacactccagtggctccatcacctttaaaaatatttataaaatagttccaaaaatctgatatctgaaaagcaatccaagcctgtgtaaatgggaatcactgataagtatcatcatctgtatcagcttggcttggacatgaaaaattgattctctttatgtcactccttgcacctggacaaattcaatccccggtacttaagtcacactgccaagccctcggccctgactattgtcttgattgctgttcctttctggttcaaaataaaatcatttttgtggcaccaaga

SEQ ID NO: 18154 - DNA, 1729 bp, Homo sapiens
  source 1..1729: mol_type = unassigned DNA
ctgaagtgttagtatgtagtggagctggtggtgtgaagctgattcattttgtttcaaagccccaaatggcatgctgccgaacacaggcacaagcacagcagcgtctccttagaaataatgactccaaggcaaacagccctcattgcaaaatgtagaagactgccatctgcttgtctccactgtggtttattcgtttcagggttttaaatgacgtaataaaaagatagctgatcagcttccttgggttttgctgatgacacaagagagctttgcctgaagatggaaacactggagtcagaactgacctgccctatttgtctggagctctttgaggaccctcttctactgccctgcgcacacagcctctgcttcaactgcgcccaccgcatcctagtatcacactgtgccaccaacgagtctgtggagtccatcaccgccttccagtgccccacctgccggcatgtcatcaccctcagccagcgaggtctagacgggctcaagcgcaacgtcaccctacagaacatcatcgacaggttccagaaagcatcagtgagcgggcccaactctcccagcgagacccgtcgggagcgggcctttgacgccaacaccatgacctccgccgagaaggtcctctgccagttttgtgaccaggatcctgcccaggacgctgtgaagacctgtgtcacttgtgaagtatcctactgtgacgagtgcctgaaagccactcacccgaataagaagccctttacaggccatcgtctgattgagccaattccggactctcacatccgggggctgatgtgcttggagcatgaggatgagaaggtgaatatgtactgtgtgaccgatgaccagttaatctgtgccttgtgtaaactggttgggcggcaccgcgatcatcaggtggcagctttgagtgagcgctatgacaaattgaagcaaaacttagagagtaacctcaccaaccttattaagaggaacacagaactggagacccttttggctaaactcatccaaacctgtcaacatgttgaagtcaatgcatcacgtcaagaagccaaattgacagaggagtgtgatcttctcattgagatcattcagcaaagacgacagattattggaaccaagatcaaagaagggaaggtgatgaggcttcgcaaactggctcagcagattgcaaactgcaaacagtgcattgagcggtcagcatcactcatctcccaagcggaacactctctgaaggagaatgatcatgcgcgtttcctacagactgctaagaatatcaccgagagagtctccatggcaactgcatcctcccaggttctaattcctgaaatcaacctcaatgacacatttgacacctttgccttagatttttcccgagagaagaaactgctagaatgtctggattaccttacagctcccaaccctcccacaattagagaagagctctgcacagcttcatatgacaccatcactgtgcattggacctccgatgatgagttcagcgtggtctcctacgagctccagtacaccatattcaccggacaagccaacgtcgttagtctgtgtaattcggctgatagctggatgatagtacccaacatcaagcagaaccactacacggtgcacggtctgcagagcggcaccaagtacatcttcatggtcaaggccatcaaccaggcgggcagccgcagcagtgagcctgggaagttgaagacaaacagcc

SEQ ID NO: 18155 - DNA, 945 bp, Homo sapiens
  source 1..945: mol_type = unassigned DNA
gagaactgatttgaaataagagccaggcggtcctcgcttccctgcgaccgacttttcataggctgggggagaaaaggttgagaaacttgacattgtctcgagcagagtgcgtgtagcaacagatcaaagaaaaagaggacgaaaacgtgctctttgctgcccgtagatttcgccgggttgcttttgtcttgcgggctcctgtcgggttcggtgtttccgctctgaagactgcgacgcgggctccgatgcagctcgctccctgccggatgggtcatgggattctaaacatgaggcagatagctgatcagcttccttgggttttgctgatgacacaagagagctttgcctgaagatggaaacactggagtcagaactgacctgccctatttgtctggagctctttgaggaccctcttctactgccctgcgcacacagcctctgcttcaactgcgcccaccgcatcctagtatcacactgtgccaccaacgagtctgtggagtccatcaccgccttccagtgccccacctgccggcatgtcatcaccctcagccagcgaggtctagacgggctcaagcgcaacgtcaccctacagaacatcatcgacaggttccagaaagcatcagtgagcgggcccaactctcccagcgagacccgtcgggagcgggcctttgacgccaacaccatgacctccgccgagaaggtcctctgccagttttgtgaccaggatcctgcccaggacgctgtgaagacctgtgtcacttgtgaagtatcctactgtgacgagtgcctgaaagccactcacccgaataagaagccctttacaggccatcgtctgattgagccaattccggactctcacatccgggggctgatgtgcttggagcatgaggatgagaaggtgaatatgtactgtgtgaccgatgaccagttaatctgtgccttgtg

SEQ ID NO: 18156 - DNA, 6393 bp, Homo sapiens
  source 1..6393: mol_type = unassigned DNA
gattctatgcagggtcactatgaaagaggcagcctgccccagtttgggtattctgaagtgttagtatgtagtggagctggtggtgtgaagctgattcattttgtttcaaagccccaaatggcatgctgccgaacacaggcacaagcacagcagcgtctccttagaaataatgactccaaggcaaacagccctcattgcaaaatgtagaagactgccatctgcttgtctccactgtggtttattcgtttcagggttttaaatgacgtaataaaaagatagctgatcagcttccttgggttttgctgatgacacaagagagctttgcctgaagatggaaacactggagtcagaactgacctgccctatttgtctggagctctttgaggaccctcttctactgccctgcgcacacagcctctgcttcaactgcgcccaccgcatcctagtatcacactgtgccaccaacgagtctgtggagtccatcaccgccttccagtgccccacctgccggcatgtcatcaccctcagccagcgaggtctagacgggctcaagcgcaacgtcaccctacagaacatcatcgacaggttccagaaagcatcagtgagcgggcccaactctcccagcgagacccgtcgggagcgggcctttgacgccaacaccatgacctccgccgagaaggtcctctgccagttttgtgaccaggatcctgcccaggacgctgtgaagacctgtgtcacttgtgaagtatcctactgtgacgagtgcctgaaagccactcacccgaataagaagccctttacaggccatcgtctgattgagccaattccggactctcacatccgggggctgatgtgcttggagcatgaggatgagaaggtgaatatgtactgtgtgaccgatgaccagttaatctgtgccttgtgtaaactggttgggcggcaccgcgatcatcaggtggcagctttgagtgagcgctatgacaaattgaagcaaaacttagagagtaacctcaccaaccttattaagaggaacacagaactggagacccttttggctaaactcatccaaacctgtcaacatgttgaagtcaatgcatcacgtcaagaagccaaattgacagaggagtgtgatcttctcattgagatcattcagcaaagacgacagattattggaaccaagatcaaagaagggaaggtgatgaggcttcgcaaactggctcagcagattgcaaactgcaaacagtgcattgagcggtcagcatcactcatctcccaagcggaacactctctgaaggagaatgatcatgcgcgtttcctacagactgctaagaatatcaccgagagagtctccatggcaactgcatcctcccaggttctaattcctgaaatcaacctcaatgacacatttgacacctttgccttagatttttcccgagagaagaaactgctagaatgtctggattaccttacagctcccaaccctcccacaattagagaagagctctgcacagcttcatatgacaccatcactgtgcattggacctccgatgatgagttcagcgtggtctcctacgagctccagtacaccatattcaccggacaagccaacgtcgttagtctgtgtaattcggctgatagctggatgatagtacccaacatcaagcagaaccactacacggtgcacggtctgcagagcggcaccaagtacatcttcatggtcaaggccatcaaccaggcgggcagccgcagcagtgagcctgggaagttgaagacaaacagccaaccatttaaactggatcccaaatctgctcatcgaaaactgaaggtgtcccatgataacttgacagtagaacgtgatgagtcatcatccaagaagagtcacacacctgaacgcttcaccagccaggggagctatggagtagctggaaatgtgtttattgatagtggccggcattattgggaagtggtcataagtggaagcacatggtatgccattggtcttgcttacaaatcagccccgaagcatgaatggattgggaagaactctgcttcctgggcgctctgccgctgcaacaataactgggtggtgagacacaatagcaaggaaatccccattgagcctgccccccacctccggcgcgtgggcatcctgctggactatgataacggctctatcgccttttatgatgctttgaactccatccacctctacaccttcgacgtcgcatttgcgcagcctgtttgccccaccttcaccgtgtggaacaagtgtctgacgattatcactgggctccctatcccagaccatttggactgcacagagcagctgccgtgagcgtctggccacatggagctgctttctggggaacagtaaggttcaggccactatttaggggactgagaaagcacaggcttcatgagtgtaatgaaatctcaccagaagtgtcccgaaatcggctcagatagggctcaaaacaagagattcctctccttttactgtgtcttgtattaagtacgggctttaataatttctttaatttttttgtatttagaggaaaatctatagattatttataagagaaacataatcaggattacaacttttaggaattacttggttttgcacattaagaggcccataagtttatcagctatttacaaccttcatttcatcacaatctgtgggcttacaaaaaaacaaaaacttttgtagttttgtatgttactcatcttcttacctgatatcccatgatgatcccatggtaggtcttctcacctcgatggtgcataacaggatgtgtttgaacctagtaggggaggaaacaggctttcttactctggtttaatttgaagtgttttaattgtgatgtcaaaaagttgtatcagatcaactaaaatggagagcaagacagagaatgaaaagagttgattttggacctcggaccttgccgtggctaaatctttaccttctcatagctgatgggataatgttggaaagaaaggttctgaatcctttggccacattttgccctgcttctctcagggttaagggttctggaagaacattaagaatgagattgcaattgaaaatagtcattttgaatcctattgattattcaaaaattcaggctgatttgtcttttatcagaggtaggattctgttttatagtatagaatctactttatccttccttttaatagttcctttagacctgtgaaatttcttcactacatttaatagttctcctatttcccgctcccccatatcaattttccttttgtctccggggctgagtaaataaacatgttctgtcacaaatagcagcaccactttggattgattttgctctccaggacatcagcacatggccctgatcagcactaccacatccaaacataagtcactgaaaaacacttaatatttatgagttggtaatgacaagggacattgtataaagtactatttgctagattcatgcctcaaaagttattataaacagacctttattaaacacatcttgaaagatgtagaagtccctctatagtctagtatagtttacaatagagttgtaagaccaaaaaaaaaaaaaaaaaattcaaactcgttattcaggaacctgcttataaaatgtcagctgggattctttgcatgccaatctgatgcgttggaatggtccatgaattaaggctttcttgagcagttcttggcccagaactctggcattggttctagtttgatgaagggcatgacctctataaatggtttcaattgctaaaatatttacctgggatactgggtcagccattttgactgagcagactagtggatttagacattgtttttagttattttgtttttaaccaaatcaaccaactgcctccctgaaataagtcaatgaactcattgtttcagcatcacgtggccaaaggtcatgtgattgcaaatctggatttcaagggaggccaagccagcttcctgggtccttccatcctcttccctagcagacactctcctttttcttaacagatagattctatatatttactatattatttatacccagatgaatattttgatagatacctaagacaatttcacatctaaaagatggacgcctcaatggaaaaaaaacaatctttctctggaaaccttataggtttttctttttattacaatataaaagcaatgtgtgtttgccttctctgagtaaactgaaagggttgtctcagtaatttttacatacattttgggtaactggataatggatattttaatgcactttgtacactaacaggttctaaataaaagggtctaaaactcagcttctgagtttttaaaatcacggtctccaggtaccaataaatgctacagtttgccttatgatgttaacataaaacacttagtagaaggacaatatttccatgaaaataatgtttttcaatattaagaagttactactcaaattttcacagtaagccatttagggtatgtttggctatttttataaggacatgagagattatgtcataattttgttgtggaagtctcactcttggctaacttaaaagcattgtggatagtagcagttactagttccaggttgtcatatttacaggaaaatatgtatatggtgaaaggccaccgtgtttaattactataatgatgtagaaaagattcccgtgtgaattttttttttgaaagtctaaaaaatgtatgctgtaaaaatttgctgcagtgtaattttgcattctctttaaactgattgaggtcacagtattttattatttggggtcctcaccacaggaaacactgcgatacaggggcaaaagagatggcagtgccaattaaattaatacaacaaaatcaatgcagcaccaaccaagactgccaggtctggtgtcatgggtatgcccagagcccaggagttcagaagggccctaagcctgatttaatgctctgctgttgatgtcttgaaattcttaacaatttttgaacaaggggcctgcgttttcacttcgcactgggccttgcaaattacatagcgagtgctcataaaagaactcagaaacgtggtacctctcttcctggtggatacaaataaagaaatctggatccaaagttgaaagttgctggcgatatcattcaagtaggactctaaatagtggattaagatgagggtgggcctgggtgaagattctttccagctttaaaagaaagtgacttcaaaaactgactgcaaatattgacgatggtttctgctggaggaaaagaaacagcttgaatacagacaggcttttttattacggtactgatatattgaccttaaacttgctgaggaactgaactaacgtcctccagtgaccgtggaattccatctcagctccaggaacatgcagatacctgcaaagagacacgcatatatgctggcatacatgtgcatttggtgttgggaagttgaccatctggtctatcttaataaaatggtaaaaagcacaccaagacaatgatgggggcaggaggatgtttttgaaaacagcgcttctcaaccagtgctcgattttgccccccaggagacatttggcaatgcaatggcaacttttggttgtcgcagccggggaagggaagctaccagcatctagtgcgtagaggtcatggacgccgttaaacatcctacagtgcaagcgcagcccccgaccacgaagagttgtcttgctcaaatatcaacagtgctgcagtgtagaaacttgatcgttggttttcttttaatgcaaaactctcataaaaacctttcacttttcctgtcattgattatatgcttgatacacccaaaaagaaaaggggaggggcaccaattcacctacactccagtggctccatcacctttaaaaatatttataaaatagttccaaaaatctgatatctgaaaagcaatccaagcctgtgtaaatgggaatcactgataagtatcatcatctgtatcagcttggcttggacatgaaaaattgattctctttatgtcactccttgcacctggacaaattcaatccccggtacttaagtcacactgccaagccctcggccctgactattgtcttgattgctgttcctttctggttcaaaataaaatcatttttgtggcaccaagaccctctgtctctgcctgtctctgttgccttttcatcattttgtgtttttgcagttatgatgttgacaaatatttattcaacatctaccatttattcatactactttatgacatataattcattttcttttactgtctctcatccactatttgcctttccctattcaaaatacaattcttttgcaacactcaaaatattctccagggaatttttaaaacacaataaaagaaagcctatatagaagtg

SEQ ID NO: 18157 - DNA, 5666 bp, Homo sapiens
  source 1..5666: mol_type = unassigned DNA
atggaaacactggagtcagaactgacctgccctatttgtctggagctctttgaggaccctcttctactgccctgcgcacacagcctctgcttcaactgcgcccaccgcatcctagtatcacactgtgccaccaacgagtctgtggagtccatcaccgccttccagtgccccacctgccggcatgtcatcaccctcagccagcgaggtctagacgggctcaagcgcaacgtcaccctacagaacatcatcgacaggttccagaaagcatcagtgagcgggcccaactctcccagcgagacctccgccgagaaggtcctctgccagttttgtgaccaggatcctgcccaggacgctgtgaagacctgtgtcacttgtgaagtatcctactgtgacgagtgcctgaaagccactcacccgaataagaagccctttacaggccatcgtctgattgagccaattccggactctcacatccgggggctgatgtgcttggagcatgaggatgagaagcaaaacttagagagtaacctcaccaaccttattaagaggaacacagaactggagacccttttggctaaactcatccaaacctgtcaacatgttgaagtcaatgcatcacgtcaagaagccaaattgacagaggagtgtgatcttctcattgagatcattcagcaaagacgacagattattggaaccaagatcaaagaagggaaggtgatgaggcttcgcaaactggctcagcagattgcaaactgcaaacagtgcattgagcggtcagcatcactcatctcccaagcggaacactctctgaaggagaatgatcatgcgcgtttcctacagactgctaagaatatcaccgagagagtctccatggcaactgcatcctcccaggttctaattcctgaaatcaacctcaatgacacatttgacacctttgccttagatttttcccgagagaagaaactgctagaatgtctggattaccttacagctcccaaccctcccacaattagagaagagctctgcacagcttcatatgacaccatcactgtgcattggacctccgatgatgagttcagcgtggtctcctacgagctccagtacaccatattcaccggacaagccaacgtcgttagtctgtgtaattcggctgatagctggatgatagtacccaacatcaagcagaaccactacacggtgcacggtctgcagagcggcaccaagtacatcttcatggtcaaggccatcaaccaggcgggcagccgcagcagtgagcctgggaagttgaagacaaacagccaaccatttaaactggatcccaaatctgctcatcgaaaactgaaggtgtcccatgataacttgacagtagaacgtgatgagtcatcatccaagaagagtcacacacctgaacgcttcaccagccaggggagctatggagtagctggaaatgtgtttattgatagtggccggcattattgggaagtggtcataagtggaagcacatggtatgccattggtcttgcttacaaatcagccccgaagcatgaatggattgggaagaactctgcttcctgggcgctctgccgctgcaacaataactgggtggtgagacacaatagcaaggaaatccccattgagcctgccccccacctccggcgcgtgggcatcctgctggactatgataacggctctatcgccttttatgatgctttgaactccatccacctctacaccttcgacgtcgcatttgcgcagcctgtttgccccaccttcaccgtgtggaacaagtgtctgacgattatcactgggctccctatcccagaccatttggactgcacagagcagctgccgtgagcgtctggccacatggagctgctttctggggaacagtaaggttcaggccactatttaggggactgagaaagcacaggcttcatgagtgtaatgaaatctcaccagaagtgtcccgaaatcggctcagatagggctcaaaacaagagattcctctccttttactgtgtcttgtattaagtacgggctttaataatttctttaatttttttgtatttagaggaaaatctatagattatttataagagaaacataatcaggattacaacttttaggaattacttggttttgcacattaagaggcccataagtttatcagctatttacaaccttcatttcatcacaatctgtgggcttacaaaaaaacaaaaacttttgtagttttgtatgttactcatcttcttacctgatatcccatgatgatcccatggtaggtcttctcacctcgatggtgcataacaggatgtgtttgaacctagtaggggaggaaacaggctttcttactctggtttaatttgaagtgttttaattgtgatgtcaaaaagttgtatcagatcaactaaaatggagagcaagacagagaatgaaaagagttgattttggacctcggaccttgccgtggctaaatctttaccttctcatagctgatgggataatgttggaaagaaaggttctgaatcctttggccacattttgccctgcttctctcagggttaagggttctggaagaacattaagaatgagattgcaattgaaaatagtcattttgaatcctattgattattcaaaaattcaggctgatttgtcttttatcagaggtaggattctgttttatagtatagaatctactttatccttccttttaatagttcctttagacctgtgaaatttcttcactacatttaatagttctcctatttcccgctcccccatatcaattttccttttgtctccggggctgagtaaataaacatgttctgtcacaaatagcagcaccactttggattgattttgctctccaggacatcagcacatggccctgatcagcactaccacatccaaacataagtcactgaaaaacacttaatatttatgagttggtaatgacaagggacattgtataaagtactatttgctagattcatgcctcaaaagttattataaacagacctttattaaacacatcttgaaagatgtagaagtccctctatagtctagtatagtttacaatagagttgtaagaccaaaaaaaaaaaaaaaaaattcaaactcgttattcaggaacctgcttataaaatgtcagctgggattctttgcatgccaatctgatgcgttggaatggtccatgaattaaggctttcttgagcagttcttggcccagaactctggcattggttctagtttgatgaagggcatgacctctataaatggtttcaattgctaaaatatttacctgggatactgggtcagccattttgactgagcagactagtggatttagacattgtttttagttattttgtttttaaccaaatcaaccaactgcctccctgaaataagtcaatgaactcattgtttcagcatcacgtggccaaaggtcatgtgattgcaaatctggatttcaagggaggccaagccagcttcctgggtccttccatcctcttccctagcagacactctcctttttcttaacagatagattctatatatttactatattatttatacccagatgaatattttgatagatacctaagacaatttcacatctaaaagatggacgcctcaatggaaaaaaaacaatctttctctggaaaccttataggtttttctttttattacaatataaaagcaatgtgtgtttgccttctctgagtaaactgaaagggttgtctcagtaatttttacatacattttgggtaactggataatggatattttaatgcactttgtacactaacaggttctaaataaaagggtctaaaactcagcttctgagtttttaaaatcacggtctccaggtaccaataaatgctacagtttgccttatgatgttaacataaaacacttagtagaaggacaatatttccatgaaaataatgtttttcaatattaagaagttactactcaaattttcacagtaagccatttagggtatgtttggctatttttataaggacatgagagattatgtcataattttgttgtggaagtctcactcttggctaacttaaaagcattgtggatagtagcagttactagttccaggttgtcatatttacaggaaaatatgtatatggtgaaaggccaccgtgtttaattactataatgatgtagaaaagattcccgtgtgaattttttttttgaaagtctaaaaaatgtatgctgtaaaaatttgctgcagtgtaattttgcattctctttaaactgattgaggtcacagtattttattatttggggtcctcaccacaggaaacactgcgatacaggggcaaaagagatggcagtgccaattaaattaatacaacaaaatcaatgcagcaccaaccaagactgccaggtctggtgtcatgggtatgcccagagcccaggagttcagaagggccctaagcctgatttaatgctctgctgttgatgtcttgaaattcttaacaatttttgaacaaggggcctgcgttttcacttcgcactgggccttgcaaattacatagcgagtgctcataaaagaactcagaaacgtggtacctctcttcctggtggatacaaataaagaaatctggatccaaagttgaaagttgctggcgatatcattcaagtaggactctaaatagtggattaagatgagggtgggcctgggtgaagattctttccagctttaaaagaaagtgacttcaaaaactgactgcaaatattgacgatggtttctgctggaggaaaagaaacagcttgaatacagacaggcttttttattacggtactgatatattgaccttaaacttgctgaggaactgaactaacgtcctccagtgaccgtggaattccatctcagctccaggaacatgcagatacctgcaaagagacacgcatatatgctggcatacatgtgcatttggtgttgggaagttgaccatctggtctatcttaataaaatggtaaaaagcacaccaagacaatgatgggggcaggaggatgtttttgaaaacagcgcttctcaaccagtgctcgattttgccccccaggagacatttggcaatgcaatggcaacttttggttgtcgcagccggggaagggaagctaccagcatctagtgcgtagaggtcatggacgccgttaaacatcctacagtgcaagcgcagcccccgaccacgaagagttgtcttgctcaaatatcaacagtgctgcagtgtagaaacttgatcgttggttttcttttaatgcaaaactctcataaaaacctttcacttttcctgtcattgattatatgcttgatacacccaaaaagaaaaggggaggggcaccaattcacctacactccagtggctccatcacctttaaaaatatttataaaatagttccaaaaatctgatatctgaaaagcaatccaagcctgtgtaaatgggaatcactgataagtatcatcatctgtatcagcttggcttggacatgaaaaattgattctctttatgtcactccttgcacctggacaaattcaatccccggtacttaagtcacactgccaagccctcggccctgactattgtcttgattgctgttcctttctggttcaaaataaaatcatttttgtggcaccaaga

SEQ ID NO: 18158 - DNA, 2876 bp, Homo sapiens
  source 1..2876: mol_type = unassigned DNA
gagaagacatgtaaacgtgcctccagaggaagggctgggggagctgggagtggcgggggcggcggaaggtgagcctgggaaggtggccgagcaccccttcttcttgggcccttcccagtgctcccttggggtgtcagccccagccccgtttgcccccactccgcctcccttttggaagggattgccttttttttcctctgcggcggcggaaatgacagtgtggtgctgccgtggtgtcatggtgctgcccctggactgaggggcgaaaactcttaagtttagctcgggaggcccagctgcggtagcatcgcggccgccgtgctgtcccctgcggggcgcgcgggctggcggatcccggctgctgcgcggcgtcggcgacggtagcggcagcggcggcgaaggcgggcggcggcctacagtggtagcggcggcggcggcgaccggggcccgggagctcgcgccggagcccgagccaacccgctgcggaggcagacgagagcccagcgccctcgagcgagcggaggagatggctggcacctgggaacgctatgggtgaaagcccagcctccgtggttcttaatgcctcaggaggactattttcactaaagatggaaacactggagtctgaattgacctgtccaatctgcctagagttgtttgaagacccccttctgctcccttgtgctcacagcctctgcttcagctgtgcccatcgcattttggtatcaagctgcagctctggtgaatccattgaacccattactgctttccagtgtcctacctgcaggtatgttatctcgctgaaccaccggggcctggatggcctcaagaggaatgtgactctgcagaacattattgatcgcttccagaaggcttcagtcagtgggcccaattcccctagtgagagccgccgggaaaggacttacaggcccaccactgccatgtctagcgagcgaattgcttgccaattctgtgagcaggacccgccaagggatgcagtaaaaacatgcatcacctgtgaggtctcctactgtgaccgttgcctgcgggccacgcaccccaacaagaaacctttcaccagccaccgcctggtggaaccagtgccagacacacatcttcgagggatcacctgcctggaccatgagaatgagaaagtgaacatgtactgtgtatctgatgaccaattgatctgtgccttatgcaaactggtgggtcgtcaccgagaccatcaggtcgcatccctgaatgatcgatttgagaaactcaagcaaactctggagatgaacctcaccaacctggttaagcgcaacagcgaactagaaaatcaaatggccaaactaatacagatctgccagcaggttgaggtgaatactgctatgcatgaggcaaaacttatggaagaatgtgacgagttggtagagatcatccagcagaggaagcaaatgatcgctgtcaaaatcaaagagacaaaggttatgaaactgagaaagttggcacagcaggttgctaattgccgccagtgtcttgaacggtcaacagtcctcatcaaccaagctgagcatatcctgaaagaaaatgaccaggcacggtttctacagtctgcaaaaaatattgctgagagggtcgctatggcaactgcatcttctcaagttctgattccagacatcaattttaatgatgcctttgaaaactttgctttagatttttccagagaaaagaaactgctagaggggttagattatttaacagccccaaacccaccatctatccgagaagaactctgtactgcctcccatgacaccattacagtccactggatctcggatgatgagttcagcatcagctcctatgagcttcagtacaccatattcactggccaggctaacttcatcagtaagtcatggtgtagttggggcctgtggccagagataaggaaatgtaaggaagcagtaagctgctcaagattggccggggcgccacgaggcctgtataattcagtagacagctggatgattgttcccaacattaaacagaaccattacacagtgcatggactccagagcgggactcgctacatcttcatcgttaaagccataaaccaagccggcagccggaacagtgaacctacccgactaaaaacaaacagccaaccctttaaattggatcccaaaatgactcacaagaagttgaagatctccaatgatggattgcagatggagaaggatgaaagctctctaaagaagagccacaccccagagaggtttagtggcacagggtgctatggggcagcaggaaatatattcattgacagtggctgccactattgggaggtggtcatgggttcctcaacatggtatgcaattggcattgcctacaaatcagctccaaagaatgaatggattggcaagaatgcctcctcatgggtcttctctcgctgcaatagtaacttcgtggtgagacacaacaacaaggaaatgctggtggatgtgcccccacacctgaagcgtctgggtgtcctcctggattatgacaacaatatgctgtctttctatgacccagctaactctctccatcttcatacttttgatgtgaccttcattcttccagtttgtccaacatttacaatctggaacaaatccctaatgatcctgtctggcttgcctgccccagattttattgattaccctgagcggcaggaatgcaactgcaggcctcaagaatccccttatgtttctgggatgaaaacctgtcattaagtttcaggagagtatataattcactggctctctagttcagcagttcttcccctcctacacctaagttagcgttcaatatacgagacacaaaataaagtttgtttgaagcatccaaaataa

SEQ ID NO: 18159 - DNA, 2251 bp, Homo sapiens
  source 1..2251: mol_type = unassigned DNA
acctgggaacgctatgggtgaaagcccagcctccgtggttcttaatgcctcaggaggactattttcactaaagatggaaacactggagtctgaattgacctgtccaatctgcctagagttgtttgaagacccccttctgctcccttgtgctcacagcctctgcttcagctgtgcccatcgcattttggtatcaagctgcagctctggtgaatccattgaacccattactgctttccagtgtcctacctgcaggtatgttatctcgctgaaccaccggggcctggatggcctcaagaggaatgtgactctgcagaacattattgatcgcttccagaaggcttcagtcagtgggcccaattcccctagtgagagccgccgggaaaggacttacaggcccaccactgccatgtctagcgagcgaattgcttgccaattctgtgagcaggacccgccaagggatgcagtaaaaacatgcatcacctgtgaggtctcctactgtgaccgttgcctgcgggccacgcaccccaacaagaaacctttcaccagccaccgcctggtggaaccagtgccagacacacatcttcgagggatcacctgcctggaccatgagaatgagaaagtgaacatgtactgtgtatctgatgaccaattgatctgtgccttatgcaaactggtgggtcgtcaccgagaccatcaggtcgcatccctgaatgatcgatttgagaaactcaagcaaactctggagatgaacctcaccaacctggttaagcgcaacagcgaactagaaaatcaaatggccaaactaatacagatctgccagcaggttgaggtgaatactgctatgcatgaggcaaaacttatggaagaatgtgacgagttggtagagatcatccagcagaggaagcaaatgatcgctgtcaaaatcaaagagacaaaggttatgaaactgagaaagttggcacagcaggttgctaattgccgccagtgtcttgaacggtcaacagtcctcatcaaccaagctgagcatatcctgaaagaaaatgaccaggcacggtttctacagtctgcaaaaaatattgctgagagggtcgctatggcaactgcatcttctcaagttctgattccagacatcaattttaatgatgcctttgaaaactttgctttagatttttccagagaaaagaaactgctagaggggttagattatttaacagccccaaacccaccatctatccgagaagaactctgtactgcctcccatgacaccattacagtccactggatctcggatgatgagttcagcatcagctcctatgagcttcagtacaccatattcactggccaggctaacttcatcagcctgtataattcagtagacagctggatgattgttcccaacattaaacagaaccattacacagtgcatggactccagagcgggactcgctacatcttcatcgttaaagccataaaccaagccggcagccggaacagtgaacctacccgactaaaaacaaacagccaaccctttaaattggatcccaaaatgactcacaagaagttgaagatctccaatgatggattgcagatggagaaggatgaaagctctctaaagaagagccacaccccagagaggtttagtggcacagggtgctatggggcagcaggaaatatattcattgacagtggctgccactattgggaggtggtcatgggttcctcaacatggtatgcaattggcattgcctacaaatcagctccaaagaatgaatggattggcaagaatgcctcctcatgggtcttctctcgctgcaatagtaacttcgtggtgagacacaacaacaaggaaatgctggtggatgtgcccccacacctgaagcgtctgggtgtcctcctggattatgacaacaatatgctgtctttctatgacccagctaactctctccatcttcatacttttgatgtgaccttcattcttccagtttgtccaacatttacaatctggaacaaatccctaatgatcctgtctggcttgcctgccccagattttattgattaccctgagcggcaggaatgcaactgcaggcctcaagaatccccttatgtttctgggatgaaaacctgtcattaagtttcaggagagtatataattcactggctctctagttcagcagttcttcccctcctacacctaagttagcgttcaatatacgagacacaaaataaagtttgtttgaagcatccaaaataa

SEQ ID NO: 18160 - DNA, 758 bp, Homo sapiens
  source 1..758: mol_type = unassigned DNA
cttcaagatgacagggcgctggagaaaaggctgctggaatcagctggtgaaagcccagcctccgtggttcttaatgcctcaggaggactattttcactaaagatggaaacactggagtctgaattgacctgtccaatctgcctagagttgtttgaagacccccttctgctcccttgtgctcacagcctctgcttcagctgtgcccatcgcattttggtatcaagctgcagctctggtgaatccattgaacccattactgctttccagtgtcctacctgcaggtatgttatctcgctgaaccaccggggcctggatggcctcaagaggaatgtgactctgcagaacattattgatcgcttccagaaggcttcagtcagtgggcccaattcccctagtgagagccgccgggaaaggacttacaggcccaccactgccatgtctagcgagcgaattgcttgccaattctgtgagcaggacccgccaagggatgcagtaaaaacatgcatcacctgtgaggtctcctactgtgaccgttgcctgcgggccacgcaccccaacaagaaacctttcaccagccaccgcctggtggaaccagtgccagacacacatcttcgagggatcacctgcctggaccatgagaatgagaaagtgaacatgtactgtgtatctgatgaccaattgatctgtgccttatgcaaactggtgggtcgtcaccgagaccatcaggtcgcatccctgaatgatcgatttgagaaact

SEQ ID NO: 18161 - DNA, 3790 bp, Homo sapiens
  source 1..3790: mol_type = unassigned DNA
gataaaggctgagggccgcgcgcttggcccagaccggcccggccagcgcgcattcggccccggacgaaggtactcgcagcacttggagcgcagaaccggccgcgcccgatcctccgagcggcggcgacggctgttgctaagggaggggacgcgcgaggaagcgcgacccgggcggcagacggcacccagcgccaccagccgagcggcgccccctccccaggacccttaaccgcgccgcgtcccggtcgcgcccgccgccctttgaaggagaagcaagtgccgtccccacccccggaaggcgcccccaggagccggagcgacctcggagcgccactcggattttggatttcggtctcgcattccgcggccgggactttctcgaggaggacgcgcgctgctccgcgcccccgagtgcccggaggacccggcatccggggagcctctcgcccctgtcccggaggcgcggcgaggattggcggcgcccgccgcccccagccccccagcgcgcgccggggatggagccgcagcccggcggcgcccggagctgccggcgcggggcccccggcggcgcctgcgagctgggcccggcggccgaggcggcgcccatgagcctcgccatccacagcaccacgggcacccgctacgacctggccgtgccgcccgacgagacggtggaggggctgcgcaagcggttgtcccagcgcctcaaagtgcccaaggagcgcctggctcttctccacaaagacacccggctcagttcggggaagctgcaggagttcggcgtgggtgatggcagcaagctgaccttggtacccaccgtggaagcgggcctcatgtctcaggcctcaaggccggaacagtccgtgatgcaagctctcgagagtctcacggagacgcaggtcagtgacttcctgtcgggccgttcgccactgacactggccttgcgtgtgggcgaccacatgatgttcgtgcagctgcagctcgcggcccagcacgctccactgcaacaccgccatgtgctggccgctgcggccgccgccgctgctgcgcggggggaccccagcatagcctcccccgtgtcctcgccctgccggccggtgtccagtgccgcccgagtccccccggtgcccaccagcccgtcccctgcatctccctcgcccatcacagccggctccttccggtcccacgcagcctccaccacctgcccggagcagatggactgctcccccacggccagcagcagtgccagtcctggtgccagcaccacgtctaccccaggggccagccctgccccccgctcccgaaaacccggcgccgtcatcgagagctttgtgaatcacgccccgggggtcttctcagggaccttctctggcacgctacaccccaactgccaagacagcagcgggcggccgcggcgtgacatcggcaccatcctgcagatcctgaacgacctcctgagcgccacccggcactaccagggcatgcccccttcgctggcccagctccgctgccacgcccagtgctccccggcctcaccggcccccgacctggcccccagaactacctcctgcgagaagctcacggctgccccctcagcctccctgctgcagggccagagccagatccgcatgtgcaagcccccgggggaccggcttcggcagacagaaaaccgcgccacgcgctgcaaggtggaacggctgcagctgcttctgcagcagaaacggctccgtagaaaggcccggcgggacgcgcggggtccgtaccactggtcacccagccgcaaggccggccgcagcgacagcagtagcagcgggggcggcggcagccccagcgaggcctccggcttgggcctcgacttcgaggactccgtgtggaagccagaagtcaaccctgacatcaagtcagagttcgtggtggcttaggatcttcggatcggccaccctcgcccctcgcaccccagcccagggcggcggggactccgagagccccggagagaacgtggcccagccctggagggcaggcggccactcccccagccagaagtctttttttcttttcttcttttttattatttttttctttttttaaaaagttctgaccgtggtttcctggactcttcatgggctttgcttcctacctccttcacccttcactcctgccctcctcttcctcctcctcctcctcctccgtctgtctcctttcacctctgcgccaggtcggtcctccctgccaaccttccccagctccaatatgtagcagtctctctggatggcggagagtgaaggagacggagaaacgcgccccatcccttccgccgcctcctttcccccccgaccctattcaggttttaagtcaaaaatgtcgatatgtcattatgcactttacagatgaggggaggggccgcagtgcgcagaacccaccccaccccccagtgcagacttcggggtctccaccccaggccagcagcgcccactgggctacagcaagccaacaggtcacagaagccaacgaggggactgtttctcttccactcctatcctcttttcttgatcttttttttgcattttccttcatttctttaacaaggagagcaaagctgttttagcagaggctggggctgaggtccccatggggtttgggtgcaggggcatggcaccctttcctgtcgggaagggagaggggaactacccccccagcctgccctccgccccgccccagccggcggactgtgctgtttcctccgcccccactcccgtgttttctgacctcctgcctgagtttggggtatttatagactattaattttctgactgagccaatagtggttggggaactcttgaaaaaggggagagaatggctgggtgctggggagttcccccctccgagccctccttcccggcccaacctgagggatgtggatttgggactgtctgggggcccctcctgcagcgaggatgggagggggtgctgagctgtgaatcccctgggcagggggcgacaactccgtgtagcattaacccccgtggcggggtccgctgctggtctaatttggaccccctgcctctcagtgcccctgccctaggggtgtctgtctccagaggggagggacaaatcccctactggggccatttcaatggggtagtttttggatttttttccccactcactttttattttttaatgataatggagatgtctggacccttcctcaccccacctgtcggtcttgtcctggctctgcctgtcccccaccgttgttctcgtaggtgaaccccaggtcctcaactccccccctttatgtgttgaaagttaatggtttcagatgtgaacatcacgtgttataactgtagcgctgtaaatttttttgtgggagggtgggcagggaggggtcccagagggtagagctcaaggattttgggttttgttttgttttcatttttccaaaaaaaaaagaaaaaaaaatagaaaaaaaaggagtaaaaggggcgggtttgttttttgaagaactgtcttggatacctatttaaatgtgtgttctgttttgttttttaacgatttttaaataacgtctgtgcctccactggttgagggtggaacctccaggcaggaaccggctcgccaccctctgcccggtaagggctgcccaagaaagcattacccgccctcggggggtcgggctgtgggggtcccggcacctggcgtgagtttcatgtatgaaaacataaaattgaaaaaaaaaaaaaaacctacacgagcaccgtgatttcaagtaataaacagaaaatgaaac

SEQ ID NO: 18162 - DNA, 1408 bp, Homo sapiens
  source 1..1408: mol_type = unassigned DNA
cccgcagcgccggacgctggttgcgcgctcccaggcgccgagcggccccgggcacgcgcgcgcgccaccggcccggcaggtgctgtccttattcccagcccagtcaagagctaccggggctggctagtcatgggggagcccagtagagaggagtataaaatccagtcctttgatgcagagacccagcagctgctgaagacagcactcaaagttgcctgctttgagacagaagatggagaatattccgtttgccagaggagctatagtaattgctctcgcctgatgccttcccgctgtaacacgcagtacagagatccgggtgctgtggacttggagaaagtggccaatgtgattgtggaccattctctgcaggactgtgtgttcagcaaggaagcaggacgcatgtgctacgccatcattcaggcagagagtaaacaagcaggccagagtgtcttccgacgtggactcctcaaccggctgcagcaggagtaccaggctcgggagcagctgcgagcacgctccctgcagggctgggtctgctatgtcacctttatctgcaacatctttgactacctgagggtgaacaacatgcccatgatggccctggtgaaccctgtctatgactgcctcttccggctggcccagccagacagtttgagcaaggaggaggaggtggactgtttggtgctgcagctgcaccgggttggggagcagctggagaaaatgaatgggcagcgcatggatgagctctttgtgctgatccgggatggcttcctgctcccaactggcctcagctccctggcccagctgctgctgctggagatcattgagttccgggcggccggctggaagacaacgccagctgcccacaagtattactacagcgaagtctccgactaggcctccagatcagggcttcctcaccagcactggcctttcttctacccacctctaaagctggcagtggagtctctgcctcacccaaagacttttcccttccagactttgagtgtcttcccttctagactttcccatctcctggtgagatgtttcccacttatgccgtggtcctgccctgagcccctttccccaccacaacccaccacggccaggcagagaagggcaactcccaagagccactgcactgtgtaaccattagtgcaactactaccttggtgcctcagtttacccatctgtaaaatgggtaagcatagccactggtgggatattttgggatgtcaaggggtggaggcagagcacaagtcacaccagaaactgctttttatacattttgtataaggacaactctggaaacaagcctatttcctccagccagtttcactgaatgctgcaccacatgctacaccagttcagcgtgagaattttctaataaatcttttctgatact

SEQ ID NO: 18163 - DNA, 1256 bp, Homo sapiens
  source 1..1256: mol_type = unassigned DNA
gggcacgcgcgcgcgccaccggcccggcaggtgctgtccttattcccagcccagtcaagagctaccggggctggctagtcatgggggagcccagtagagaggagtataaaatccagtcctttgatgcagagacccagcagctgctgaagacagcactcaaagatccgggtgctgtggacttggagaaagtggccaatgtgattgtggaccattctctgcaggactgtgtgttcagcaaggaagcaggacgcatgtgctacgccatcattcaggcagagagtaaacaagcaggccagagtgtcttccgacgtggactcctcaaccggctgcagcaggagtaccaggctcgggagcagctgcgagcacgctccctgcagggctgggtctgctatgtcacctttatctgcaacatctttgactacctgagggtgaacaacatgcccatgatggccctggtgaaccctgtctatgactgcctcttccggctggcccagccagacagtttgagcaaggaggaggaggtggactgtttggtgctgcagctgcaccgggttggggagcagctggagaaaatgaatgggcagcgcatggatgagctctttgtgctgatccgggatggcttcctgctcccaactggcctcagctccctggcccagctgctgctgctggagatcattgagttccgggcggccggctggaagacaacgccagctgcccacaagtattactacagcgaagtctccgactaggcctccagatcagggcttcctcaccagcactggcctttcttctacccacctctaaagctggcagtggagtctctgcctcacccaaagacttttcccttccagactttgagtgtcttcccttctagactttcccatctcctggtgagatgtttcccacttatgccgtggtcctgccctgagcccctttccccaccacaacccaccacggccaggcagagaagggcaactcccaagagccactgcactgtgtaaccattagtgcaactactaccttggtgcctcagtttacccatctgtaaaatgggtaagcatagccactggtgggatattttgggatgtcaaggggtggaggcagagcacaagtcacaccagaaactgctttttatacattttgtataaggacaactctggaaacaagcctatttcctccagccagtttcactgaatgctgcaccacatgctacaccagttcagcgtgagaattttctaataaatcttttctgatac

SEQ ID NO: 18164 - DNA, 1419 bp, Homo sapiens
  source 1..1419: mol_type = unassigned DNA
cgggccccgcagcgccggacgctggttgcgcgctcccaggcgccgagcggccccgggcacgcgcgcgcgccaccggcccggcaggtgctgtccttattcccagcccagtcaagagctaccggggctggctagtcatgggggagcccagtagagaggagtataaaatccagtcctttgatgcagagacccagcagctgctgaagacagcactcaaagccccgtctcttgaatgcacagttgcctgctttgagacagaagatggagaatattccgtttgccagaggagctatagtaattgctctcgcctgatgccttcccgctgtaacacgcagtacagagatccgggtgctgtggacttggagaaagtggccaatgtgattgtggaccattctctgcaggactgtgtgttcagcaaggaagcaggacgcatgtgctacgccatcattcaggcagagagtaaacaagcaggccagagtgtcttccgacgtggactcctcaaccggctgcagcaggagtaccaggctcgggagcagctgcgagcacgctccctgcagggctgggtctgctatgtcacctttatctgcaacatctttgactacctgagggtgaacaacatgcccatgatggccctggtgaaccctgtctatgactgcctcttccggctggcccagccagacagtttgagcaaggaggaggaggtggactgtttggtgctgcagctgcaccgggttggggagcagctggagaaaatgaatgggcagcgcatggatgagctctttgtgctgatccgggatggcttcctgctcccaactggcctcagctccctggcccagctgctgctgctggagatcattgagttccgggcggccggctggaagacaacgccagctgcccacaagtattactacagcgaagtctccgactaggcctccagatcagggcttcctcaccagcactggcctttcttctacccacctctaaagctggcagtggagtctctgcctcacccaaagacttttcccttccagactttgagtgtcttcccttctagactttcccatctcctggtgagatgtttcccacttatgccgtggtcctgccctgagcccctttccccaccacaacccaccacggccaggcagagaagggcaactcccaagagccactgcactgtgtaaccattagtgcaactactaccttggtgcctcagtttacccatctgtaaaatgggtaagcatagccactggtgggatattttgggatgtcaaggggtggaggcagagcacaagtcacaccagaaactgctttttatacattttgtataaggacaactctggaaacaagcctatttcctccagccagtttcactgaatgctgcaccacatgctacaccagttcagcgtgagaattttctaataa

SEQ ID NO: 18165 - DNA, 1937 bp, Homo sapiens
  source 1..1937: mol_type = unassigned DNA
tgatttattccggtcccagaggagaaggcgccagaaccccgcggggtctgagcagcccagcgtgcccattccagcgcccgcgtccccgcagcatgccgcgcccccgcctgctggccgcgctgtgcggcgcgctgctctgcgcccccagcctcctcgtcgccctggatatctgttccaaaaacccctgccacaacggtggtttatgcgaggagatttcccaagaagtgcgaggagatgtcttcccctcgtacacctgcacgtgccttaagggctacgcgggcaaccactgtgagacgaaatgtgtcgagccactgggcctggagaatgggaacattgccaactcacagatcgccgcctcgtctgtgcgtgtgaccttcttgggtttgcagcattgggtcccggagctggcccgcctgaaccgcgcaggcatggtcaatgcctggacacccagcagcaatgacgataacccctggatccaggtgaacctgctgcggaggatgtgggtaacaggtgtggtgacgcagggtgccagccgcttggccagtcatgagtacctgaaggccttcaaggtggcctacagccttaatggacacgaattcgatttcatccatgatgttaataaaaaacacaaggagtttgtgggtaactggaacaaaaacgcggtgcatgtcaacctgtttgagacccctgtggaggctcagtacgtgagattgtaccccacgagctgccacacggcctgcactctgcgctttgagctactgggctgtgagctgaacggatgcgccaatcccctgggcctgaagaataacagcatccctgacaagcagatcacggcctccagcagctacaagacctggggcttgcatctcttcagctggaacccctcctatgcacggctggacaagcagggcaacttcaacgcctgggttgcggggagctacggtaacgatcagtggctgcaggtggacctgggctcctcgaaggaggtgacaggcatcatcacccagggggcccgtaactttggctctgtccagtttgtggcatcctacaaggttgcctacagtaatgacagtgcgaactggactgagtaccaggaccccaggactggcagcagtaagatcttccctggcaactgggacaaccactcccacaagaagaacttgtttgagacgcccatcctggctcgctatgtgcgcatcctgcctgtagcctggcacaaccgcatcgccctgcgcctggagctgctgggctgttagtggccacctgccacccccaggtcttcctgctttccatgggcccgctgcctcttggcttctcagcccctttaaatcaccatagggctggggactggggaaggggagggtgttcagaggcagcaccaccacacagtcacccctccctccctctttcccaccctccacctctcacgggccctgccccagcccctaagccccgtcccctaacccccagtcctcactgtcctgttttcttaggcactgagggatctgagtaggtctgggatggacaggaaagggcaaagtagggcgtgtggtttccctgcccctgtccggaccgccgatcccaggtgcgtgtgtctctgtctctcctagcccctctctcacacatcacattcccatggtggcctcaagaaaggcccggaagcgccaggctggagataacagcctcttgcccgtcggccctgcgtcggccctggggtaccatgtggccacaactgctgtggccccctgtccccaagacacttccccttgtctccctggttgcctctcttgccccttgtcctgaagcccagcgacacagaagggggtggggcgggtctatggggagaaagggagcgaggtcagaggagggcatgggttggcagggtgggcgtttggggccctctatgctggcttttcaccccagaggacacaggcagc

SEQ ID NO: 18166 - DNA, 1987 bp, Homo sapiens
  source 1..1987: mol_type = unassigned DNA
agaaccccgcggggtctgagcagcccagcgtgcccattccagcgcccgcgtccccgcagcatgccgcgcccccgcctgctggccgcgctgtgcggcgcgctgctctgcgcccccagcctcctcgtcgccctggggtgatgtggccttttccagaaggaggaaacaccatacctatcttacacacagatatctgttccaaaaacccctgccacaacggtggtttatgcgaggagatttcccaagaagtgcgaggagatgtcttcccctcgtacacctgcacgtgccttaagggctacgcgggcaaccactgtgagacgaaatgtgtcgagccactgggcctggagaatgggaacattgccaactcacagatcgccgcctcgtctgtgcgtgtgaccttcttgggtttgcagcattgggtcccggagctggcccgcctgaaccgcgcaggcatggtcaatgcctggacacccagcagcaatgacgataacccctggatccaggtgaacctgctgcggaggatgtgggtaacaggtgtggtgacgcagggtgccagccgcttggccagtcatgagtacctgaaggccttcaaggtggcctacagccttaatggacacgaattcgatttcatccatgatgttaataaaaaacacaaggagtttgtgggtaactggaacaaaaacgcggtgcatgtcaacctgtttgagacccctgtggaggctcagtacgtgagattgtaccccacgagctgccacacggcctgcactctgcgctttgagctactgggctgtgagctgaacggatgcgccaatcccctgggcctgaagaataacagcatccctgacaagcagatcacggcctccagcagctacaagacctggggcttgcatctcttcagctggaacccctcctatgcacggctggacaagcagggcaacttcaacgcctgggttgcggggagctacggtaacgatcagtggctgcaggtggacctgggctcctcgaaggaggtgacaggcatcatcacccagggggcccgtaactttggctctgtccagtttgtggcatcctacaaggttgcctacagtaatgacagtgcgaactggactgagtaccaggaccccaggactggcagcagtaagatcttccctggcaactgggacaaccactcccacaagaagaacttgtttgagacgcccatcctggctcgctatgtgcgcatcctgcctgtagcctggcacaaccgcatcgccctgcgcctggagctgctgggctgttagtggccacctgccacccccaggtcttcctgctttccatgggcccgctgcctcttggcttctcagcccctttaaatcaccatagggctggggactggggaaggggagggtgttcagaggcagcaccaccacacagtcacccctccctccctctttcccaccctccacctctcacgggccctgccccagcccctaagccccgtcccctaacccccagtcctcactgtcctgttttcttaggcactgagggatctgagtaggtctgggatggacaggaaagggcaaagtagggcgtgtggtttccctgcccctgtccggaccgccgatcccaggtgcgtgtgtctctgtctctcctagcccctctctcacacatcacattcccatggtggcctcaagaaaggcccggaagcgccaggctggagataacagcctcttgcccgtcggccctgcgtcggccctggggtaccatgtggccacaactgctgtggccccctgtccccaagacacttccccttgtctccctggttgcctctcttgccccttgtcctgaagcccagcgacacagaagggggtggggcgggtctatggggagaaagggagcgaggtcagaggagggcatgggttggcagggtgggcgtttggggccctctatgctggcttttcaccccagaggacacaggcagcttccaaaatatatttatcttcttcacggg

SEQ ID NO: 18167 - DNA, 1752 bp, Homo sapiens
  source 1..1752: mol_type = unassigned DNA
ccagaaccccgcggggtctgagcagcccagcgtgcccattccagcgcccgcgtccccgcagcatgccgcgcccccgcctgctggccgcgctgtgcggcgcgctgctctgcgcccccagcctcctcgtcgccctggatatctgttccaaaaacccctgccacaacggtggtttatgcgaggagatttcccaagaagtgcgaggagatgtcttcccctcgtacacctgcacgtgccttaagggctacgcgggcaaccactgtgagacgaaatgtgtcgagccactgggcctggagaatgggaacattgccaactcacagatcgccgcctcgtctgtgcgtgtgaccttcttgggtttgcagcattgggtcccggagctggcccgcctgaaccgcgcaggcatggtcaatgcctggacacccagcagcaatgacgataacccctggatccaggtgaacctgctgcggaggatgtgggtaacaggtgtggtgacgcagggtgccagccgcttggccagtcatgagtacctgaaggccttcaaggtggcctacagccttaatggacacgaattcgatttcatccatgatgttaataaaaaacacaaggagtttgtgggtaactggaacaaaaacgcggtgcatgtcaacctgtttgagacccctgtggaggctcagtacgtgagattgtaccccacgagctgccacacggcctgcactctgcgctttgagctactgggctgtgagctgaacggatgcgccaatcccctgggcctgaagaataacagcatccctgacaagcagatcacggcctccagcagctacaagacctggggcttgcatctcttcagctggaacccctcctatgcacggctggacaagcagggcaacttcaacgcctgggttgcggggagctacggtaacgatcagtggctgcagatcttccctggcaactgggacaaccactcccacaagaagaacttgtttgagacgcccatcctggctcgctatgtgcgcatcctgcctgtagcctggcacaaccgcatcgccctgcgcctggagctgctgggctgttagtggccacctgccacccccaggtcttcctgctttccatgggcccgctgcctcttggcttctcagcccctttaaatcaccatagggctggggactggggaaggggagggtgttcagaggcagcaccaccacacagtcacccctccctccctctttcccaccctccacctctcacgggccctgccccagcccctaagccccgtcccctaacccccagtcctcactgtcctgttttcttaggcactgagggatctgagtaggtctgggatggacaggaaagggcaaagtagggcgtgtggtttccctgcccctgtccggaccgccgatcccaggtgcgtgtgtctctgtctctcctagcccctctctcacacatcacattcccatggtggcctcaagaaaggcccggaagcgccaggctggagataacagcctcttgcccgtcggccctgcgtcggccctggggtaccatgtggccacaactgctgtggccccctgtccccaagacacttccccttgtctccctggttgcctctcttgccccttgtcctgaagcccagcgacacagaagggggtggggcgggtctatggggagaaagggagcgaggtcagaggagggcatgggttggcagggtgggcgtttggggccctctatgctggcttttcaccccagaggacacaggcagct

SEQ ID NO: 18168 - DNA, 4113 bp, Homo sapiens
  source 1..4113: mol_type = unassigned DNA
tgaggcgcgggaggcccgcgccccgcggctcgctgtgcgtgggagggcgcgagcgaacgcgggcgaggagcggccgagccgctgaagaggagctgggcgccggccgcccggccgcgctcggcccgcggatcgcctccgcccggtcttcgccggccccggcccctggcgagatgccgtgtggggaggattggctcagccacccgctgggaatcgtgcagggattcttcgcccaaaatggagttaatcctgactgggagaagaaagtaattgagtattttaaggaaaagctgaaggaaaataatgctcctaagtgggtaccatcactgaacgaagttccccttcattatttgaaacctaatagttttgtgaaatttcgttgcatgattcaggatatgtttgaccctgagttttacatgggagtttatgaaacggttaaccaaaacacaaaagcacatgttcttcattttggaaaatatagagatgtagcagagtgtgggcctcaacaagaacttgatttaaactctccacgaaataccactttggaaagacagactttctattgtgttccggtgcctggggaatctacgtgggtaaaagaagcctatgttaatgcaaaccaagctcgagtcagtccctcaacatcctacactcctagtcgccacaagaggagttatgaagatgatgacgatatggacctacagcccaataagcagaaagaccaacatgcaggtgccagacaagcagggagtgttggtggtcttcaatggtgtggagagccaaaacgtttagaaactgaagcttctactgggcaacagctgaactctctgaacttgtcttctccttttgatttgaattttccattgccaggagagaagggccctgcatgccttgtgaaggtttatgaagattgggattgtttcaaagtaaatgacattcttgagctatatggcatactgtctgtggatcctgtgctgagtatactgaataatgatgaaagggatgcctctgcactgctggatccgatggagtgcacagacacagcagaggagcagagagtacacagtcctcctgcttcattagtgccgagaattcatgtgatcttagcccagaagttgcaacacatcaacccattattgcctgcctgccttaacaaagaggagagcaaaacctgtaagtttgtttcaagtttcatgtccgaattgtctccagtcagagcagaacttcttgggttccttactcatgcccttctgggggatagtttggctgctgaataccttatattacatctcatctccacagtatatacaagaagagatgtccttccactaggaaaatttacagttaacttgagtggttgcccacggaatagtaccttcacagaacacttgtatcgaattattcaacatcttgttccagcatcttttcgtctgcagatgactatagagaacatgaaccatttgaaattcattccccacaaagactacacagccaatcgcttggtcagtgggctcctccagctgcccagcaatacttcccttgtaatcgatgagactctcctggaacaggggcagctggataccccaggtgttcataatgtgacagccctgagcaacctcataacgtggcagaaggtggattatgacttcagctaccatcagatggaattcccctgcaatattaacgttttcattacttcggaggggaggtcactcctcccggcagactgccagattcacttacagccccagctaattccaccaaacatggaggagtacatgaacagccttctctcagcggtgctgccttccgtgctgaacaaattccgcatttatctaactcttttgagattcttggaatatagcatatctgatgaaataaccaaggcagttgaagatgactttgtggaaatgcggaagaacgaccctcagagcatcactgctgatgatcttcaccagctgctcgtggtggctcggtgtctgtctctcagtgctggtcagacaacgctgtcaagagaacgatggctgagagcaaagcagctagagtctttaagaagaacgaggcttcagcagcaaaaatgtgtgaatggaaatgaactttaaagatgtaatacctatgaagagtaatgggcaaactgtagccacataattgtaaaattcagatattcatttataccacattgttttataggtaatttctatcacaaaccagtgacatttcctgaaatcaagcctggtaacacctgatgtttatatgatattcagtaaggacttttaccttactgatttcatggagcttttgaagtttgttttataataattatataaattagtaatgatgtaaaaaaagtatttgatattaaaagtttaatattgataatgttgctgattgtaccatttccttagcttcagctgagtcataggccagactgttgaaatgctgaaatgaagaaggttgttgcagtttcaaagtcagaggaatcgtgcttcggatttcttatgttttctagttctctgtttttccagttcacagtgggttggggtgcattcagtagtccatctttggggaacggaggcgtacttgccattgattcacatgactacatgaaattctgtactgtcatttcccagatgtttggccacagaaactttttcccacttaacatttgttaacagcctgcaaaactaaacttgtacatggcagtggttcccagacttttgtattttatggaccggtagtaatatttccaaaaatctggggtactataaggttgccaatttaccttgccaagtaatccgaataaatcactgtattatcaccatttttttcataaaaggaaaggacaatctatctctgaataagaggagtcctttaaacggaatgaatgtggcttttgggggcaaaagaaaccaagacactacattgtctttattttctcctatcccagtgcatttgagaaccatgcataagggaatgctgtgctacaaagctgtgcccaaatatgaaaacaaaataggaaacttaaaaagcaataccccctttagaaagtttttattttcttaaatgtcattgagttgctttgattctattggatttttggcattttttatgggatcatcagttggttccaagtatgttagatcagctaacatctgctactccagtaacagcctcgtacaactgcaggtaggttttctccagaccaattagttttaatagagcaaactaacaacagactgtagtagcatggttatggcaaccagaatcttcagaaaggttaggacattactttttaagctgtcagtggtatcaaataacttacctagttggaggcagataaaggatcccttacgttttttcctataaggcctaaattgaaattgttaaccaaggaaacagggtcagccttgaaaaatcaaggaattcattgtacctaataactgaagtaaaaataactagttgttcaacttttcctaaactcaaatctatttttataaacaaatgtaaataatgtttatattagagttgaactggttttcatttttataactggtagactagaccttccttaaacttttagaaataaaatgaaggcttcactggatttgtgaggataaaatacattttctttaattgtcctagagcaaagtacattagtcaccatgtgttttttgtgccaatgtaaattgtaatttaccaaagaaaaatacatacattgcttggtcttgcagaaaagttcccttgaaagaacctttccaataaataaaacgtcccaaattagcagtaccttgggctgtttttcatgagtaagaagattcaccatcccatgtgatctgtgtggaaaaagaccatgtcctcttggtggaagacatgagagagctgaactgaagtggaggaggtggtgcaagagggaccttcctgctcaaggcccgcccaggcagcggaatggagtgcagtgcttggctgcagaaaccctttgtccctcacctatatatacacggacagtcaagtttgttgctctaacgtaaggcacagcgttaatcctgtatggccaggaaactgagtagactcctgtgtaaccctgtttggaactttgccttcttaaaatgatttttc

SEQ ID NO: 18169 - DNA, 2465 bp, Homo sapiens
  source 1..2465: mol_type = unassigned DNA
cccgccattgtgcgaagtgaaggctaggggcccgtacgcgcccgcctgactgtcgccagcagctcctcggcggccccaccgcagccgccgctccctgaggcgcgggaggcccgcgccccgcggctcgctgtgcgtgggagggcgcgagcgaacgcgggcgaggagcggccgagccgctgaagaggagctgggcgccggccgcccggccgcgctcggcccgcggatcgcctccgcccggtcttcgccggccccggcccctggcgagatgccgtgtggggaggattggctcagccacccgctgggaatcgtgcagggattcttcgcccaaaatggagttaatcctgactgggagaagaaagtaattgagtattttaaggaaaagctgaaggaaaataatgctcctaagtgggtaccatcactgaacgaagttccccttcattatttgaaacctaatagttttgtgaaatttcgttgcatgattcaggatatgtttgaccctgagttttacatgggagtttatgaaacggttaaccaaaacacaaaagcacatgttcttcattttggaaaatatagagatgtagcagagtgtgggcctcaacaagaacttgatttaaactctccacgaaataccactttggaaagacagactttctattgtgttccggtgcctggggaatctacgtgggtaaaagaagcctatgttaatgcaaaccaagctcgagtcagtccctcaacatcctacactcctagtcgccacaagaggagttatgaagatgatgacgatatggacctacagcccaataagcagaaagaccaacatgcaggtgccagacaagcagggagtgttggtggtcttcaatggtgtggagagccaaaacgtttagaaactgaagcttctactgggcaacagctgaactctctgaacttgtcttctccttttgatttgaattttccattgccaggagagaagggccctgcatgccttgtgaaggtttatgaagattgggattgtttcaaagtaaatgacattcttgagctatatggcatactgtctgtggatcctgtgctgagtatactgaataatgatgaaagggatgcctctgcactgctggatccgatggagtgcacagacacagcagaggagcagagagtacacagtcctcctgcttcattagtgccgagaattcatgtgatcttagcccagaagttgcaacacatcaacccattattgcctgcctgccttaacaaagaggagagcaaaacctttgtttcaagtttcatgtccgaattgtctccagtcagagcagaacttcttgggttccttactcatgcccttctgggggatagtttggctgctgaataccttatattacatctcatctccacagtatatacaagaagagatgtccttccactaggaaaatttacagttaacttgagtggttgcccacggaatagtaccttcacagaacacttgtatcgaattattcaacatcttgttccagcatcttttcgtctgcagatgactatagagaacatgaaccatttgaaattcattccccacaaagactacacagccaatcgcttggtcagtgggctcctccagctgcccagcaatacttcccttgtaatcgatgagactctcctggaacaggggcagctggataccccaggtgttcataatgtgacagccctgagcaacctcataacgtggcagaaggtggattatgacttcagctaccatcagatggaattcccctgcaatattaacgttttcattacttcggaggggaggtcactcctcccggcagactgccagattcacttacagccccagctaattccaccaaacatggaggagtacatgaacagccttctctcagcggtgctgccttccgtgctgaacaaattccgcatttatctaactcttttgagattcttggaatatagcatatctgatgaaataaccaaggcagttgaagatgactttgtggaaatgcggaagaacgaccctcagagcatcactgctgatgatcttcaccagctgctcgtggtggctcggtgtctgtctctcagtgctggtcagacaacgctgtcaagagaacgatggctgagagcaaagcagctagagtctttaagaagaacgaggcttcagcagcaaaaatgtgtgaatggaaatgaactttaaagatgtaatacctatgaagagtaatgggcaaactgtagccacataattgtaaaattcagatattcatttataccacattgttttataggtaatttctatcacaaaccagtgacatttcctgaaatcaagcctggtaacacctgatgtttatatgatattcagtaaggacttttaccttactgatttcatggagcttttgaagtttgttttataataattatataaattagtaatgatgtaaaaaaagtatttgatattaaaagtttaatattgataa

SEQ ID NO: 18170 - DNA, 4546 bp, Homo sapiens
  source 1..4546: mol_type = unassigned DNA
ggttggaattttggcgggttcagctgtgaacgaagaaggcgtcccggcatcggccaagattctacattgctcatctgggcatctgagcctccttcgaagtttcctgtcacaactgtcctcttgacagcatggatgaggaggaagacaatctgtctctgctgaccgcactgctggaagaaaatgagtcagccttggattgtaattcagaagaaaataacttcttgacgcgggaaaatggcgagcccgacgcatttgatgagctctttgatgccgacggcgacggtgaatcttatacagaagaggctgatgatggagaaacaggagagacaagagacgaaaaggaaaatctggccactctctttggagatatggaggacttaacagatgaagaagaagttcccgcatcacagtcaactgaaaatagggtcctccctgctcctgcccccaggcgagagaaaacgaatgaagagttgcaagaggaattaaggaatttgcaagagcaaatgaaggccttacaagagcagctaaaagtaacaacaattaaacagacagcaagcccagcccgtctgcaaaaatcccctgtagagaagtctccccggccacctcttaaggagaggagagttcagagaattcaggagtcaacatgcttttctgcggagcttgatgtccctgcgctaccaagaaccaagagggtggctcgaacaccaaaggcttcacctccagatcccaaaagctcatcttcaaggatgacaagtgcaccctcccaacccctacagacgatttctcggaacaaacctagtgggataactagaggtcaaattgtggggaccccaggaagttctggggaaacgactcaacccatctgtgtggaagccttctctggtctgcggctcaggcggcctcgagtatcctccacagaaatgaacaagaaaatgaccggccgaaaactgatcagactgtctcagatcaaggaaaagatggccagagagaagctggaagaaatagattgggtgacatttggggttatattgaagaaggttacgccacagagtgtgaatagtggaaaaaccttcagcatatggaaactgaatgatcttcgtgacctgacacaatgtgtgtccttgttcttatttggagaagttcacaaagcgctctggaagacggagcaggggactgtcgtagggatcctcaatgccaaccccatgaagcccaaggatggttcagaggaggtgtgtttatctatcgatcatcctcagaaggtcttaattatgggtgaagctcttgacctgggaacctgtaaagccaagaagaagaatggagagccgtgcacgcagactgtgaatttgcgtgactgtgagtactgtcagtaccatgtccaggctcagtacaagaagctcagcgcaaagcgtgcggatctgcagtccaccttctctggaggacgaattccaaagaagtttgcccgcagaggcaccagcctcaaagaacggctgtgccaagatggcttttactacggaggggtttcttctgcctcgtatgcagcttcaattgcagcagctgtggctcctaagaagaagattcaaaccactctgagtaatctggttgttaagggcacaaacttgatcatccaggaaacacggcaaaaactcggaataccccagaagagcctgtcttgctctgaggagttcaaggaactgatggacctgccgacgtgtggagccaggaacttaaaacaacatttagccaaagccacagcttcagggattatggggagcccaaaaccagccatcaagtccatctcggcctcagcactcttgaagcaacagaagcagcggatgttggagatgaggagaaggaaatcagaagaaatacagaagcgatttctgcagagctcaagtgaagttgagagcccagctgtgccatcttcatcaagacagccccctgctcagcctccacggacaggatccgagttccccaggctggagggagccccggccacaatgacgcccaagctggggcgaggtgtcttggaaggagatgatgttctcttttatgatgagtcaccaccaccaagaccaaaactgagtgctttagcagaagccaaaaagttagctgctatcaccaaattaagggcaaaaggccaggttcttacaaaaacaaacccaaacagcattaagaagaaacaaaaggaccctcaggacatcctggaggtgaaggaacgtgtagaaaaaaacaccatgttttcttctcaagctgaggatgaattggagcctgccaggaaaaaaaggagagaacaacttgcctatctggaatctgaggaatttcagaaaatcctaaaagcaaaatcaaaacacacaggcatcctgaaagaggccgaggctgagatgcaggagcgctactttgagccactggtgaaaaaagaacaaatggaagaaaagatgagaaacatcagagaagtgaagtgccgtgtcgtgacatgcaagacgtgcgcctatacccacttcaagctgctggagacctgcgtcagtgagcagcatgaataccactggcatgatggtgtgaagaggtttttcaaatgtccctgtggaaacagaagcatctccttggacagactcccgaacaagcactgcagtaactgtggcctctacaaatgggaacgggacggaatgctaaaggaaaagactggtccaaagataggaggagaaactctgttaccaagaggagaagaacatgctaaatttctgaacagccttaaataacccgaacttcagacattttcccacagacttcctggcctcctgtgactctggaaagcaaaggattggctgtgtattgtccattgattcctgattgacgccgtcaaaaacaaatgcttgttaagcccataagctttgcctgcttactttctgccattgggttggtttgataccacatttaacattgacatttaagtggaaaaccaagttatcattgtcttttctaagctcagtgtggatgattgcattacttcattcactgaagtttttgcccaaaaattggaaggtaaacagagagctatgtttctgtatcttttggttatagagtgttcacttctttatcataacaaaattctagtgtttatacgaacacccagaggcaaaagaatttggcttaattctcactccaggtaagtagcttaacttctgggcttcagttttctcatctgtaaaatcaggaagattggactaagtgatcctgaaatgtattttttagcactggatttctacaaataataaaactttcccatctagataatgatgatcacatagtcttgatgtacggacattaaaagccagatttcttcattcaattctgttatctctgttttactctttgaaattgatcaagccactgaatcactttgcatttcagtttatatatatagagagaaagaaggtgtctgctcttacattattgtggagccctgtgatagaaatatgtaaaatctcatattattttttttttaatttttttattttttatgacagggtctcactatgtcaccctggctggagtgcagtagtgcgatcgcggcacactgcagccttggcttccctgggctcaagcagtcctcccacctcagtctcccaaatagctaggactacaggcgtgcgtgaccaagcccagctaatttttgcattttttgtagagatggggttttgccatgttgctcaggctggtctcaaactcctgagcactagcaatccacccacctctgtttccaaaaaaaaaaaaaaaatgaaaggtcaacccctatgcaaattaccacagcaaaggtttcattcaggagattcttccatctgggcaacctggttttccaaatatcatttgacctaagtgaatgttgatactagctaaagattgggtaaattggttgaattattgtattgaagcttgagctgtagctaaaagtaatttaggtttcccctaagatgttattatgttagggacataacacttttgggaggttgttgtgggagatggttgatttaggttttcaaaagctagaaataaaatttacatgccttagatttcataaaattctgctctaattgggtggaaggtgctgtatctaacttgtgttcctcctaaggttatgtcctaataactattcttttaggagtatacttctactttatagaaggttgcttttctttttaattttttctaacaaagaaaagaataaagtatttattaataagaaccagaaagcacttgaaactgatgtttttaatggctcatttagggtagatttatttatctcattaacttaaaacagctatgtgtatgaaataggtcacaacagaacttgaacaccaggttggtgtctgagcaatccctttcttatgggaaaaacaatgttcttgtttgaacagagggtatcattgcagtcagtattcacgtgtatattgttatataagttgtataatatgcttgtaaaggctgagggtgagctgtatctggatgcctttttacaatttgattttaacttttaaaataaatttaaaac

SEQ ID NO: 18171 - DNA, 4587 bp, Homo sapiens
  source 1..4587: mol_type = unassigned DNA
ccaagattctacattgctcatctgggcatctgagcctccttcgaagtttcctgtcacaactgtcctcttgacagcatggatgaggaggaagacaatctgtctctgctgaccgcactgctggaagaaaatgagtcagccttggattgtaattcagaagaaaataacttcttgacgcgggaaaatggcgagcccgacgcatttgatgagctctttgatgccgacggcgacggtgaatcttatacagaagaggctgatgatggagaaacaggagagacaagagacgaaaaggaaaatctggccactctctttggagatatggaggacttaacagatgaagaagaagttcccgcatcacagtcaactgaaaatagggtcctccctgctcctgcccccaggcgagagaaaacgaatgaagagttgcaagaggaattaaggaatttgcaagagcaaatgaaggccttacaagagcagctaaaagtaacaacaattaaacagacagcaagcccagcccgtctgcaaaaatcccctgagaagtctccccggccacctcttaaggagaggagagttcagagaattcaggagtcaacatgcttttctgcggagcttgatgtccctgcgctaccaagaaccaagagggtggctcgaacaccaaaggcttcacctccagatcccaaaagctcatcttcaaggatgacaagtgcaccctcccaacccctacagacgatttctcggaacaaacctagtgggataactagaggtcaaattgtggggaccccaggaagttctggggaaacgactcaacccatctgtgtggaagccttctctggtctgcggctcaggcggcctcgagtatcctccacagaaatgaacaagaaaatgaccggccgaaaactgatcagactgtctcagatcaaggaaaagatggccagagagaagctggaagaaatagattgggtgacatttggggttatattgaagaaggttacgccacagagtgtgaatagtggaaaaaccttcagcatatggaaactgaatgatcttcgtgacctgacacaatgtgtgtccttgttcttatttggagaagttcacaaagcgctctggaagacggagcaggggactgtcgtagggatcctcaatgccaaccccatgaagcccaaggatggttcagaggaggtgtgtttatctatcgatcatcctcagaaggtcttaattatgggtgaagctcttgacctgggaacctgtaaagccaagaagaagaatggagagccgtgcacgcagactgtgaatttgcgtgactgtgagtactgtcagtaccatgtccaggctcagtacaagaagctcagcgcaaagcgtgcggatctgcagtccaccttctctggaggacgaattccaaagaagtttgcccgcagaggcaccagcctcaaagaacggctgtgccaagatggcttttactacggaggggtttcttctgcctcgtatgcagcttcaattgcagcagctgtggctcctaagaagaagattcaaaccactctgagtaatctggttgttaagggcacaaacttgatcatccaggaaacacggcaaaaactcggaataccccagaagagcctgtcttgctctgaggagttcaaggaactgatggacctgccgacgtgtggagccaggaacttaaaacaacatttagccaaagccacagcttcagggattatggggagcccaaaaccagccatcaagtccatctcggcctcagcactcttgaagcaacagaagcagcggatgttggagatgaggagaaggaaatcagaagaaatacagaagcgatttctgcagagctcaagtgaagttgagagcccagctgtgccatcttcatcaagacagccccctgctcagcctccacggacaggatccgagttccccaggctggagggagccccggccacaatgacgcccaagctggggcgaggtgtcttggaaggagatgatgttctcttttatgatgagtcaccaccaccaagaccaaaactgagtgctttagcagaagccaaaaagttagctgctatcaccaaattaagggcaaaaggccaggttcttacaaaaacaaacccaaacagcattaagaagaaacaaaaggaccctcaggacatcctggaggtgaaggaacgtgtagaaaaaaacaccatgttttcttctcaagctgaggatgaattggagcctgccaggaaaaaaaggagagaacaacttgcctatctggaatctgaggaatttcagaaaatcctaaaagcaaaatcaaaacacacaggcatcctgaaagaggccgaggctgagatgcaggagcgctactttgagccactggtgaaaaaagaacaaatggaagaaaagatgagaaacatcagagaagtgaagtgccgtgtcgtgacatgcaagacgtgcgcctatacccacttcaagctgctggagacctgcgtcagtgagcagcatgaataccactggcatgatggtgtgaagaggtttttcaaatgtccctgtggaaacagaagcatctccttggacagactcccgaacaagcactgcagtaactgtggcctctacaaatgggaacgggacggaatgctaaaggtatgccatttgcgtactaatttttgactccttttagtgacccatgctaataatgtggaaccatctcctattaaaatattttcatttttctaggaaaagactggtccaaagataggaggagaaactctgttaccaagaggagaagaacatgctaaatttctgaacagccttaaataacccgaacttcagacattttcccacagacttcctggcctcctgtgactctggaaagcaaaggattggctgtgtattgtccattgattcctgattgacgccgtcaaaaacaaatgcttgttaagcccataagctttgcctgcttactttctgccattgggttggtttgataccacatttaacattgacatttaagtggaaaaccaagttatcattgtcttttctaagctcagtgtggatgattgcattacttcattcactgaagtttttgcccaaaaattggaaggtaaacagagagctatgtttctgtatcttttggttatagagtgttcacttctttatcataacaaaattctagtgtttatacgaacacccagaggcaaaagaatttggcttaattctcactccaggtaagtagcttaacttctgggcttcagttttctcatctgtaaaatcaggaagattggactaagtgatcctgaaatgtattttttagcactggatttctacaaataataaaactttcccatctagataatgatgatcacatagtcttgatgtacggacattaaaagccagatttcttcattcaattctgttatctctgttttactctttgaaattgatcaagccactgaatcactttgcatttcagtttatatatatagagagaaagaaggtgtctgctcttacattattgtggagccctgtgatagaaatatgtaaaatctcatattattttttttttaatttttttattttttatgacagggtctcactatgtcaccctggctggagtgcagtagtgcgatcgcggcacactgcagccttggcttccctgggctcaagcagtcctcccacctcagtctcccaaatagctaggactacaggcgtgcgtgaccaagcccagctaatttttgcattttttgtagagatggggttttgccatgttgctcaggctggtctcaaactcctgagcactagcaatccacccacctctgtttccaaaaaaaaaaaaaaaatgaaaggtcaacccctatgcaaattaccacagcaaaggtttcattcaggagattcttccatctgggcaacctggttttccaaatatcatttgacctaagtgaatgttgatactagctaaagattgggtaaattggttgaattattgtattgaagcttgagctgtagctaaaagtaatttaggtttcccctaagatgttattatgttagggacataacacttttgggaggttgttgtgggagatggttgatttaggttttcaaaagctagaaataaaatttacatgccttagatttcataaaattctgctctaattgggtggaaggtgctgtatctaacttgtgttcctcctaaggttatgtcctaataactattcttttaggagtatacttctactttatagaaggttgcttttctttttaattttttctaacaaagaaaagaataaagtatttattaataagaaccagaaagcacttgaaactgatgtttttaatggctcatttagggtagatttatttatctcattaacttaaaacagctatgtgtatgaaataggtcacaacagaacttgaacaccaggttggtgtctgagcaatccctttcttatgggaaaaacaatgttcttgtttgaacagagggtatcattgcagtcagtattcacgtgtatattgttatataagttgtataatatgcttgtaaaggctgagggtgagctgtatctggatgcctttttacaatttgattttaacttttaaaataaatttaaaacataa

SEQ ID NO: 18172 - DNA, 4547 bp, Homo sapiens
  source 1..4547: mol_type = unassigned DNA
ggttggaattttggcgggttcagctgtgaacgaagaaggcgtcccggcatcggccaagattctacattgctcatctgggcatctgagcctccttcgaagtttcctgtcacaactgtcctcttgacagcatggatgaggaggaagacaatctgtctctgctgaccgcactgctggaagaaaatgagtcagccttggattgtaattcagaagaaaataacttcttgacgcgggaaaatggcgagcccgacgcatttgatgagctctttgatgccgacggcgacggtgaatcttatacagaagaggctgatgatggagaaacaggagagacaagagacgaaaaggaaaatctggccactctctttggagatatggaggacttaacagatgaagaagaagttcccgcatcacagtcaactgaaaatagggtcctccctgctcctgcccccaggcgagagaaaacgaatgaagagttgcaagaggaattaaggaatttgcaagagcaaatgaaggccttacaagagcagctaaaagtaacaacaattaaacagacagcaagcccagcccgtctgcaaaaatcccctgagaagtctccccggccacctcttaaggagaggagagttcagagaattcaggagtcaacatgcttttctgcggagcttgatgtccctgcgctaccaagaaccaagagggtggctcgaacaccaaaggcttcacctccagatcccaaaagctcatcttcaaggatgacaagtgcaccctcccaacccctacagacgatttctcggaacaaacctagtgggataactagaggtcaaattgtggggaccccaggaagttctggggaaacgactcaacccatctgtgtggaagccttctctggtctgcggctcaggcggcctcgagtatcctccacagaaatgaacaagaaaatgaccggccgaaaactgatcagactgtctcagatcaaggaaaagatggccagagagaagctggaagaaatagattgggtgacatttggggttatattgaagaaggttacgccacagagtgtgaatagtggaaaaaccttcagcatatggaaactgaatgatcttcgtgacctgacacaatgtgtgtccttgttcttatttggagaagttcacaaagcgctctggaagacggagcaggggactgtcgtagggatcctcaatgccaaccccatgaagcccaaggatggttcagaggaggtgtgtttatctatcgatcatcctcagaaggtcttaattatgggtgaagctcttgacctgggaacctgtaaagccaagaagaagaatggagagccgtgcacgcagactgtgaatttgcgtgactgtgagtactgtcagtaccatgtccaggctcagtacaagaagctcagcgcaaagcgtgcggatctgcagtccaccttctctggaggacgaattccaaagaagtttgcccgcagaggcaccagcctcaaagaacggctgtgccaagatggcttttactacggaggggtttcttctgcctcgtatgcagcttcaattgcagcagctgtggctcctaagaagaagattcaaaccactctgagtaatctggttgttaagggcacaaacttgatcatccaggaaacacggcaaaaactcggaataccccagaagagcctgtcttgctctgaggagttcaaggaactgatggacctgccgacgtgtggagccaggaacttaaaacaacatttagccaaagccacagcttcagggattatggggagcccaaaaccagccatcaagtccatctcggcctcagcactcttgaagcaacagaagcagcggatgttggagatgaggagaaggaaatcagaagaaatacagaagcgatttctgcagagctcaagtgaagttgagagcccagctgtgccatcttcatcaagacagccccctgctcagcctccacggacaggatccgagttccccaggctggagggagccccggccacaatgacgcccaagctggggcgaggtgtcttggaaggagatgatgttctcttttatgatgagtcaccaccaccaagaccaaaactgagtgctttagcagaagccaaaaagttagctgctatcaccaaattaagggcaaaaggccaggttcttacaaaaacaaacccaaacagcattaagaagaaacaaaaggaccctcaggacatcctggaggtgaaggaacgtgtagaaaaaaacaccatgttttcttctcaagctgaggatgaattggagcctgccaggaaaaaaaggagagaacaacttgcctatctggaatctgaggaatttcagaaaatcctaaaagcaaaatcaaaacacacaggcatcctgaaagaggccgaggctgagatgcaggagcgctactttgagccactggtgaaaaaagaacaaatggaagaaaagatgagaaacatcagagaagtgaagtgccgtgtcgtgacatgcaagacgtgcgcctatacccacttcaagctgctggagacctgcgtcagtgagcagcatgaataccactggcatgatggtgtgaagaggtttttcaaatgtccctgtggaaacagaagcatctccttggacagactcccgaacaagcactgcagtaactgtggcctctacaaatgggaacgggacggaatgctaaaggaaaagactggtccaaagataggaggagaaactctgttaccaagaggagaagaacatgctaaatttctgaacagccttaaataacccgaacttcagacattttcccacagacttcctggcctcctgtgactctggaaagcaaaggattggctgtgtattgtccattgattcctgattgacgccgtcaaaaacaaatgcttgttaagcccataagctttgcctgcttactttctgccattgggttggtttgataccacatttaacattgacatttaagtggaaaaccaagttatcattgtcttttctaagctcagtgtggatgattgcattacttcattcactgaagtttttgcccaaaaattggaaggtaaacagagagctatgtttctgtatcttttggttatagagtgttcacttctttatcataacaaaattctagtgtttatacgaacacccagaggcaaaagaatttggcttaattctcactccaggtaagtagcttaacttctgggcttcagttttctcatctgtaaaatcaggaagattggactaagtgatcctgaaatgtattttttagcactggatttctacaaataataaaactttcccatctagataatgatgatcacatagtcttgatgtacggacattaaaagccagatttcttcattcaattctgttatctctgttttactctttgaaattgatcaagccactgaatcactttgcatttcagtttatatatatagagagaaagaaggtgtctgctcttacattattgtggagccctgtgatagaaatatgtaaaatctcatattattttttttttaatttttttattttttatgacagggtctcactatgtcaccctggctggagtgcagtagtgcgatcgcggcacactgcagccttggcttccctgggctcaagcagtcctcccacctcagtctcccaaatagctaggactacaggcgtgcgtgaccaagcccagctaatttttgcattttttgtagagatggggttttgccatgttgctcaggctggtctcaaactcctgagcactagcaatccacccacctctgtttccaaaaaaaaaaaaaaaatgaaaggtcaacccctatgcaaattaccacagcaaaggtttcattcaggagattcttccatctgggcaacctggttttccaaatatcatttgacctaagtgaatgttgatactagctaaagattgggtaaattggttgaattattgtattgaagcttgagctgtagctaaaagtaatttaggtttcccctaagatgttattatgttagggacataacacttttgggaggttgttgtgggagatggttgatttaggttttcaaaagctagaaataaaatttacatgccttagatttcataaaattctgctctaattgggtggaaggtgctgtatctaacttgtgttcctcctaaggttatgtcctaataactattcttttaggagtatacttctactttatagaaggttgcttttctttttaattttttctaacaaagaaaagaataaagtatttattaataagaaccagaaagcacttgaaactgatgtttttaatggctcatttagggtagatttatttatctcattaacttaaaacagctatgtgtatgaaataggtcacaacagaacttgaacaccaggttggtgtctgagcaatccctttcttatgggaaaaacaatgttcttgtttgaacagagggtatcattgcagtcagtattcacgtgtatattgttatataagttgtataatatgcttgtaaaggctgagggtgagctgtatctggatgcctttttacaatttgattttaacttttaaaataaatttaaaacataa

SEQ ID NO: 18173 - DNA, 3158 bp, Homo sapiens
  source 1..3158: mol_type = unassigned DNA
gtgaacgaagaaggcgtcccggcatcgggccaagattctacattgctcatctgggcatctgagcctccttcgaagtttcctgtcacaactgtcctcttgacagcatggatgaggaggaagacaatctgtctctgctgaccgcactgctggaagaaaatgagtcagccttggattgtaattcagaagaaaataacttcttgacgcgggaaaatggcgagcccgacgcatttgatgagctctttgatgccgacggcgacggtgaatcttatacagaagaggctgatgatggagaaacaggagagacaagagacgaaaaggaaaatctggccactctctttggagatatggaggacttaacagatgaagaagaagttcccgcatcacagtcaactgaaaatagggtcctccctgctcctgcccccaggcgagagaaaacgaatgaagagttgcaagaggaattaaggaatttgcaagagcaaatgaaggccttacaagagcagctaaaagtaacaacaattaaacagacagcaagcccagcccgtctgcaaaaatcccctgtagagaagtctccccggccacctcttaaggagaggagagttcagagaattcaggagtcaacatgcttttctgcggagcttgatgtccctgcgctaccaagaaccaagagggtggctcgaacaccaaaggcttcacctccagatcccaaaagctcatcttcaaggatgacaagtgcaccctcccaacccctacagacgatttctcggaacaaacctagtgggataactagaggtcaaattgtggggaccccaggaagttctggggaaacgactcaacccatctgtgtggaagccttctctggtctgcggctcaggcggcctcgagtatcctccacagaaatgaacaagaaaatgaccggccgaaaactgatcagactgtctcagatcaaggaaaagatggccagagagaagctggaagaaatagattgggtgacatttggggttatattgaagaaggttacgccacagagtgtgaatagtggaaaaaccttcagcatatggaaactgaatgatcttcgtgacctgacacaatgtgtgtccttgttcttatttggagaagttcacaaagcgctctggaagacggagcaggggactgtcgtagggatcctcaatgccaaccccatgaagcccaaggatggttcagaggaggtgtgtttatctatcgatcatcctcagaaggtcttaattatgggtgaagctcttgacctgggaacctgtaaagccaagaagaagaatggagagccgtgcacgcagactgtgaatttgcgtgactgtgagtactgtcagtaccatgtccaggctcagtacaagaagctcagcgcaaagcgtgcggatctgcagtccaccttctctggaggacgaattccaaagaagtttgcccgcagaggcaccagcctcaaagaacggctgtgccaagatggcttttactacggaggggtttcttctgcctcgtatgcagcttcaattgcagcagctgtggctcctaagaagaagattcaaaccactctgagtaatctggttgttaagggcacaaacttgatcatccaggaaacacggcaaaaactcggaataccccagaagagcctgtcttgctctgaggagttcaaggaactgatggacctgccgacgtgtggagccaggaacttaaaacaacatttagccaaagccacagcttcagggattatggggagcccaaaaccagccatcaagtccatctcggcctcagcactcttgaagcaacagaagcagcggatgttggagatgaggagaaggaaatcagaagaaatacagaagcgatttctgcagagctcaagtgaagttgagagcccagctgtgccatcttcatcaagacagccccctgctcagcctccacggacaggatccgagttccccaggctggagggagccccggccacaatgacgcccaagctggggcgaggtgtcttggaaggagatgatgttctcttttatgatgagtcaccaccaccaagaccaaaactgagtgctttagcagaagccaaaaagttagctgctatcaccaaattaagggcaaaaggccaggttcttacaaaaacaaacccaaacagcattaagaagaaacaaaaggaccctcaggacatcctggaggtgaaggaacgtgtagaaaaaaacaccatgttttcttctcaagctgaggatgaattggagcctgccaggaaaaaaaggagagaacaacttgcctatctggaatctgaggaatttcagaaaatcctaaaagcaaaatcaaaacacacaggcatcctgaaagaggccgaggctgagatgcaggagcgctactttgagccactggtgaaaaaagaacaaatggaagaaaagatgagaaacatcagagaagtgaagtgccgtgtcgtgacatgcaagacgtgcgcctatacccacttcaagctgctggagacctgcgtcagtgagcagcatgaataccactggcatgatggtgtgaagaggtttttcaaatgtccctgtggaaacagaagcatctccttggacagactcccgaacaagcactgcagtaactgtggcctctacaaatgggaacgggacggaatgctaaaggaaaagactggtccaaagataggaggagaaactctgttaccaagaggagaagaacatgctaaatttctgaacagccttaaataacccgaacttcagacattttcccacagacttcctggcctcctgtgactctggaaagcaaaggattggctgtgtattgtccattgattcctgattgacgccgtcaaaaacaaatgcttgttaagcccataagctttgcctgcttactttctgccattgggttggtttgataccacatttaacattgacatttaagtggaaaaccaagttatcattgtcttttctaagctcagtgtggatgattgcattacttcattcactgaagtttttgcccaaaaattggaaggtaaacagagagctatgtttctgtatcttttggttatagagtgttcacttctttatcataacaaaattctagtgtttatacgaacacccagaggcaaaagaatttggcttaattctcactccaggtaagtagcttaacttctg

SEQ ID NO: 18174 - DNA, 3736 bp, Homo sapiens
  source 1..3736: mol_type = unassigned DNA
ggaaaaaagcgacttgtggcggtcgagcgtggcgcaggcgaatcctcggcactaagcaaatatggacctcgcggcggcagcggagccgggcgccggcagccagcacctggaggtccgcgacgaggtggccgagaagtgccagaaactgttcctggacttcttggaggagtttcagagcagcgatggagaaattaaatacttgcaattagcagaggaactgattcgtcctgagagaaacacattggttgtgagttttgtggacctggaacaatttaaccagcaactttccaccaccattcaagaggagttctatagagtttacccttacctgtgtcgggccttgaaaacattcgtcaaagaccgtaaagagatccctcttgccaaggatttttatgttgcattccaagacctgcctaccagacacaagattcgagagctcacctcatccagaattggtttgctcactcgcatcagtgggcaggtggtgcggactcacccagttcacccagagcttgtgagcggaacttttctgtgcttggactgtcagacagtgatcagggatgtagaacagcagttcaaatacacacagccaaacatctgccgaaatccagtttgtgccaacaggaggagattcttactggatacaaataaatcaagatttgttgattttcaaaaggttcgtattcaagagacccaagctgagcttcctcgagggagtatcccccgcagtttagaagtaattttaagggctgaagctgtggaatcagctcaagctggtgacaagtgtgactttacagggacactgattgttgtgcctgacgtctccaagcttagcacaccaggagcacgtgcagaaactaattcccgtgtcagtggtgttgatggatatgagacagaaggcattcgaggactccgggcccttggtgttagggacctttcttataggctggtctttcttgcctgctgtgttgcgccaaccaacccaaggtttggggggaaagagctcagagatgaggaacagacagctgagagcattaagaaccaaatgactgtgaaagaatgggagaaagtgtttgagatgagtcaagataaaaatctataccacaatctttgtaccagcctgttccctactatacatggcaatgatgaagtaaaacggggtgtcctgctgatgctctttggtggcgttccaaagacaacaggagaagggacctctcttcgaggggacataaatgtttgcattgttggtgacccaagtacagctaagagccaatttctcaagcacgtggaggagttcagccccagagctgtctacaccagtggtaaagcgtccagtgctgctggcttaacagcagctgttgtgagagatgaagaatctcatgagtttgtcattgaggctggagctttgatgttggctgataatggtgtgtgttgtattgatgaatttgataagatggacgtgcgggatcaagttgctattcatgaagctatggaacagcagaccatatccatcactaaagcaggagtgaaggctactctgaacgcccggacgtccattttggcagcagcaaacccaatcagtggacactatgacagatcaaaatcattgaaacagaatataaatttgtcagctcccatcatgtcccgattcgatctcttctttatccttgtggatgaatgtaatgaggttacagattatgccattgccaggcgcatagtagatttgcattcaagaattgaggaatcaattgatcgtgtctattccctcgatgatatcagaagatatcttctctttgcaagacagtttaaacccaagatttccaaagagtcagaggacttcattgtggagcaatataaacatctccgccagagagatggttctggagtgaccaagtcttcatggaggattacagtgcgacagcttgagagcatgattcgtctctctgaagctatggctcggatgcactgctgtgatgaggtccaacctaaacatgtgaaggaagctttccggttactgaataaatcaatcatccgtgtggaaacacctgatgtcaatctagatcaagaggaagagatccagatggaggtagatgagggtgctggtggcatcaatggtcatgctgacagccctgctcctgtgaacgggatcaatggctacaatgaagacataaatcaagagtctgctcccaaagcctccttaaggctgggcttctctgagtactgccgaatctctaaccttattgtgcttcacctcagaaaggtggaagaagaagaggacgagtcagcattaaagaggagcgagcttgttaactggtacttgaaggaaatcgaatcagagatagactctgaagaagaacttataaataaaaaaagaatcatagagaaagttattcatcgactcacacactatgatcatgttctaattgagctcacccaggctggattgaaaggctccacagagggaagtgagagctatgaagaagatccctacttggtagttaaccctaactacttgctcgaagattgagatagtgaaagtaactgaccagagctgaggaactgtggcacagcacctcgtggcctggagcctggctggagctctgctagggacagaagtgtttctggaagtgatgcttccaggatttgttttcagaaacaagaattgagttgatggtcctatgtgtcacattcatcacaggtttcataccaacacaggcttcagcacttcctttggtgtgtttcctgtcccagtgaagttggaaccaaataatgtgtagtctctataaccaatacctttgttttcatgtgtaagaaaaggcccattacttttaaggtatgtgctgtcctattgagcaaataactttttttcaattgccagctactgcttttattcatcaaaataaaataacttgttctgaagttgtctattggatttctttctactgtaccctgattattacttccatctacttctgaatgtgagactttccctttttgcttaacctggagtgaagaggtagaactgtggtattatggatgaggtttctatgagaaggagtcattagagaactcatatgaaagctagaggccttagagatgactttccaaggttaattccagttgtttttttttttttttaagtttataaaagtttattatacttttttaaaattactctttagtaatttattttacttctgtgtcctaagggtaatttctcaggattgttttcaaattgcttttttaggggaaataggtcatttgctatattacaagcaatccccaaattttatggtcttccaggaaaagttattaccgtttatgatactaacagttcctgagacttagctatgatcagtatgttcatgaggtggagcagttcctgtgttgcagcttttaacaacagatggcattcattaaatcacaaagtatgttaaaggtcacaaaagcaaaataactgtctgaggctaaggcccacgtgggacagtctaatacccatgagtactcaacttgccttgatgtctgagctttccagtgcaatgtgaatttgagcagccagaaatctattagtagaaagcaagacagattaatataggttaaaacaatgatttaaatatgtttctcccaataattatctctttccctggaatcaacttgtatgaaaccttgtcaaaatgtactccacaagtatgtacaattaagtattttaaaaataaatggcaaacattaaaaacaa

SEQ ID NO: 18175 - DNA, 2957 bp, Homo sapiens
  source 1..2957: mol_type = unassigned DNA
agtcccgtcagcttccggtagaagagctcggccacatcccggccgccactgtccccgcggactggcgggtggaaggactcagtgaaggatcctgcgacacaggctggccctgggcgcccctcccgcccggcccctccgccccttcccagccccaagggtctaggatacagtctttgtagatgagcgggtcccccttggaggacagaatgaagaattgggaaatcatggccgttctggagagtagacaagaagacggcgaaagtcgggcctgccccgccctgcggccccggaacaaaagaacgcgtgtgcgctggccctttaagagcgattctcctccgcccgcgccagctcggaccgcgggaaacccggcgcctgcactaccccgcccggagattcccttccgacgcccgcaccgcctccccgtcactcattctaggcccgcacggtgattggcttgcggctagcgggaggtgaagaaggccgccttgtccgattggcccgcacgcagtggcgccggtcacgtggggggcgacgtttcgcgccaatttcggttggccggccacagtccaccgcgcggagattctcagcttccccaggagcaagacctctgagcccgccaagcgcggccgcacggccctcggcagcgatggcactgaaggactacgcgctagagaaggaaaaggttaagaagttcttacaagagttctaccaggatgatgaactcgggaagaagcagttcaagtatgggaaccagttggttcggctggctcatcgggaacaggtggctctgtatgtggacctggacgacgtagccgaggatgaccccgagttggtggactcaatttgtgagaatgccaggcgctacgcgaagctctttgctgatgccgtacaagagctgctgcctcagtacaaggagagggaagtggtaaataaagatgtcctggacgtttacattgagcatcggctaatgatggagcagcggagtcgggaccctgggatggtccgaagcccccagaaccagtaccctgctgaactcatgcgcagatttgagctgtattttcaaggccctagcagcaacaagcctcgtgtgatccgggaagtgcgggctgactctgtggggaagttggtaactgtgcgtggaatcgtcactcgtgtctctgaagtcaaacccaagatggtggtggccacttacacttgtgaccagtgtggggcagagacctaccagccgatccagtctcccactttcatgcctctgatcatgtgcccaagccaggagtgccaaaccaaccgctcaggagggcggctgtatctgcagacacggggctccagattcatcaaattccaggagatgaagatgcaagaacatagtgatcaggtgcctgtgggaaatatccctcgtagtatcacggtgctggtagaaggagagaacacaaggattgcccagcctggagaccacgtcagcgtcactggtattttcttgccaatcctgcgcactgggttccgacaggtggtacagggtttactctcagaaacctacctggaagcccatcggattgtgaagatgaacaagagtgaggatgatgagtctggggctggagagctcaccagggaggagctgaggcaaattgcagaggaggatttctacgaaaagctggcagcttcaatcgccccagaaatatacgggcatgaagatgtgaagaaggcactgctgctcctgctagtcgggggtgtggaccagtctcctcgaggcatgaaaatccggggcaacatcaacatctgtctgatgggggatcctggtgtggccaagtctcagctcctgtcatacattgatcgactggcgcctcgcagccagtacacaacaggccggggctcctcaggagtggggcttacggcagctgtgctgagagactccgtgagtggagaactgaccttagagggtggggccctggtgctggctgaccagggtgtgtgctgcattgatgagttcgacaagatggctgaggccgaccgcacagccatccacgaggtcatggagcagcagaccatctccattgccaaggccggcattctcaccacactcaatgcccgctgctccatcctggctgccgccaaccctgcctacgggcgctacaaccctcgccgcagcctggagcagaacatacagctacctgctgcactgctctcccggtttgacctcctctggctgattcaggaccggcccgaccgagacaatgacctacggttggcccagcacatcacctatgtgcaccagcacagccggcagcccccctcccagtttgaacctctggacatgaagctcatgaggcgttacatagccatgtgccgcgagaagcagcccatggtgccagagtctctggctgactacatcacagcagcatacgtggagatgaggcgagaggcttgggctagtaaggatgccacctatacttctgcccggaccctgctggctatcctgcgcctttccactgctctggcacgtctgagaatggtggatgtggtggagaaagaagatgtgaatgaagccatcaggctaatggagatgtcaaaggactctcttctaggagacaaggggcagacagctaggactcagagaccagcagatgtgatatttgccaccgtccgtgaactggtctcagggggccgaagtgtccggttctctgaggcagagcagcgctgtgtatctcgtggcttcacacccgcccagttccaggcggctctggatgaatatgaggagctcaatgtctggcaggtcaatgcttcccggacacggatcacttttgtctgattccagcctgcttgcaaccctggggtcctcttgttccctgctggcctgccccttgggaaggggcagtgatgcctttgaggggaaggaggagcccctctttctcccatgctgcacttactccttttgctaataaaagtgtttgtagattgtc

SEQ ID NO: 18176 - DNA, 1968 bp, Homo sapiens
  source 1..1968: mol_type = unassigned DNA
agtcccgtcagcttccggtagaagagctcggccacatcccggccgccactgtccccgcggactggcgggtggaaggactcagtgaaggatcctgcgacacaggctggccctgggcgcccctcccgcccggcccctccgccccttcccagccccaagggtctaggatacagtctttgtagatgagcgggtcccccttggaggacagaatgaagaattgggaaatcatggccgttctggagagtagacaagaagacggcgaaagtcgggcctgccccgccctgcggccccggaacaaaagaacgcgtgtgcgctggccctttaagagcgattctcctccgcccgcgccagctcggaccgcgggaaacccggcgcctgcactaccccgcccggagattcccttccgacgcccgcaccgcctccccgtcactcattctaggcccgcacggtgattggcttgcggctagcgggaggtgaagaaggccgccttgtccgattggcccgcacgcagtggcgccggtcacgtggggggcgacgtttcgcgccaatttcggttggccggccacagtccaccgcgcggagattctcagcttccccaggagcaagacctctgagcccgccaagcgcggccgcacggccctcggcagcgatggcactgaaggactacgcgctagagaaggaaaaggttaagaagttcttacaagagttctaccaggatgatgaactcgggaagaagcagttcaagtatgggaaccagttggttcggctggctcatcgggaacaggtggctctgtatgtggacctggacgacgtagccgaggatgaccccgagttggtggactcaatttgtgagaatgccaggcgctacgcgaagctctttgctgatgccgtacaagagctgctgcctcagtacaaggagagggaagtggtaaataaagatgtcctggacgtttacattgagcatcggctaatgatggagcagcggagtcgggaccctgggatggtccgaagcccccagaaccagtaccctgctgaactcatgcgcagatttgagctgtattttcaaggccctagcagcaacaagcctcgtgtgatccgggaagtgcgggctgactctgtggggaagttggtaactgtgcgtggaatcgtcactcgtgtctctgaagtcaaacccaagatggtggtggccacttacacttgtgaccagtgtggggcagagacctaccagccgatccagtctcccactttcatgcctctgatcatgtgcccaagccaggagtgccaaaccaaccgctcaggagggcggctgtatctgcagacacggggctccagattcatcaaattccaggagatgaagatgcaagaacatagtgatcaggtgcctgtgggaaatatccctcgtagtatcacggtgctggtagaaggagagaacacaaggattgcccagcctggagaccacgtcagcgtcactggtattttcttgccaatcctgcgcactgggttccgacaggtggtacagggtttactctcagaaacctacctggaagcccatcggattgtgaagatgaacaagagtgaggatgatgagtctggggctggagagctcaccagggaggagctgaggcaaattgcagatgtgatatttgccaccgtccgtgaactggtctcagggggccgaagtgtccggttctctgaggcagagcagcgctgtgtatctcgtggcttcacacccgcccagttccaggcggctctggatgaatatgaggagctcaatgtctggcaggtcaatgcttcccggacacggatcacttttgtctgattccagcctgcttgcaaccctggggtcctcttgttccctgctggcctgccccttgggaaggggcagtgatgcctttgaggggaaggaggagcccctctttctcccatgctgcacttactccttttgctaataaaagtgtttgtagattgtca

SEQ ID NO: 18177 - DNA, 2900 bp, Homo sapiens
  source 1..2900: mol_type = unassigned DNA
agtgtcgtgtaaacagtgtccttccgcgcggcggccgcggagagagctgcggcccgggggggcgtgcctgggatccggagcttcgctcgggcccgggaaaggcggcagtgggctgggatcgcggtgtctctgggtgtgatggccaatggctggactggctcccgccctgggcggaggaatcccgagctgtgaagcggctggaatccgggcccatgtgcttctttgtttactaagagcggaagcgatggcgggagcgggggtggggtgcggtggcggggtgcggtggcggaggtcccggtgaaatcaggggctaaggggacccaaagaaggcgggggatcataggggtggaaagaaagctgagaaccttgagaccggagtgtgaggggccaacggggaagggcgctagaattttaaactaaagtagggaccggaattcccctggggagatgttggatggccctgtgcactgccacgggctctttattcttcgctggttagaaacagacttgtgaaaaagagttatgcccactttggggagacttcgaaaaggttaagaagttcttacaagagttctaccaggatgatgaactcgggaagaagcagttcaagtatgggaaccagttggttcggctggctcatcgggaacaggtggctctgtatgtggacctggacgacgtagccgaggatgaccccgagttggtggactcaatttgtgagaatgccaggcgctacgcgaagctctttgctgatgccgtacaagagctgctgcctcagtacaaggagagggaagtggtaaataaagatgtcctggacgtttacattgagcatcggctaatgatggagcagcggagtcgggaccctgggatggtccgaagcccccagaaccagtaccctgctgaactcatgcgcagattgtgagtggtctctgtcgggaaagatgtagggattggttctccaggatcttgtttgtgactgttttctccccttagtgagctgtattttcaaggccctagcagcaacaagcctcgtgtgatccgggaagtgcgggctgactctgtggggaagttggtaactgtgcgtggaatcgtcactcgtgtctctgaagtcaaacccaagatggtggtggccacttacacttgtgaccagtgtggggcagagacctaccagccgatccagtctcccactttcatgcctctgatcatgtgcccaagccaggagtgccaaaccaaccgctcaggagggcggctgtatctgcagacacggggctccagattcatcaaattccaggagatgaagatgcaagaacatagtgatcaggtgcctgtgggaaatatccctcgtagtatcacggtgctggtagaaggagagaacacaaggattgcccagcctggagaccacgtcagcgtcactggtattttcttgccaatcctgcgcactgggttccgacaggtggtacagggtttactctcagaaacctacctggaagcccatcggattgtgaagatgaacaagagtgaggatgatgagtctggggctggagagctcaccagggaggagctgaggcaaattgcagaggaggatttctacgaaaagctggcagcttcaatcgccccagaaatatacgggcatgaagatgtgaagaaggcactgctgctcctgctagtcgggggtgtggaccagtctcctcgaggcatgaaaatccggggcaacatcaacatctgtctgatgggggatcctggtgtggccaagtctcagctcctgtcatacattgatcgactggcgcctcgcagccagtacacaacaggccggggctcctcaggagtggggcttacggcagctgtgctgagagactccgtgagtggagaactgaccttagagggtggggccctggtgctggctgaccagggtgtgtgctgcattgatgagttcgacaagatggctgaggccgaccgcacagccatccacgaggtcatggagcagcagaccatctccattgccaaggccggcattctcaccacactcaatgcccgctgctccatcctggctgccgccaaccctgcctacgggcgctacaaccctcgccgcagcctggagcagaacatacagctacctgctgcactgctctcccggtttgacctcctctggctgattcaggaccggcccgaccgagacaatgacctacggttggcccagcacatcacctatgtgcaccagcacagccggcagcccccctcccagtttgaacctctggacatgaagctcatgaggcgttacatagccatgtgccgcgagaagcagcccatggtgccagagtctctggctgactacatcacagcagcatacgtggagatgaggcgagaggcttgggctagtaaggatgccacctatacttctgcccggaccctgctggctatcctgcgcctttccactgctctggcacgtctgagaatggtggatgtggtggagaaagaagatgtgaatgaagccatcaggctaatggagatgtcaaaggactctcttctaggagacaaggggcagacagctaggactcagagaccagcagatgtgatatttgccaccgtccgtgaactggtctcagggggccgaagtgtccggttctctgaggcagagcagcgctgtgtatctcgtggcttcacacccgcccagttccaggcggctctggatgaatatgaggagctcaatgtctggcaggtcaatgcttcccggacacggatcacttttgtctgattccagcctgcttgcaaccctggggtcctcttgttccctgctggcctgccccttgggaaggggcagtgatgcctttgaggggaaggaggagcccctctttctcccatgctgcacttactccttttgctaataaaagtgtttgtagattgtc

SEQ ID NO: 18178 - DNA, 2321 bp, Homo sapiens
  source 1..2321: mol_type = unassigned DNA
tcggttggccggccacagtccaccgcgcggagattctcagcttccccaggagcaagacctctgagcccgccaagcgcggccgcacggccctcggcagcgatggcactgaaggactacgcgctagagaaggaaaaggttaagaagttcttacaagagttctaccaggatgatgaactcgggaagaagcagttcaagtatgggaaccagttggttcggctggctcatcgggaacaggtggctctgtatgtggacctggacgacgtagcctcagtacaaggagagggaagtggtaaataaagatgtcctggacgtttacattgagcatcggctaatgatggagcagcggagtcgggaccctgggatggtccgaagcccccagaaccagtaccctgctgaactcatgcgcagatttgagctgtattttcaaggccctagcagcaacaagcctcgtgtgatccgggaagtgcgggctgactctgtggggaagttggtaactgtgcgtggaatcgtcactcgtgtctctgaagtcaaacccaagatggtggtggccacttacacttgtgaccagtgtggggcagagacctaccagccgatccagtctcccactttcatgcctctgatcatgtgcccaagccaggagtgccaaaccaaccgctcaggagggcggctgtatctgcagacacggggctccagattcatcaaattccaggagatgaagatgcaagaacatagtgatcaggtgcctgtgggaaatatccctcgtagtatcacggtgctggtagaaggagagaacacaaggattgcccagcctggagaccacgtcagcgtcactggtattttcttgccaatcctgcgcactgggttccgacaggtggtacagggtttactctcagaaacctacctggaagcccatcggattgtgaagatgaacaagagtgaggatgatgagtctggggctggagagctcaccagggaggagctgaggcaaattgcagaggaggatttctacgaaaagctggcagcttcaatcgccccagaaatatacgggcatgaagatgtgaagaaggcactgctgctcctgctagtcgggggtgtggaccagtctcctcgaggcatgaaaatccggggcaacatcaacatctgtctgatgggggatcctggtgtggccaagtctcagctcctgtcatacattgatcgactggcgcctcgcagccagtacacaacaggccggggctcctcaggagtggggcttacggcagctgtgctgagagactccgtgagtggagaactgaccttagagggtggggccctggtgctggctgaccagggtgtgtgctgcattgatgagttcgacaagatggctgaggccgaccgcacagccatccacgaggtcatggagcagcagaccatctccattgccaaggccggcattctcaccacactcaatgcccgctgctccatcctggctgccgccaaccctgcctacgggcgctacaaccctcgccgcagcctggagcagaacatacagctacctgctgcactgctctcccggtttgacctcctctggctgattcaggaccggcccgaccgagacaatgacctacggttggcccagcacatcacctatgtgcaccagcacagccggcagcccccctcccagtttgaacctctggacatgaagctcatgaggcgttacatagccatgtgccgcgagaagcagcccatggtgccagagtctctggctgactacatcacagcagcatacgtggagatgaggcgagaggcttgggctagtaaggatgccacctatacttctgcccggaccctgctggctatcctgcgcctttccactgctctggcacgtctgagaatggtggatgtggtggagaaagaagatgtgaatgaagccatcaggctaatggagatgtcaaaggactctcttctaggagacaaggggcagacagctaggactcagagaccagcagatgtgatatttgccaccgtccgtgaactggtctcagggggccgaagtgtccggttctctgaggcagagcagcgctgtgtatctcgtggcttcacacccgcccagttccaggcggctctggatgaatatgaggagctcaatgtctggcaggtcaatgcttcccggacacggatcacttttgtctgattccagcctgcttgcaaccctggggtcctcttgttccctgctggcctgccccttgggaaggggcagtgatgcctttgaggggaaggaggagcccctctttctcccatgctgcacttactccttttgctaataaaagtgtttgtagattgtc

SEQ ID NO: 18179 - DNA, 2122 bp, Homo sapiens
  source 1..2122: mol_type = unassigned DNA
atgaccccgagttggtggactcaatttgtgagaatgccaggcgctacgcgaagctctttgctgatgccgtactacaaggagagggaagtggtaaataaagatgtcctggacgtttacattgagcatcggctaatgatggagcagcggagtcgggaccctgggatggtccgaagcccccagaaccagtaccctgctgaactcatgcgcagatttgagctgtattttcaaggccctagcagcaacaagcctcgtgtgatccgggaagtgcgggctgactctgtggggaagttggtaactgtgcgtggaatcgtcactcgtgtctctgaagtcaaacccaagatggtggtggccacttacacttgtgaccagtgtggggcagagacctaccagccgatccagtctcccactttcatgcctctgatcatgtgcccaagccaggagtgccaaaccaaccgctcaggagggcggctgtatctgcagacacggggctccagattcatcaaattccaggagatgaagatgcaagaacatagtgatcaggtgcctgtgggaaatatccctcgtagtatcacggtgctggtagaaggagagaacacaaggattgcccagcctggagaccacgtcagcgtcactggtattttcttgccaatcctgcgcactgggttccgacaggtggtacagggtttactctcagaaacctacctggaagcccatcggattgtgaagatgaacaagagtgaggatgatgagtctggggctggagagctcaccagggaggagctgaggcaaattgcagaggaggatttctacgaaaagctggcagcttcaatcgccccagaaatatacgggcatgaagatgtgaagaaggcactgctgctcctgctagtcgggggtgtggaccagtctcctcgaggcatgaaaatccggggcaacatcaacatctgtctgatgggggatcctggtgtggccaagtctcagctcctgtcatacattgatcgactggcgcctcgcagccagtacacaacaggccggggctcctcaggagtggggcttacggcagctgtgctgagagactccgtgagtggagaactgaccttagagggtggggccctggtgctggctgaccagggtgtgtgctgcattgatgagttcgacaagatggctgaggccgaccgcacagccatccacgaggtcatggagcagcagaccatctccattgccaaggccggcattctcaccacactcaatgcccgctgctccatcctggctgccgccaaccctgcctacgggcgctacaaccctcgccgcagcctggagcagaacatacagctacctgctgcactgctctcccggtttgacctcctctggctgattcaggaccggcccgaccgagacaatgacctacggttggcccagcacatcacctatgtgcaccagcacagccggcagcccccctcccagtttgaacctctggacatgaagctcatgaggcgttacatagccatgtgccgcgagaagcagcccatggtgccagagtctctggctgactacatcacagcagcatacgtggagatgaggcgagaggcttgggctagtaaggatgccacctatacttctgcccggaccctgctggctatcctgcgcctttccactgctctggcacgtctgagaatggtggatgtggtggagaaagaagatgtgaatgaagccatcaggctaatggagatgtcaaaggactctcttctaggagacaaggggcagacagctaggactcagagaccagcagatgtgatatttgccaccgtccgtgaactggtctcagggggccgaagtgtccggttctctgaggcagagcagcgctgtgtatctcgtggcttcacacccgcccagttccaggcggctctggatgaatatgaggagctcaatgtctggcaggtcaatgcttcccggacacggatcacttttgtctgattccagcctgcttgcaaccctggggtcctcttgttccctgctggcctgccccttgggaaggggcagtgatgcctttgaggggaaggaggagcccctctttctcccatgctgcacttactccttttgctaataaaagtgtttgtagattgtc

SEQ ID NO: 18180 - DNA, 3442 bp, Homo sapiens
  source 1..3442: mol_type = unassigned DNA
agggagggagaatccggccggacagatctgcgcgtatcctggagccggcccagttgtgaactaggagagctttgggacctctgtcccaagcaagtaagaactttagccttaggagatgtaaataaagtagtatttgaagaagcacaggagagatgaatggagagtatagaggcagaggatttggacgaggaagatttcaaagctggaaaaggggaagaggtggtgggaacttctcaggaaaatggagagaaagagaacacagacctgatctgagtaaaaccacaggaaaacgtacttctgaacaaaccccacagtttttgctttcaacaaagaccccacagtcaatgcagtcaacattggatcgattcataccatataaaggctggaagctttatttctctgaagtttacagcgatagctctcctttgattgagaagattcaagcatttgaaaaatttttcacaaggcatattgatttgtatgacaaggatgaaatagaaagaaagggaagtattttggtagattttaaagaactgacagaaggtggtgaagtaactaacttgataccagatatagcaactgaactaagagatgcacctgagaaaaccttggcttgcatgggtttggcaatacatcaggtgttaactaaggaccttgaaaggcatgcagctgagttacaagcccaggaaggattgtctaatgatggagaaacaatggtaaatgtgccacatattcatgcaagggtgtacaactatgagcctttgacacagctcaagaatgtcagagcaaattactatggaaaatacattgctctaagagggacagtggttcgtgtcagtaatataaagcctctttgcaccaagatggcttttctttgtgctgcatgtggagaaattcagagctttcctcttccagatggaaaatacagtcttcccacaaagtgtcctgtgcctgtgtgtcgaggcaggtcatttactgctctccgcagctctcctctcacagttacgatggactggcagtcaatcaaaatccaggaattgatgtctgatgatcagagagaagcaggtcggattccacgaacaatagaatgtgagcttgttcatgatcttgtggatagctgtgtcccgggagacacagtgactattactggaattgtcaaagtctcaaatgcggaagaagcaaattctattagtaatagcaaaggacagaaaacaaagagttctgaggatgggtgtaagcatggaatgttgatggagttctcacttaaagacctttatgccatccaagagattcaagctgaagaaaacctgtttaaactcattgtcaactcgctttgccctgtcatttttggtcatgaacttgttaaagcaggtttggcattagcactctttggaggaagccagaaatacgcagatgacaaaaacagaattccaattcggggagacccccacatccttgttgttggagatccaggcctaggaaaaagtcaaatgctacaggcagcgtgcaatgttgccccacgtggcgtgtatgtttgtggtaacaccacgaccacctctggtctgacggtaactctttcaaaagatagttcctctggagattttgctttggaagctggtgccctggtacttggtgatcaaggtatttgtggaatcgatgaatttgataagatggggaatcaacatcaagccttgttggaagccatggagcagcaaagtattagtcttgctaaggctggtgtggtttgtagccttcctgcaagaacttccattattgctgctgcaaatccagttggaggacattacaataaagccaaaacagtttctgagaatttaaaaatggggagtgcactactatccagatttgatttggtctttatcctgttagatactccaaatgagcatcatgatcacttactctctgaacatgtgattgcaataagagctggaaagcagagaaccattagcagtgccacagtagctcgtatgaatagtcaagattcaaatacttccgtacttgaagtagtttctgagaagccattatcagaaagactaaaggtggttcctggagaaacaatagatcccattccccaccagctattgagaaagtacattggctatgctcggcagtatgtgtacccaaggctatccacagaagctgctcgagttcttcaagatttttaccttgagctccggaaacagagccagaggttaaatagctcaccaatcactaccaggcagctggaatctttgattcgtctgacagaggcacgagcaaggttggaattgagagaggaagcaaccaaagaagacgctgaggatatagtggaaattatgaaatatagcatgctaggaacttactctgatgaatttgggaacctagattttgagcgatcccagcatggttctggaatgagcaacaggtcaacagcgaaaagatttatttctgctctcaacaacgttgctgaaagaacttataataatatatttcaatttcatcaacttcggcagattgccaaagaactaaacattcaggttgctgattttgaaaattttattggatcactaaatgaccagggttacctcttgaaaaaaggcccaaaagtttaccagcttcaaactatgtaaaaggacttcaccaagttagggcctcctgggtttattgcagattaaagccatctcagtgaagatatgcgtgcacgcacagacagacagacacacacacacacacacacacacacacacacacacacacacacagtcaaatactgttctctgaaaaatgatgtcccaaaagtattataataggaaaaaagcattaaatataataaactaatttaagaagtgataaagtctccagatgcagtagctcacactgtaatcacagtgactcaggaggctgaggtgagaggattccttgaggccagggttcgagaccaaccttgggcaacatagcaagaccccatttcttaaaaaaaaaaaaaaaaaatttaaacttagctgggtatggtggcacatgcctatagtctcagctacttgtgaggctgaggcaggaggattctttgagcccaggagtttgaggttacagtgagccacaatcacaccaatcactgcactccagcctgggcaataaagtaactcttgactcaaaaaaataaaaaaaattgtagtggtagccatgtgttaattgttaaataaattctccaaagggctaaaagtaaattacttataaattttttatagttgtatttttgacctgccttttatatgtatgaatatttcatagttttgcatatcagatgtaggcatacagacaaatacataaaccaatgaatatattacatattctgtgttccaataaaactttatttatggacactaaaatttgaatttcataaaattttcccatgtcaagaatacaaaatacttgagttttgttttta

SEQ ID NO: 18181 - DNA, 3549 bp, Homo sapiens
  source 1..3549: mol_type = unassigned DNA
ctttgagcggaagttggatcactgaagcgccaaaaaagaatttaggggaagacctgattttcgcttgaggcatttttgcggcgctgtgcgctacagacaccttctggaagctgcggtggggaaactgagtttcccgagccgttgagacagatggggttcagcaccgcgcggggacgacaggaaagctgcggctgaagagaactgcggacttggcaggagtcgcctgaggagctaagatcccggagactcttagccccgtggtgcttctctacgggagggagggagggagaatccggccggacagatctgcgcgtatcctggagccggcccagttgtgaactaggagagctttgggacctctgtcccaagcaagagagatgaatggagagtatagaggcagaggatttggacgaggaagatttcaaagctggaaaaggggaagaggtggtgggaacttctcaggaaaatggagagaaagagaacacagacctgatctgagtaaaaccacaggaaaacgtacttctgaacaaaccccacagtttttgctttcaacaaagaccccacagtcaatgcagtcaacattggatcgattcataccatataaaggctggaagctttatttctctgaagtttacagcgatagctctcctttgattgagaagattcaagcatttgaaaaatttttcacaaggcatattgatttgtatgacaaggatgaaatagaaagaaagggaagtattttggtagattttaaagaactgacagaaggtggtgaagtaactaacttgataccagatatagcaactgaactaagagatgcacctgagaaaaccttggcttgcatgggtttggcaatacatcaggtgttaactaaggaccttgaaaggcatgcagctgagttacaagcccaggaaggattgtctaatgatggagaaacaatggtaaatgtgccacatattcatgcaagggtgtacaactatgagcctttgacacagctcaagaatgtcagagcaaattactatggaaaatacattgctctaagagggacagtggttcgtgtcagtaatataaagcctctttgcaccaagatggcttttctttgtgctgcatgtggagaaattcagagctttcctcttccagatggaaaatacagtcttcccacaaagtgtcctgtgcctgtgtgtcgaggcaggtcatttactgctctccgcagctctcctctcacagttacgatggactggcagtcaatcaaaatccaggaattgatgtctgatgatcagagagaagcaggtcggattccacgaacaatagaatgtgagcttgttcatgatcttgtggatagctgtgtcccgggagacacagtgactattactggaattgtcaaagtctcaaatgcggaagaaggttctcgaaataagaatgacaagtgtatgttccttttgtatattgaagcaaattctattagtaatagcaaaggacagaaaacaaagagttctgaggatgggtgtaagcatggaatgttgatggagttctcacttaaagacctttatgccatccaagagattcaagctgaagaaaacctgtttaaactcattgtcaactcgctttgccctgtcatttttggtcatgaagcagcgtgcaatgttgccccacgtggcgtgtatgtttgtggtaacaccacgaccacctctggtctgacggtaactctttcaaaagatagttcctctggagattttgctttggaagctggtgccctggtacttggtgatcaaggtatttgtggaatcgatgaatttgataagatggggaatcaacatcaagccttgttggaagccatggagcagcaaagtattagtcttgctaaggctggtgtggtttgtagccttcctgcaagaacttccattattgctgctgcaaatccagttggaggacattacaataaagccaaaacagtttctgagaatttaaaaatggggagtgcactactatccagatttgatttggtctttatcctgttagatactccaaatgagcatcatgatcacttactctctgaacatgtgattgcaataagagctggaaagcagagaaccattagcagtgccacagtagctcgtatgaatagtcaagattcaaatacttccgtacttgaagtagtttctgagaagccattatcagaaagactaaaggtggttcctggagaaacaatagatcccattccccaccagctattgagaaagtacattggctatgctcggcagtatgtgtacccaaggctatccacagaagctgctcgagttcttcaagatttttaccttgagctccggaaacagagccagaggttaaatagctcaccaatcactaccaggcagctggaatctttgattcgtctgacagaggcacgagcaaggttggaattgagagaggaagcaaccaaagaagacgctgaggatatagtggaaattatgaaatatagcatgctaggaacttactctgatgaatttgggaacctagattttgagcgatcccagcatggttctggaatgagcaacaggtcaacagcgaaaagatttatttctgctctcaacaacgttgctgaaagaacttataataatatatttcaatttcatcaacttcggcagattgccaaagaactaaacattcaggttgctgattttgaaaattttattggatcactaaatgaccagggttacctcttgaaaaaaggcccaaaagtttaccagcttcaaactatgtaaaaggacttcaccaagttagggcctcctgggtttattgcagattaaagccatctcagtgaagatatgcgtgcacgcacagacagacagacacacacacacacacacacacacacacacacacacacacacacagtcaaatactgttctctgaaaaatgatgtcccaaaagtattataataggaaaaaagcattaaatataataaactaatttaagaagtgataaagtctccagatgcagtagctcacactgtaatcacagtgactcaggaggctgaggtgagaggattccttgaggccagggttcgagaccaaccttgggcaacatagcaagaccccatttcttaaaaaaaaaaaaaaaaaatttaaacttagctgggtatggtggcacatgcctatagtctcagctacttgtgaggctgaggcaggaggattctttgagcccaggagtttgaggttacagtgagccacaatcacaccaatcactgcactccagcctgggcaataaagtaactcttgactcaaaaaaataaaaaaaattgtagtggtagccatgtgttaattgttaaataaattctccaaagggctaaaagtaaattacttataaattttttatagttgtatttttgacctgccttttatatgtatgaatatttcatagttttgcatatcagatgtaggcatacagacaaatacataaaccaatgaatatattacatattctgtgttccaataaaactttatttatggacactaaaatttgaatttcataaaattttcccatgtcaagaat

SEQ ID NO: 18182 - DNA, 2859 bp, Homo sapiens
  source 1..2859: mol_type = unassigned DNA
aactgcggacttggcaggagtcgcctgaggagctaagatcccggagactcttagccccgtggtgcttctctacgggagggagggagggagaatccggccggacagatctgcgcgtatcctggagccggcccagttgtgaactaggagagctttgggacctctgtcccaagcaagagagatgaatggagagtatagaggcagaggatttggacgaggaagatttcaaagctggaaaaggggaagaggtggtgggaacttctcaggaaaatggagagaaagagaacacagacctgatctgagtaaaaccacaggaaaacgtacttctgaacaaaccccacagtttttgctttcaacaaagaccccacagtcaatgcagtcaacattggatcgattcataccatataaaggctggaagctttatttctctgaagtttacagcgatagctctcctttgattgagaagattcaagcatttgaaaaatttttcacaaggcatattgatttgtatgacaaggatgaaatagaaagaaagggaagtattttggtagattttaaagaactgacagaaggtggtgaagtaactaacttgataccagatatagcaactgaactaagagatgcacctgagaaaaccttggcttgcatgggtttggcaatacatcaggtgttaactaaggaccttgaaaggcatgcagctgagttacaagcccaggaaggattgtctaatgatggagaaacaatggtaaatgtgccacatattcatgcaagggtgtacaactatgagcctttgacacagctcaagaatgtcagagcaaattactatggaaaatacattgctctaagagggacagtggttcgtgtcagtaatataaagcctctttgcaccaagatggcttttctttgtgctgcatgtggagaaattcagagctttcctcttccagatggaaaatacagtcttcccacaaagtgtcctgtgcctgtgtgtcgaggcaggtcatttactgctctccgcagctctcctctcacagttacgatggactggcagtcaatcaaaatccaggaattgatgtctgatgatcagagagaagcaggtcggattccacgaacaatagaatgtgagcttgttcatgatcttgtggatagctgtgtcccgggagacacagtgactattactggaattgtcaaagtctcaaatgcggaagaaggttctcgaaataagaatgacaagtgtatgttccttttgtatattgaagcaaattctattagtaatagcaaaggacagaaaacaaagagttctgaggatgggtgtaagcatggaatgttgatggagttctcacttaaagacctttatgccatccaagagattcaagctgaagaaaacctgtttaaactcattgtcaaatggagtcttgctctgtcgcccaggctagagtacagtggtgcgatctcagctcactgcaacctccacctcccaagttcaaacagttctcccacctcagcctgccgagtagctgggactacaggcatgcgccaccagacccagctacttttgcttgttaaagcaggtttggcattagcactctttggaggaagccagaaatacgcagatgacaaaaacagaattccaattcggggagacccccacatccttgttgttggagatccaggcctaggaaaaagtcaaatgctacaggcagcgtgcaatgttgccccacgtggcgtgtatgtttgtggtaacaccacgaccacctctggtctgacggtaactctttcaaaagatagttcctctggagattttgctttggaagctggtgccctggtacttggtgatcaaggtatttgtggaatcgatgaatttgataagatggggaatcaacatcaagccttgttggaagccatggagcagcaaagtattagtcttgctaaggctggtgtggtttgtagccttcctgcaagaacttccattattgctgctgcaaatccagttggaggacattacaataaagccaaaacagtttctgagaatttaaaaatggggagtgcactactatccagatttgatttggtctttatcctgttagatactccaaatgagcatcatgatcacttactctctgaacatgtgattgcaataagagctggaaagcagagaaccattagcagtgccacagtagctcgtatgaatagtcaagattcaaatacttccgtacttgaagtagtttctgagaagccattatcagaaagactaaaggtggttcctggagaaacaatagatcccattccccaccagctattgagaaagtacattggctatgctcggcagtatgtgtacccaaggctatccacagaagctgctcgagttcttcaagatttttaccttgagctccggaaacagagccagaggttaaatagctcaccaatcactaccaggcagctggaatctttgattcgtctgacagaggcacgagcaaggttggaattgagagaggaagcaaccaaagaagacgctgaggatatagtggaaattatgaaatatagcatgctaggaacttactctgatgaatttgggaacctagattttgagcgatcccagcatggttctggaatgagcaacaggtcaacagcgaaaagatttatttctgctctcaacaacgttgctgaaagaacttataataatatatttcaatttcatcaacttcggcagattgccaaagaactaaacattcaggttgctgattttgaaaattttattggatcactaaatgaccagggttacctcttgaaaaaaggcccaaaagtttaccagcttcaaactatgtaaaaggacttcaccaagttagggcctcctgggtttattgc

SEQ ID NO: 18183 - DNA, 3715 bp, Homo sapiens
  source 1..3715: mol_type = unassigned DNA
ctttgagcggaagttggatcactgaagcgccaaaaaagaatttaggggaagacctgattttcgcttgaggcatttttgcggcgctgtgcgctacagacaccttctggaagctgcggtggggaaactgagtttcccgagccgttgagacagatggggttcagcaccgcgcggggacgacaggaaagctgcggctgaagagaactgcggacttggcaggagtcgcctgaggagctaagatcccggagactcttagccccgtggtgcttctctacgggagggagggagggagaatccggccggacagatctgcgcgtatcctggagccggcccagttgtgaactaggagagctttgggacctctgtcccaagcaagagagatgaatggagagtatagaggcagaggatttggacgaggaagatttcaaagctggaaaaggggaagaggtggtgggaacttctcaggaaaatggagagaaagagaacacagacctgatctgagtaaaaccacaggaaaacgtacttctgaacaaaccccacagtttttgctttcaacaaagaccccacagtcaatgcagtcaacattggatcgattcataccatataaaggctggaagctttatttctctgaagtttacagcgatagctctcctttgattgagaagattcaagcatttgaaaaatttttcacaaggcatattgatttgtatgacaaggatgaaatagaaagaaagggaagtattttggtagattttaaagaactgacagaaggtggtgaagtaactaacttgataccagatatagcaactgaactaagagatgcacctgagaaaaccttggcttgcatgggtttggcaatacatcaggtgttaactaaggaccttgaaaggcatgcagctgagttacaagcccaggaaggattgtctaatgatggagaaacaatggtaaatgtgccacatattcatgcaagggtgtacaactatgagcctttgacacagctcaagaatgtcagagcaaattactatggaaaatacattgctctaagagggacagtggttcgtgtcagtaatataaagcctctttgcaccaagatggcttttctttgtgctgcatgtggagaaattcagagctttcctcttccagatggaaaatacagtcttcccacaaagtgtcctgtgcctgtgtgtcgaggcaggtcatttactgctctccgcagctctcctctcacagttacgatggactggcagtcaatcaaaatccaggaattgatgtctgatgatcagagagaagcaggtcggattccacgaacaatagaatgtgagcttgttcatgatcttgtggatagctgtgtcccgggagacacagtgactattactggaattgtcaaagtctcaaatgcggaagaaggttctcgaaataagaatgacaagtgtatgttccttttgtatattgaagcaaattctattagtaatagcaaaggacagaaaacaaagagttctgaggatgggtgtaagcatggaatgttgatggagttctcacttaaagacctttatgccatccaagagattcaagctgaagaaaacctgtttaaactcattgtcaactcgctttgccctgtcatttttggtcatgaacttgttaaagcaggtttggcattagcactctttggaggaagccagaaatacgcagatgacaaaaacagaattccaattcggggagacccccacatccttgttgttggagatccaggcctaggaaaaagtcaaatgctacaggcagcgtgcaatgttgccccacgtggcgtgtatgtttgtggtaacaccacgaccacctctggtctgacggtaactctttcaaaagatagttcctctggagattttgctttggaagctggtgccctggtacttggtgatcaaggtatttgtggaatcgatgaatttgataagatggggaatcaacatcaagccttgttggaagccatggagcagcaaagtattagtcttgctaaggctggtgtggtttgtagccttcctgcaagaacttccattattgctgctgcaaatccagttggaggacattacaataaagccaaaacagtttctgagaatttaaaaatggggagtgcactactatccagatttgatttggtctttatcctgttagatactccaaatgagcatcatgatcacttactctctgaacatgtgattgcaataagagctggaaagcagagaaccattagcagtgccacagtagctcgtatgaatagtcaagattcaaatacttccgtacttgaagtagtttctgagaagccattatcagaaagactaaaggtggttcctggagaaacaatagatcccattccccaccagctattgagaaagtacattggctatgctcggcagtatgtgtacccaaggctatccacagaagctgctcgagttcttcaagatttttaccttgagctccggaaacagagccagaggttaaatagctcaccaatcactaccaggcagctggaatctttgattcgtctgacagaggcacgagcaaggttggaattgagagaggaagcaaccaaagaagacgctgaggatatagtggaaattatgaaatatagcatgctaggaacttactctgatgaatttgggaacctagattttgagcgatcccagcatggttctggaatgagcaacaggtcaacagcgaaaagatttatttctgctctcaacaacgttgctgaaagaacttataataatatatttcaatttcatcaacttcggcagattgccaaagaactaaacattcaggttgctgattttgaaaattttattggatcactaaatgaccagggttacctcttgaaaaaaggcccaaaagtttaccagcttcaaactatgtaaaaggacttcaccaagttagggcctcctgggtttattgcagattaaagccatctcagtgaagatatgcgtgcacgcacagacagacagacacacacacacacacacacacacacacacacacacacacacacagtcaaatactgttctctgaaaaatgatgtcccaaaagtattataataggaaaaaagcattaaatataataaactaatttaagaagtgataaagtctccagatgcagtagctcacactgtaatcacagtgactcaggaggctgaggtgagaggattccttgaggccagggttcgagaccaaccttgggcaacatagcaagaccccatttcttaaaaaaaaaaaaaaaaaatttaaacttagctgggtatggtggcacatgcctatagtctcagctacttgtgaggctgaggcaggaggattctttgagcccaggagtttgaggttacagtgagccacaatcacaccaatcactgcactccagcctgggcaataaagtaactcttgactcaaaaaaataaaaaaaattgtagtggtagccatgtgttaattgttaaataaattctccaaagggctaaaagtaaattacttataaattttttatagttgtatttttgacctgccttttatatgtatgaatatttcatagttttgcatatcagatgtaggcatacagacaaatacataaaccaatgaatatattacatattctgtgttccaataaaactttatttatggacactaaaatttgaatttcataaaattttcccatgtcaagaatacaaaatacttgagttttgttttta

SEQ ID NO: 18184 - DNA, 1181 bp, Homo sapiens
  source 1..1181: mol_type = unassigned DNA
gcggcgctgtgcgctacagacaccttctggaagctgcggtggggaaactgagtttcccgagccgttgagacagatggggttcagcaccgcgcggggacgacaggaaagctgcggctgaagagaactgcggacttggcaggagtcgcctgaggagctaagatcccggagactcttagccccgtggtgcttctctacgggagggagggagggagaatccggccggacagatctgcgcgtatcctggagccggcccagttgtgaactaggagagctttgggacctctgtcccaagcaagagagatgaatggagagtatagaggcagaggatttggacgaggaagatttcaaagctggaaaaggggaagaggtggtgggaacttctcaggaaaatggagagaaagagaacacagacctgatctgagtaaaaccacaggaaaacgtacttctgaacaaaccccacagtttttgctttcaacaaagaccccacagtcaatgcagtcaacattggatcgattcataccatataaaggctggaagctttatttctctgaagtttacagcgatagctctcctttgattgagaagattcaagcatttgaaaaatttttcacaaggcatattgatttgtatgacaaggatgaaatagaaagaaagggaagtattttggtagattttaaagaactgacagaaggtggtgaagtaactaacttgataccagatatagcaactgaactaagagatgcacctgagaaaaccttggcttgcatgggtttggcaatacatcaggtgttaactaaggaccttgaaaggcatgcagctgagttacaagcccaggaaggattgtctaatgatggagaaacaatggtaaatgtgccacatattcatttcttaaaaaaaaaaaaaaaaatttaaacttagctgggtatggtggcacatgcctatagtctcagctacttgtgaggctgaggcaggaggattctttgagcccaggagtttgaggttacagtgagccacaatcacaccaatcactgcactccagcctgggcaataaagtaactcttgactcaaaaaaataaaaaaaattgtagtggtagccatgtgttaattgttaaataaattctccaaagggctaaaagtaaattacttataaattttttatagttgtatttttgacctgcctt

SEQ ID NO: 18185 - DNA, 7185 bp, Homo sapiens
  source 1..7185: mol_type = unassigned DNA
cgccccgctcctccgccggatcgtctgtgggtgagtctcgagccaggaggctctgagccagtggcgattggctgacgcggtggctgcgcactcggcctgagaaactcggcaagcgcgcagtgtcgactccccggtctatgccaggcgcatctcagagtttggcttagagattaaagctccttctatcttgtgatgccaccatcgcaaggttctcaaggttgttgtgggagaagagaaggctaaaggagctcatagaatgcctttaatgctaatccaaaagtaaatgagaaacttagaaaaagattgccaattccaaatcaacatatttagagaaaattggaaaaggagaagcttactacagctttatttgaggactttttaaagaacgctgggttctatctgtgagctgcaaatcttggagcaaaaaccagagacattgccagagcaaacaagaacagaaatacaaatggagaactggtcaaaagacataacccacagttatcttgaacaagaaactacggggataaataaaagtacgcagccagatgagcaactgactatgaattctgagaaaagtatgcatcggaaatccactgaattagttaatgaaataacatgtgagaacacagaatggccagggcagagatcaacgaattttcagatcatcagttcttatccagatgatgagtctgtttactgcactactgaaaaatacaacgttatggaacatagacataatgatatgcattatgaatgtatgactccttgtcaagttacttcagactcagataaagagaagacaatagcatttcttctaaaagaattggatattctcagaacaagcaataaaaagcttcagcagaaattggctaaagaagataaagaacagagaaaactaaagtttaagctggaactccaagagaaagaaacagaagctaaaattgctgaaaagacagcagctctggttgaagaagtgtattttgcgcagaaggaacgtgatgaagctgttatgtctagactgcaattagccattgaggagagagatgaagcaattgcacgagccaagcatatggaaatgtctctaaaagtgctagaaaatattaaccctgaagaaaatgacatgacattacaggaattactgaacagaataaacaatgcagacacagggatagctattcagaagaatggagctataattgtggatagaatctacaagaccaaggaatgtaaaatgagaataactgcagaagaaatgagtgcactaatagaagaacgggatgctgccttgtctaagtgcaaacggttagagcaggagcttcatcatgtgaaagagcagaaccagacttcagcaaacaacatgagacatctgactgctgaaaacaatcaagaacgtgctctgaaggcaaagttgttatctatgcaacaagccagagaaactgcagttcaacagtacaaaaaactggaagaggaaatccagacccttcgagtttactacagtttacacaaatctttatctcaagaagaaaatctgaaggatcagtttaactatacccttagtacatatgaagaagctttaaaaaacagagagaacattgtttccatcactcaacaacaaaatgaggaactggctactcaactgcaacaagctctgacagagcgagcaaatatggaattacaacttcaacatgccagagaggcctcccaagtggccaatgaaaaagttcaaaagttggaaaggctggtggatgtactgaggaagaaggttggaaccgggaccatgaggacagtgatctgattgaaaaaaaacgacagtctggggaagcgatcacatctggtgaccaggctgcttcattcaacactgtgtaaacaccaaagccttaacttagcaaacagttgttagaagtgggacactccaaccacattccaagctgagataaaatcaaatcacaaatgtttaaccactttgctgctgacttgagttatttatccaaatatattaactatagacttttaccaatgggtagctataaggttacagcttattttgtaactattttatatctcaatatctttaatataaatctttttactgagagatcattatagaaacatgttaaagttggttaggatcatatcttcacatatggccctttctgaatcaaagtgcggcaaagtaaatattgtctaagctttaatccactgtgttaggtcaaaacttcaaatacatgcatttttcaatatagggtatatttcttaactgatgagagaggcttagacatgagtgtgtagtcttccttcaatgcgtgtatgtaatctttgttagtataaaagatattaaatataggtgccaagaattaaatgtataatttgtttaataagagatggatatattaaaattacattcatcaaggcatgatttttgtttcactacaaataatgcaaactgttttcaataaaaagaggagactgttaatgtgtacttataaattcacattgtcagtattttttaatattgggtctgaataattatctgaattctacttaagctataagtctctgtcatttttgcttgaaaattagcatgcctctgtcttaaaagagaccatcaaacctattaagtattcttattgtttatctttttttaattgccatttgatttttattgtggaggaggaggatctaatatataatattcaatacaattgtaatgtagaaatataagaatttagaaaaaagtaaacttgccatttggttaaggttacctgctttttattttattccagaaataagatagttacagcatagcagtcatatgaagttatgaatagaactgagatttttatgtaattagttataggcaaaatactttcatatttttagattagacagacgaaagaccaagaggaaatgactgtgcctggaacaggatgaaatagacaagtagagatttaattagcaaaaattttgtagggaagtaaaattttttctaagtctatacgtttttaattcatctttaagattgagctaaattatctaccattgcctatttacaggataagtacattcaggacaatttattgtaccattctttcatataccatagcagattatccatttcaatttttttttactccacaggaaaatgtaagctactttgtcatagatcacaaaagaatcataatgctaacaaactctatttcttccttattaaatctgtatccattaaagtaacttttttaactatgagaattagaaaataagggacaacaggggttaaaaataaactgatttaatttgctctatagtcctaaagagaattatatcctctcatagaccaatgactctataatagagaaatatgtaatgatttggtcatgcatggagtcttgtctctgggctctatttgaaacgtgtaacagctccctatgtgaagaaacattatctttaaagtcatctgggaggtgcaggtaagtaaagagaaacaatttttgtcacaaagtagtccattcctgatctcacttaaaataaatcacaagtaaatttgaattttcggtttaatgttgaaagcagatgaacttttcttgagttattttgtcttttagaatacacaaaatatagtataaagacatttcacaatttccaaacaaatctttctacgcttaaatgatcaaattagaaaaaccaattcctataattaatatgcagaacttttatagaatatgatattataaagttaaatttgcaaaataattctaacatccactattgttcagtataggtaatctcccaaaaatatcacatcctcttgaaaatgaattgtctacaaaatttcaaatgcaaagtattacagccaaatattatcttaattaatttcttacacttaaaagtgtccatcaacagtgtgtcagatggtctttatatattttttctgtatgaaggaatagccttgcctactgaagataggttctctatgtattcaacaataatgcaactttagaagtattccacactgctgagaaatgttgctttgagtttgctttacacatcatcaactctaaatcctatagtaacatgagaattcacttcttcttgtaaaaataagtaatttacaggaaaggcaaaatgctaatactaacatttgtagcacttgatgatttacaaagtccttttacatctgttttttcatttgatcctatcgacaatcataataataataaattatatatataacccatataataacgatggtgatgataattttagtattactgtcattataattattattatattcattctacagatgaggaaacagactcagtaagccttggaatttgccaaggactggctaggacctagaactaagatcttataaccacactccatgcaactatgagtctctaaatctctctgtaagaaaaaaatttcaaagtaaagattttactcttgcaatttctgttgtgatagtaccatctctttcacatactacatacaaattccctaataatcaaaagattgtacacatttttttcaatgaagtacaataatgtgaactgcatgtgtaaacagcatcacattattaccacctctctatggtattatagtggcagtatgctttgcctcagccttcactaattaggaatattgtgacaattcattgctaataaaacataacatgagtctctttgtactgtttttaatttggcctgatgctaaaacctatcagcttagttttttaacatggtagtctaaacttcaaggcttgctctatctcctagagcaatttagagctaaaaccagtaataagcaaagttattggttataagcaaggtataagcagttaaagcaaagttattaattattaatatatgagaatttaaaattttataaataagttagaaattattaatgtattttaaatatggagtaaaatattttgctaatttttttcaatgataaagttgatcctttgtatatttccttattcaaataaattcagtcatcttcttatcaggttgcttatttatataatttgtttattttattaaaaatctagaatattaaagatttatacttttaatattgaatatagtttcgtagaaaaacattttatatgtactattcttaaagatcacaattatttttaaactttctattttcaaatacttgtgattaataaggcattctatgatgaaatagccatggcttatatatttttgtcttttcacatatgatgtgtttggaacccaaattttttactgattttattgtgttgttggtaactagtatttacagctaacctatctattcatattttacatatatatatatatatatacatgcacacacaccgatacatttaccttttaaaaaaatgatttataagtgaactgttaggctccagtgatttcagtgttttgttcatgttttattggaaatgcacgtggtttcttaggcttttaaacaaatacatggaatggttgaaagatttattttgctcgtgcttagctaaatatgtcatctctagaaaagatgtggtttgttttggcactgttttaaaaactcaaatattttaaacatttgttaagttggagcttgcacatttaaaccagcagcatacgttccagaagagcatctcaagttaccaaattttttgtaatccttttactagaaaaatcttttttgaagagtttttcttgtgcttgcttcggcagcatatatactgaaattagaaaaagaaaacttttcttttttattatatattttagtgtaagttaagttaaacttctaaaagttgaattatttaatgtaggacttcataaatagtatttgacaatgataaatgtgtatttttgagaatcattaaaatgtatacaatgatattcctttgcagaagtcttaatatgcataatttttaatctaattgtcttctaaatatagttttggtgtatgctggtattttagaagccaccaatttctggactatctgattattaacaaagatgtattttaatgcacaaactcaaatgtttaaaatatatatttactttgtactcaaataaaatcccctattgcaaatcctatacatatttcaatgcaattcttatacatcgatcttaatcaaatttataaatgtacaatcctgaagacagtgtactagatatgcactataaaatatattgcagtaaggaaacagattaagttcactgtcaaactgtctgacttccttaacaaatttaataaagataaatgtcaatatgaacaaatttgttaggtaccttaggaatctttcaaaactatttagatataaaataaaattatagtaataaaatattgaagagaaatatcatttttagtgaatatggttagaaagaacataagaagtgagatcaaattattttaattaaaaaaataggccaggtgcgatggctcacgcctgtaatcccagcattttgggaggccgaggcgggcggatcacaaggtcaggagattgagaccatcctggctaacacggtgaaaccccgtctctactaaaaaaagtacaaaaaagaagttagccgggcgtggtggcgggcgcctgtagtcccagctacttgggaggctgaggcaggagaatggcgtgaacccggaaggcagagcttgcagtgagccgagatcacgccattgcactccagcctgggtgacagagtgagactgtctcaaataataataataataataataataataataataataataatagactgactcaaatctaccataaagcacctctactcattttggaatatgtacgtggaattttgcttcaatagctgaaatctaaaaacactctttctgttgcatttgattattcaatcatgataaggtaaatgtaaacagactgtgtagcactctatcacctggagtgaacttagaatttacagcttagagtacatgactaaaagaggaatggagtggaagtgggcagtaggtgtctttggggcaaaaattctataaactggtgttatctaaactatcacattactttgttaaattattgtttcatcacgtatgacctttgtgatttgtcacacattttacttctacatatgcacataattgtaatttttttaactttaaaaagtcaattatgtttaagaaaatttttaaaataagaatgaacgtatgtgatatttactgtga

SEQ ID NO: 18186 - DNA, 1957 bp, Homo sapiens
  source 1..1957: mol_type = unassigned DNA
tgccaggcgcatctcaggaacgaggtctcactatattgcccagactggtctcgaactcctgggctcaaacagtccccctgcgttggcctcccaaagtgatggaattacaggtgtgaatcactgcatctgactatggcaaggatctctgtcactgagagtttggcttagagattaaagctccttctatcttgtgatgccaccatcgcaaggttctcaaggttgttgtgggagaagagaaggctaaaggagctcatagaatgcctttaatgctaatccaaaagtaaatgagaaacttagaaaaagattgccaattccaaatcaacatatttagagaaaattggaaaaggagaagcttactacagctttatttgaggactttttaaagaacgctgggttctatctgtgagctgcaaatcttggagcaaaaaccagagacattgccagagcaaacaagaacagaaatacaaatggagaactggtcaaaagacataacccacagttatcttgaacaagaaactacggggataaataaaagtacgcagccagatgagcaactgactatgaattctgagaaaagtatgcatcggaaatccactgaattagttaatgaaataacatgtgagaacacagaatggccagggcagagatcaacgaattttcagatcatcagttcttatccagatgatgagtctgtttactgcactactgaaaaatacaacgttatggaacatagacataatgatatgcattatgaatgtatgactccttgtcaagttacttcagactcagataaagagaagacaatagcatttcttctaaaagaattggatattctcagaacaagcaataaaaagcttcagcagaaattggctaaagaagataaagaacagagaaaactaaagtttaagctggaactccaagagaaagaaacagaagctaaaattgctgaaaagacagcagctctggttgaagaagtgtattttgcgcagaaggaacgtgatgaagctgttatgtctagactgcaattagccattgaggagagagatgaagcaattgcacgagccaagcatatggaaatgtctctaaaagtgctagaaaatattaaccctgaagaaaatgacatgacattacaggaattactgaacagaataaacaatgcagacacagggatagctattcagaagaatggagctataattgtggatagaatctacaagaccaaggaatgtaaaatgagaataactgcagaagaaatgagtgcactaatagaagaacgggatgctgccttgtctaagtgcaaacggttagagcaggagcttcatcatgtgaaagagcagaaccagacttcagcaaacaacatgagacatctgactgctgaaaacaatcaagaacgtgctctgaaggcaaagttgttatctatgcaacaagccagagaaactgcagttcaacagtacaaaaaactggaagaggaaatccagacccttcgagtttactacagtttacacaaatctttatctcaagaagaaaatctgaaggatcagtttaactatacccttagtacatatgaagaagctttaaaaaacagagagaacattgtttccatcactcaacaacaaaatgaggaactggctactcaactgcaacaagctctgacagagcgagcaaatatggaattacaacttcaacatgccagagaggcctcccaagtggccaatgaaaaagttcaaaagttggaaaggctggtggatgtactgaggaagaaggttggaaccgggaccatgaggacagtgatctgattgaaaaaaaacgacagtctggggaagcgatcacatctggtgaccaggctgcttcattcaacactgtgtaaacaccaaagccttaacttagcaaacagttgttagaagtgggacactccaaccacattccaagctgagataaaatcaaatcacaaatgttt

SEQ ID NO: 18187 - DNA, 1674 bp, Homo sapiens
  source 1..1674: mol_type = unassigned DNA
cgccccgctcctccgccggatcgtctgtgggtgagtctcgagccaggaggctctgagccagtggcgattggctgacgcggtggctgcgcactcggcctgagaaactcggcaagcgcgcagtgtcgactccccggtctatgccaggcgcatctcagctctggttgaagaagtgtattttgcgcagaaggaacgtgatgaagctgttatgtctagactgcaattagccattgaggagagagatgaagcaattgcacgagccaagcatatggaaatgtctctaaaagtgctagaaaatattaaccctgaagaaaatgacatgacattacaggaattactgaacagaataaacaatgcagacacagggatagctattcagaagaatggagctataattgtggatagaatctacaagaccaaggaatgtaaaatgagaataactgcagaagaaatgagtgcactaatagaagaacgggatgctgccttgtctaagtgcaaacggttagagcaggagcttcatcatgtgaaagagcagaaccagacttcagcaaacaacatgagacatctgactgctgaaaacaatcaagaacgtgctctgaaggcaaagttgttatctatgcaacaagccagagaaactgcagttcaacagtacaaaaaactggaagaggaaatccagacccttcgagtttactacagtttacacaaatctttatctcaagaagaaaatctgaaggatcagtttaactatacccttagtacatatgaagaagctttaaaaaacagagagaacattgtttccatcactcaacaacaaaatgaggaactggctactcaactgcaacaagctctgacagagcgagcaaatatggaattacaacttcaacatgccagagaggcctcccaagtggccaatgaaaaagttcaaaagttggaaaggctggtggatgtactgaggaagaaggttggaaccgggaccatgaggacagtgatctgattgaaaaaaaacgacagtctggggaagcgatcacatctggtgaccaggctgcttcattcaacactgtgtaaacaccaaagccttaacttagcaaacagttgttagaagtgggacactccaaccacattccaagctgagataaaatcaaatcacaaatgtttaaccactttgctgctgacttgagttatttatccaaatatattaactatagacttttaccaatgggtagctataaggttacagcttattttgtaactattttatatctcaatatctttaatataaatctttttactgagagatcattatagaaacatgttaaagttggttaggatcatatcttcacatatggccctttctgaatcaaagtgcggcaaagtaaatattgtctaagctttaatccactgtgttaggtcaaaacttcaaatacatgcatttttcaatatagggtatatttcttaactgatgagagaggcttagacatgagtgtgtagtcttccttcaatgcgtgtatgtaatctttgttagtataaaagatattaaatataggtgccaagaattaaatgtataatttgtttaataagagatggatatattaaaattacattcatcaaggcatgatttttgtttcactacaaataatgcaaactgttttcaataaaaagaggagactgttaatgtgt

SEQ ID NO: 18188 - DNA, 2183 bp, Homo sapiens
  source 1..2183: mol_type = unassigned DNA
ggaacgaggtctcactatattgcccagactggtctcgaactcctgggctcaaacagtccccctgcgttggcctcccaaagtgatggaattacaggtgtgaatcactgcatctgactatggcaaggatctctgtcactgagctaatccaaaagtaaatgagaaacttagaaaaagattgccaattccaaatcaacatatttagagaaaattggaaaaggagaagcttactacagctttatttgaggactttttaaagaacgctgggttctatctgtgagctgcaaatcttggagcaaaaaccagagacattgccagagcaaacaagaacagaaatacaaatggagaactggtcaaaagacataacccacagttatcttgaacaagaaactacggggataaataaaagtacgcagccagatgagcaactgactatgaattctgagaaaagtatgcatcggaaatccactgaattagttaatgaaataacatgtgagaacacagaatggccagggcagagatcaacgaattttcagatcatcagttcttatccagatgatgagtctgtttactgcactactgaaaaatacaacgttatggaacatagacataatgatatgcattatgaatgtatgactccttgtcaagttacttcagactcagataaagagaagacaatagcatttcttctaaaagaattggatattctcagaacaagcaataaaaagcttcagcagaaattggctaaagaagataaagaacagagaaaactaaagtttaagctggaactccaagagaaagaaacagaagctaaaattgctgaaaagacagcagctctggttgaagaagtgtattttgcgcagaaggaacgtgatgaagctgttatgtctagactgcaattagccattgaggagagagatgaagcaattgcacgagccaagcatatggaaatgtctctaaaagtgctagaaaatattaaccctgaagaaaatgacatgacattacaggaattactgaacagaataaacaatgcagacacagggatagctattcagaagaatggagctataattgtggatagaatctacaagaccaaggaatgtaaaatgagaataactgcagaagaaatgagtgcactaatagaagaacgggatgctgccttgtctaagtgcaaacggttagagcaggagcttcatcatgtgaaagagcagaaccagacttcagcaaacaacatgagacatctgactgctgaaaacaatcaagaacgtgctctgaaggcaaagttgttatctatgcaacaagccagagaaactgcagttcaacagtacaaaaaactggaagaggaaatccagacccttcgagtttactacagtttacacaaatctttatctcaagaagaaaatctgaaggatcagtttaactatacccttagtacatatgaagaagctttaaaaaacagagagaacattgtttccatcactcaacaacaaaatgaggaactggctactcaactgcaacaagctctgacagagcgagcaaatatggaattacaacttcaacatgccagagaggcctcccaagtggccaatgaaaaagttcaaaagttggaaaggctggtggatgtactgaggaagaaggttggaaccgggaccatgaggacagtgatctgattgaaaaaaaacgacagtctggggaagcgatcacatctggtgaccaggctgcttcattcaacactgtgtaaacaccaaagccttaacttagcaaacagttgttagaagtgggacactccaaccacattccaagctgagataaaatcaaatcacaaatgtttaaccactttgctgctgacttgagttatttatccaaatatattaactatagacttttaccaatgggtagctataaggttacagcttattttgtaactattttatatctcaatatctttaatataaatctttttactgagagatcattatagaaacatgttaaagttggttaggatcatatcttcacatatggccctttctgaatcaaagtgcggcaaagtaaatattgtctaagctttaatccactgtgttaggtcaaaacttcaaatacatgcatttttcaatatagggtatatttcttaactgatgagagaggcttagacatgagtgtgtagtcttccttcaatgcgtgtatgt

SEQ ID NO: 18189 - DNA, 2073 bp, Homo sapiens
  source 1..2073: mol_type = unassigned DNA
ggaacgaggtctcactatattgcccagactggtctcgaactcctgggctcaaacagtccccctgcgttggcctcccaaagtgatggaattacaggtgtgaatcactgcatctgactatggcaaggatctctgtcactgagctaatccaaaagtaaatgagaaacttagaaaaagattgccaattccaaatcaacatatttagagaaaattggaaaaggagaagcttactacagctttatttgaggactttttaaagaacgctgggttctatctgtgagctgcaaatcttggagcaaaaaccagagacattgccagagcaaacaagaacagaaatacaaatggagaactggtcaaaagttatcttgaacaagaaactacggggataaataaaagtacgcagccagatgagcaactgactatgaattctgagaaaagtatgcatcggaaatccactgaattagttaatgaaataacatgtgagaacacagaatggccagggcagagatcaacgaattttcagatcatcagttcttatccagatgatgagtctgtttactgcactactgaaaaatacaacgttatggaacatagacataatgatatgcattatgaatgtatgactccttgtcaagttacttcagactcagataaagagaagacaatagcatttcttctaaaagaattggatattctcagaacaagcaataaaaagcttcagcagaaattggctaaagaagataaagaacagagaaaactaaagtttaagctggaactccaagagaaagaaacagaagctaaaattgctgaaaagacagcagctctggttgaagaagtgtattttgcgcagaaggaacgtgatgaagctgttatgtctagactgcaattagccattgaggagagagatgaagcaattgcacgagccaagcatatggaaatgtctctaaaagtgctagaaaatattaaccctgaagaaaatgacatgacattacaggaattactgaacagaataaacaatgcagacacagggatagctattcagaagaatggagctataattgtggatagaatctacaagaccaaggaatgtaaaatgagaataactgcagaagaaatgagtgcactaatagaagaacgggatgctgccttgtctaagtgcaaacggttagagcaggagcttcatcatgtgaaagagcagaaccagacttcagcaaacaacatgagacatctgactgctgaaaacaatcaagaacgtgctctgaaggcaaagttgttatctatgcaacaagccagagaaactgcagttcaacagtacaaaaaactggaagaggaaatccagacccttcgagtttactacagtttacacaaatctttatctcaagaagaaaatctgaaggatcagtttaactatacccttagtacatatgaagaagctttaaaaaacagagagaacattgtttccatcactcaacaacaaaatgaggaactggctactcaactgcaacaagctctgacagagcgagcaaatatggaattacaacttcaacatgccagagaggcctcccaagtggccaatgaaaaagttcaaaaatctcaaatacaaatctatttcattccaaataaaaaagatgaaagagaaaaattcctaatggataaaagaagaaagattgttgcacattcaaaacagaattcttgatagatacaaaatcatccaataaacttcagctagttttcagcattatatgcagttgatttgtccattcctcagtggaacttccaaatcatctaaaccagctttgtatgacactaagaataccctcattccttcagtgtctagctctgtgctgtgtttatttgcagaggaccctcatgcatggatccatataaatgaggcaaactgtgaagcagactagactgtgccgcttaccgtaaagtctttgagagaggaagattgtgtatatgaaaactgctaggcatgatatttacttataaggaagatttctatgtgtataacatcaagcaagatttttggttgaggttttatgctttcagtaaagaaaataaaagaagaaaacc

SEQ ID NO: 18190 - DNA, 732 bp, Homo sapiens
  source 1..732: mol_type = unassigned DNA
ccctgcggcgcgccgccgccccgtaggccccacgcgccgccccgctcctccgccggatcgtctgtgggtgagtctcgagccaggaggctctgagccagtggcgattggctgacgcggtggctgcgcactcggcctgagaaactcggcaagcgcgcagtgtcgactccccggtctatgccaggcgcatctcagctaatccaaaagtaaatgagaaacttagaaaaagattgccaattccaaatcaacatatttagagaaaattggaaaaggagaagcttactacagctttatttgaggactttttaaagaacgctgggttctatctgtgagtttatttatctagagttggctttattttagctgcaaatcttggagcaaaaaccagagacattgccagagcaaacaagaacagaaatacaaatggagaactggtcaaaagacataacccacagttatcttgaacaagaaactacggggataaataaaagtacgcagccagatgagcaactgactatgaattctgagaaaagtatgcatcggaaatccactgaattagttaatgaaataacatgtgagaacacagaatggccagggcagagatcaacgaattttcagatcatcagttcttatccagatgatgagtctgtttactgcactactgaaaaatacaacgttatggaacatagacataatgatatgcattatgaatgtatgactccttgtcaagttact

SEQ ID NO: 18191 - DNA, 775 bp, Homo sapiens
  source 1..775: mol_type = unassigned DNA
atgccaggcgcatctcaggtaaacggttgggcagggaggtttgggcgacggagaatgatagtggtgggcacagatcagccctggagttttcggccgcagacttttccttggagaaggagaaggggccccgcggaatctgtacttagtgaatgctgaccccgcgtggccgggagtgatggggctctctcgaagctaatccaaaagtaaatgagaaacttagaaaaagattgccaattccaaatcaacatatttagagaaaattggaaaaggagaagcttactacagctttatttgaggactttttaaagaacgctgggttctatctgtgagctgcaaatcttggagcaaaaaccagagacattgccagagcaaacaagaacagaaatacaaatggagaactggtcaaaagacataacccacagttatcttgaacaagaaactacggggataaataaaagtacgcagccagatgagcaactgactatgaattctgagaaaagtatgcatcggaaatccactgaattagttaatgaaataacatgtgagaacacagaatggccagggcagagatcaacgaattttcagatcatcagttcttatccagatgatgagtctgtttactgcactactgaaaaatacaacgttatggaacatagacataatgatatgcattatgaatgtatgactccttgtcaagttacttcagactcagataaagagaagacaatagcatttcttctaaaagaattggatattctcagaacaagcaataaaa

SEQ ID NO: 18192 - DNA, 4929 bp, Homo sapiens
  source 1..4929: mol_type = unassigned DNA
agtgcgcggtcgctccgcgcctgcgcaggagaggtggtaggctcgggtggctggctccggggagatagcgcctgtcagtcggtgggtcggtcctcgcgccggccctccccctccccggtctccgggggaggcgcggtggagtccgcccccggggttctccgatgggggagaagcggcgacggcggcagtggagtaaccgagccggagcgtgagcggccccggtgccccgttccccacggaggccatgggcgacccagcccccgcccgcagcctggacgacatcgacctgtccgccctgcgggaccctgctgggatctttgagcttgtggaggtggtcggcaatggaacctacggacaggtgtacaagggtcggcatgtcaagacggggcagctggctgccatcaaggtcatggatgtcacggaggacgaggaggaagagatcaaacaggagatcaacatgctgaaaaagtactctcaccaccgcaacatcgccacctactacggagccttcatcaagaagagccccccgggaaacgatgaccagctctggctggtgatggagttctgtggtgctggttcagtgactgacctggtaaagaacacaaaaggcaacgccctgaaggaggactgtatcgcctatatctgcagggagatcctcaggggtctggcccatctccatgcccacaaggtgatccatcgagacatcaaggggcagaatgtgctgctgacagagaatgctgaggtcaagctagtggattttggggtgagtgctcagctggaccgcaccgtgggcagacggaacactttcattgggactccctactggatggctccagaggtcatcgcctgtgatgagaaccctgatgccacctatgattacaggagtgatatttggtctctaggaatcacagccatcgagatggcagagggagccccccctctgtgtgacatgcaccccatgcgagccctcttcctcattcctcggaaccctccgcccaggctcaagtccaagaagtggtctaagaagttcattgacttcattgacacatgtctcatcaagacttacctgagccgcccacccacggagcagctactgaagtttcccttcatccgggaccagcccacggagcggcaggtccgcatccagcttaaggaccacattgaccgatcccggaagaagcggggtgagaaagaggagacagaatatgagtacagcggcagcgaggaggaagatgacagccatggagaggaaggagagccaagctccatcatgaacgtgcctggagagtcgactctacgccgggagtttctccggctccagcaggaaaataagagcaactcagaggctttaaaacagcagcagcagctgcagcagcagcagcagcgagaccccgaggcacacatcaaacacctgctgcaccagcggcagcggcgcatagaggagcagaaggaggagcggcgccgcgtggaggagcaacagcggcgggagcgggagcagcggaagctgcaggagaaggagcagcagcggcggctggaggacatgcaggctctgcggcgggaggaggagcggcggcaggcggagcgcgagcaggaatacaagcggaagcagctggaggagcagcggcagtcagaacgtctccagaggcagctgcagcaggagcatgcctacctcaagtccctgcagcagcagcaacagcagcagcagcttcagaaacagcagcagcagcagctcctgcctggggacaggaagcccctgtaccattatggtcggggcatgaatcccgctgacaaaccagcctgggcccgagaggtagaagagagaacaaggatgaacaagcagcagaactctcccttggccaagagcaagccaggcagcacggggcctgagccccccatcccccaggcctccccagggcccccaggacccctttcccagactcctcctatgcagaggccggtggagccccaggagggaccgcacaagagcctggtggcacaccgggtcccactgaagccatatgcagcacctgtaccccgatcccagtccctgcaggaccagcccacccgaaacctggctgccttcccagcctcccatgaccccgaccctgccatccccgcacccactgccacgcccagtgcccgaggagctgtcatccgccagaattcagaccccacctctgaaggacctggccccagcccgaatcccccagcctgggtccgcccagataacgaggccccacccaaggtgcctcagaggacctcatctatcgccactgcccttaacaccagtggggccggagggtcccggccagcccaggcagtccgtgccagtaaccccgacctcaggaggagcgaccctggctgggaacgctcggacagcgtccttccagcctctcacgggcacctcccccaggctggctcactggagcggaaccgcgtgggagtctcctccaaaccggacagctcccctgtgctctcccctgggaataaagccaagcccgacgaccaccgctcacggccaggccggcccgcaagctataagcgagcaattggtgaggactttgtgttgctgaaagagcggactctggacgaggcccctcggcctcccaagaaggccatggactactcgtcgtccagcgaggaggtggaaagcagtgaggacgacgaggaggaaggcgaaggcgggccagcagaggggagcagagatacccctgggggccgcagcgatggggatacagacagcgtcagcaccatggtggtccacgacgtcgaggagatcaccgggacccagcccccatacgggggcggcaccatggtggtccagcgcacccctgaagaggagcggaacctgctgcatgctgacagcaatgggtacacaaacctgcctgacgtggtccagcccagccactcacccaccgagaacagcaaaggccaaagcccaccctcgaaggatgggagtggtgactaccagtctcgtgggctggtaaaggcccctggcaagagctcgttcacgatgtttgtggatctagggatctaccagcctggaggcagtggggacagcatccccatcacagccctagtgggtggagagggcactcggctcgaccagctgcagtacgacgtgaggaagggttctgtggtcaacgtgaatcccaccaacacccgggcccacagtgagacccctgagatccggaagtacaagaagcgattcaactccgagatcctctgtgcagccctttggggggtcaacctgctggtgggcacggagaacgggctgatgttgctggaccgaagtgggcagggcaaggtgtatggactcattgggcggcgacgcttccagcagatggatgtgctggaggggctcaacctgctcatcaccatctcagggaaaaggaacaaactgcgggtgtattacctgtcctggctccggaacaagattctgcacaatgacccagaagtggagaagaagcagggctggaccaccgtgggggacatggagggctgcgggcactaccgtgttgtgaaatacgagcggattaagttcctggtcatcgccctcaagagctccgtggaggtgtatgcctgggcccccaaaccctaccacaaattcatggccttcaagtcctttgccgacctcccccaccgccctctgctggtcgacctgacagtagaggaggggcagcggctcaaggtcatctatggctccagtgctggcttccatgctgtggatgtcgactcggggaacagctatgacatctacatccctgtgcacatccagagccagatcacgccccatgccatcatcttcctccccaacaccgacggcatggagatgctgctgtgctacgaggacgagggtgtctacgtcaacacgtacgggcgcatcattaaggatgtggtgctgcagtggggggagatgcctacttctgtggcctacatctgctccaaccagataatgggctggggtgagaaagccattgagatccgctctgtggagacgggccacctcgacggggtcttcatgcacaaacgagctcagaggctcaagttcctgtgtgagcggaatgacaaggtgttttttgcctcagtccgctctgggggcagcagccaagtttacttcatgactctgaaccgtaactgcatcatgaactggtgacggggccctgggctggggctgtcccacactggacccagctctccccctgcagccaggcttcccgggccgcccctctttcccctccctgggcttttgcttttactggtttgatttcactggagcctgctgggaacgtgacctctgacccctgatgctttcgtgatcacgtgaccatcctcttccccaacatgtcctcttcccaaaactgtgcctgtccccagcttctggggagggacacagcttccccttcccaggaattgagtgggcctagcccctccccccttttctccatttgagaggagagtgcttggggcttgaaccccttaccccactgctgctgactgggcagggccctggacccctttatttgcacgtcaggggagccggctccccccttgaatgtaccagaccctggggggggtcactgggccctagatttttggggggtcaccagccactccaggggcagggaccatttcttcattttctgaaagcactttaatgattccccttcccccaaactccagggaatggaggggggaccccgccagccaaaacattccccccattcccgacccccctctcctcttctagcccatgcccttccccggtggagggagggagcagggagccctcactctccacgccccttgcttgcatctgtatatagtgtgagcagcaagtaacccttctccctccccccccacccctcctcaatgtagtggccttggatatcctgtttgttaataaagacaattcaaccagctcccacc

SEQ ID NO: 18193 - DNA, 5016 bp, Homo sapiens
  source 1..5016: mol_type = unassigned DNA
agtgcgcggtcgctccgcgcctgcgcaggagaggtggtaggctcgggtggctggctccggggagatagcgcctgtcagtcggtgggtcggtcctcgcgccggccctccccctccccggtctccgggggaggcgcggtggagtccgcccccggggttctccgatgggggagaagcggcgacggcggcagtggagtaaccgagccggagcgtgagcggccccggtgccccgttccccacggaggccatgggcgacccagcccccgcccgcagcctggacgacatcgacctgtccgccctgcgggaccctgctgggatctttgagcttgtggaggtggtcggcaatggaacctacggacaggtgtacaagggtcggcatgtcaagacggggcagctggctgccatcaaggtcatggatgtcacggaggacgaggaggaagagatcaaacaggagatcaacatgctgaaaaagtactctcaccaccgcaacatcgccacctactacggagccttcatcaagaagagccccccgggaaacgatgaccagctctggctggtgatggagttctgtggtgctggttcagtgactgacctggtaaagaacacaaaaggcaacgccctgaaggaggactgtatcgcctatatctgcagggagatcctcaggggtctggcccatctccatgcccacaaggtgatccatcgagacatcaaggggcagaatgtgctgctgacagagaatgctgaggtcaagctagtggattttggggtgagtgctcagctggaccgcaccgtgggcagacggaacactttcattgggactccctactggatggctccagaggtcatcgcctgtgatgagaaccctgatgccacctatgattacaggagtgatatttggtctctaggaatcacagccatcgagatggcagagggagccccccctctgtgtgacatgcaccccatgcgagccctcttcctcattcctcggaaccctccgcccaggctcaagtccaagaagtggtctaagaagttcattgacttcattgacacatgtctcatcaagacttacctgagccgcccacccacggagcagctactgaagtttcccttcatccgggaccagcccacggagcggcaggtccgcatccagcttaaggaccacattgaccgatcccggaagaagcggggtgagaaagaggagacagaatatgagtacagcggcagcgaggaggaagatgacagccatggagaggaaggagagccaagctccatcatgaacgtgcctggagagtcgactctacgccgggagtttctccggctccagcaggaaaataagagcaactcagaggctttaaaacagcagcagcagctgcagcagcagcagcagcgagaccccgaggcacacatcaaacacctgctgcaccagcggcagcggcgcatagaggagcagaaggaggagcggcgccgcgtggaggagcaacagcggcgggagcgggagcagcggaagctgcaggagaaggagcagcagcggcggctggaggacatgcaggctctgcggcgggaggaggagcggcggcaggcggagcgcgagcaggaatacaagcggaagcagctggaggagcagcggcagtcagaacgtctccagaggcagctgcagcaggagcatgcctacctcaagtccctgcagcagcagcaacagcagcagcagcttcagaaacagcagcagcagcagctcctgcctggggacaggaagcccctgtaccattatggtcggggcatgaatcccgctgacaaaccagcctgggcccgagaggtagaagagagaacaaggatgaacaagcagcagaactctcccttggccaagagcaagccaggcagcacggggcctgagccccccatcccccaggcctccccagggcccccaggacccctttcccagactcctcctatgcagaggccggtggagccccaggagggaccgcacaagagcctggtggcacaccgggtcccactgaagccatatgcagcacctgtaccccgatcccagtccctgcaggaccagcccacccgaaacctggctgccttcccagcctcccatgaccccgaccctgccatccccgcacccactgccacgcccagtgcccgaggagctgtcatccgccagaattcagaccccacctctgaaggacctggccccagcccgaatcccccagcctgggtccgcccagataacgaggccccacccaaggtgcctcagaggacctcatctatcgccactgcccttaacaccagtggggccggagggtcccggccagcccaggcagtccgtgccagacctcgcagcaactccgcctggcaaatctatctgcaaaggcgggcagagcggggcaccccaaagcctccagggccccctgctcagccccctggcccgcccaacgcctctagtaaccccgacctcaggaggagcgaccctggctgggaacgctcggacagcgtccttccagcctctcacgggcacctcccccaggctggctcactggagcggaaccgcgtgggagtctcctccaaaccggacagctcccctgtgctctcccctgggaataaagccaagcccgacgaccaccgctcacggccaggccggcccgcagactttgtgttgctgaaagagcggactctggacgaggcccctcggcctcccaagaaggccatggactactcgtcgtccagcgaggaggtggaaagcagtgaggacgacgaggaggaaggcgaaggcgggccagcagaggggagcagagatacccctgggggccgcagcgatggggatacagacagcgtcagcaccatggtggtccacgacgtcgaggagatcaccgggacccagcccccatacgggggcggcaccatggtggtccagcgcacccctgaagaggagcggaacctgctgcatgctgacagcaatgggtacacaaacctgcctgacgtggtccagcccagccactcacccaccgagaacagcaaaggccaaagcccaccctcgaaggatgggagtggtgactaccagtctcgtgggctggtaaaggcccctggcaagagctcgttcacgatgtttgtggatctagggatctaccagcctggaggcagtggggacagcatccccatcacagccctagtgggtggagagggcactcggctcgaccagctgcagtacgacgtgaggaagggttctgtggtcaacgtgaatcccaccaacacccgggcccacagtgagacccctgagatccggaagtacaagaagcgattcaactccgagatcctctgtgcagccctttggggggtcaacctgctggtgggcacggagaacgggctgatgttgctggaccgaagtgggcagggcaaggtgtatggactcattgggcggcgacgcttccagcagatggatgtgctggaggggctcaacctgctcatcaccatctcagggaaaaggaacaaactgcgggtgtattacctgtcctggctccggaacaagattctgcacaatgacccagaagtggagaagaagcagggctggaccaccgtgggggacatggagggctgcgggcactaccgtgttgtgaaatacgagcggattaagttcctggtcatcgccctcaagagctccgtggaggtgtatgcctgggcccccaaaccctaccacaaattcatggccttcaagtcctttgccgacctcccccaccgccctctgctggtcgacctgacagtagaggaggggcagcggctcaaggtcatctatggctccagtgctggcttccatgctgtggatgtcgactcggggaacagctatgacatctacatccctgtgcacatccagagccagatcacgccccatgccatcatcttcctccccaacaccgacggcatggagatgctgctgtgctacgaggacgagggtgtctacgtcaacacgtacgggcgcatcattaaggatgtggtgctgcagtggggggagatgcctacttctgtggcctacatctgctccaaccagataatgggctggggtgagaaagccattgagatccgctctgtggagacgggccacctcgacggggtcttcatgcacaaacgagctcagaggctcaagttcctgtgtgagcggaatgacaaggtgttttttgcctcagtccgctctgggggcagcagccaagtttacttcatgactctgaaccgtaactgcatcatgaactggtgacggggccctgggctggggctgtcccacactggacccagctctccccctgcagccaggcttcccgggccgcccctctttcccctccctgggcttttgcttttactggtttgatttcactggagcctgctgggaacgtgacctctgacccctgatgctttcgtgatcacgtgaccatcctcttccccaacatgtcctcttcccaaaactgtgcctgtccccagcttctggggagggacacagcttccccttcccaggaattgagtgggcctagcccctccccccttttctccatttgagaggagagtgcttggggcttgaaccccttaccccactgctgctgactgggcagggccctggacccctttatttgcacgtcaggggagccggctccccccttgaatgtaccagaccctggggggggtcactgggccctagatttttggggggtcaccagccactccaggggcagggaccatttcttcattttctgaaagcactttaatgattccccttcccccaaactccagggaatggaggggggaccccgccagccaaaacattccccccattcccgacccccctctcctcttctagcccatgcccttccccggtggagggagggagcagggagccctcactctccacgccccttgcttgcatctgtatatagtgtgagcagcaagtaacccttctccctccccccccacccctcctcaatgtagtggccttggatatcctgtttgttaataaagacaattcaaccagctcccacc

SEQ ID NO: 18194 - DNA, 4956 bp, Homo sapiens
  source 1..4956: mol_type = unassigned DNA
agtgcgcggtcgctccgcgcctgcgcaggagaggtggtaggctcgggtggctggctccggggagatagcgcctgtcagtcggtgggtcggtcctcgcgccggccctccccctccccggtctccgggggaggcgcggtggagtccgcccccggggttctccgatgggggagaagcggcgacggcggcagtggagtaaccgagccggagcgtgagcggccccggtgccccgttccccacggaggccatgggcgacccagcccccgcccgcagcctggacgacatcgacctgtccgccctgcgggaccctgctgggatctttgagcttgtggaggtggtcggcaatggaacctacggacaggtgtacaagggtcggcatgtcaagacggggcagctggctgccatcaaggtcatggatgtcacggaggacgaggaggaagagatcaaacaggagatcaacatgctgaaaaagtactctcaccaccgcaacatcgccacctactacggagccttcatcaagaagagccccccgggaaacgatgaccagctctggctggtgatggagttctgtggtgctggttcagtgactgacctggtaaagaacacaaaaggcaacgccctgaaggaggactgtatcgcctatatctgcagggagatcctcaggggtctggcccatctccatgcccacaaggtgatccatcgagacatcaaggggcagaatgtgctgctgacagagaatgctgaggtcaagctagtggattttggggtgagtgctcagctggaccgcaccgtgggcagacggaacactttcattgggactccctactggatggctccagaggtcatcgcctgtgatgagaaccctgatgccacctatgattacaggagtgatatttggtctctaggaatcacagccatcgagatggcagagggagccccccctctgtgtgacatgcaccccatgcgagccctcttcctcattcctcggaaccctccgcccaggctcaagtccaagaagtggtctaagaagttcattgacttcattgacacatgtctcatcaagacttacctgagccgcccacccacggagcagctactgaagtttcccttcatccgggaccagcccacggagcggcaggtccgcatccagcttaaggaccacattgaccgatcccggaagaagcggggtgagaaagaggagacagaatatgagtacagcggcagcgaggaggaagatgacagccatggagaggaaggagagccaagctccatcatgaacgtgcctggagagtcgactctacgccgggagtttctccggctccagcaggaaaataagagcaactcagaggctttaaaacagcagcagcagctgcagcagcagcagcagcgagaccccgaggcacacatcaaacacctgctgcaccagcggcagcggcgcatagaggagcagaaggaggagcggcgccgcgtggaggagcaacagcggcgggagcgggagcagcggaagctgcaggagaaggagcagcagcggcggctggaggacatgcaggctctgcggcgggaggaggagcggcggcaggcggagcgcgagcaggaatacaagcggaagcagctggaggagcagcggcagtcagaacgtctccagaggcagctgcagcaggagcatgcctacctcaagtccctgcagcagcagcaacagcagcagcagcttcagaaacagcagcagcagcagctcctgcctggggacaggaagcccctgtaccattatggtcggggcatgaatcccgctgacaaaccagcctgggcccgagaggtagaagagagaacaaggatgaacaagcagcagaactctcccttggccaagagcaagccaggcagcacggggcctgagccccccatcccccaggcctccccagggcccccaggacccctttcccagactcctcctatgcagaggccggtggagccccaggagggaccgcacaagtccctgcaggaccagcccacccgaaacctggctgccttcccagcctcccatgaccccgaccctgccatccccgcacccactgccacgcccagtgcccgaggagctgtcatccgccagaattcagaccccacctctgaaggacctggccccagcccgaatcccccagcctgggtccgcccagataacgaggccccacccaaggtgcctcagaggacctcatctatcgccactgcccttaacaccagtggggccggagggtcccggccagcccaggcagtccgtgccagacctcgcagcaactccgcctggcaaatctatctgcaaaggcgggcagagcggggcaccccaaagcctccagggccccctgctcagccccctggcccgcccaacgcctctagtaaccccgacctcaggaggagcgaccctggctgggaacgctcggacagcgtccttccagcctctcacgggcacctcccccaggctggctcactggagcggaaccgcgtgggagtctcctccaaaccggacagctcccctgtgctctcccctgggaataaagccaagcccgacgaccaccgctcacggccaggccggcccgcagactttgtgttgctgaaagagcggactctggacgaggcccctcggcctcccaagaaggccatggactactcgtcgtccagcgaggaggtggaaagcagtgaggacgacgaggaggaaggcgaaggcgggccagcagaggggagcagagatacccctgggggccgcagcgatggggatacagacagcgtcagcaccatggtggtccacgacgtcgaggagatcaccgggacccagcccccatacgggggcggcaccatggtggtccagcgcacccctgaagaggagcggaacctgctgcatgctgacagcaatgggtacacaaacctgcctgacgtggtccagcccagccactcacccaccgagaacagcaaaggccaaagcccaccctcgaaggatgggagtggtgactaccagtctcgtgggctggtaaaggcccctggcaagagctcgttcacgatgtttgtggatctagggatctaccagcctggaggcagtggggacagcatccccatcacagccctagtgggtggagagggcactcggctcgaccagctgcagtacgacgtgaggaagggttctgtggtcaacgtgaatcccaccaacacccgggcccacagtgagacccctgagatccggaagtacaagaagcgattcaactccgagatcctctgtgcagccctttggggggtcaacctgctggtgggcacggagaacgggctgatgttgctggaccgaagtgggcagggcaaggtgtatggactcattgggcggcgacgcttccagcagatggatgtgctggaggggctcaacctgctcatcaccatctcagggaaaaggaacaaactgcgggtgtattacctgtcctggctccggaacaagattctgcacaatgacccagaagtggagaagaagcagggctggaccaccgtgggggacatggagggctgcgggcactaccgtgttgtgaaatacgagcggattaagttcctggtcatcgccctcaagagctccgtggaggtgtatgcctgggcccccaaaccctaccacaaattcatggccttcaagtcctttgccgacctcccccaccgccctctgctggtcgacctgacagtagaggaggggcagcggctcaaggtcatctatggctccagtgctggcttccatgctgtggatgtcgactcggggaacagctatgacatctacatccctgtgcacatccagagccagatcacgccccatgccatcatcttcctccccaacaccgacggcatggagatgctgctgtgctacgaggacgagggtgtctacgtcaacacgtacgggcgcatcattaaggatgtggtgctgcagtggggggagatgcctacttctgtggcctacatctgctccaaccagataatgggctggggtgagaaagccattgagatccgctctgtggagacgggccacctcgacggggtcttcatgcacaaacgagctcagaggctcaagttcctgtgtgagcggaatgacaaggtgttttttgcctcagtccgctctgggggcagcagccaagtttacttcatgactctgaaccgtaactgcatcatgaactggtgacggggccctgggctggggctgtcccacactggacccagctctccccctgcagccaggcttcccgggccgcccctctttcccctccctgggcttttgcttttactggtttgatttcactggagcctgctgggaacgtgacctctgacccctgatgctttcgtgatcacgtgaccatcctcttccccaacatgtcctcttcccaaaactgtgcctgtccccagcttctggggagggacacagcttccccttcccaggaattgagtgggcctagcccctccccccttttctccatttgagaggagagtgcttggggcttgaaccccttaccccactgctgctgactgggcagggccctggacccctttatttgcacgtcaggggagccggctccccccttgaatgtaccagaccctggggggggtcactgggccctagatttttggggggtcaccagccactccaggggcagggaccatttcttcattttctgaaagcactttaatgattccccttcccccaaactccagggaatggaggggggaccccgccagccaaaacattccccccattcccgacccccctctcctcttctagcccatgcccttccccggtggagggagggagcagggagccctcactctccacgccccttgcttgcatctgtatatagtgtgagcagcaagtaacccttctccctccccccccacccctcctcaatgtagtggccttggatatcctgtttgttaataaagacaattcaaccagctcccacc

SEQ ID NO: 18195 - DNA, 1907 bp, Homo sapiens
  source 1..1907: mol_type = unassigned DNA
gtccagcccagccactcacccaccgagaacagcaaaggccaaagcccaccctcgaaggatgggagtggtgactaccagtctcgtgggctggtaaaggcccctggcaagagctcgttcacgatgtttgtggatctagggatctaccagcctggaggcagtggggacagcatccccatcacagccctagtgggtggagagggcactcggctcgaccagctgcagtacgacgtgaggaagggttctgtggtcaacgtgaatcccaccaacacccgggcccacagtgagacccctgagatccggaagtacaagaagcgattcaactccgagatcctctgtgcagccctttggggggtcaacctgctggtgggcacggagaacgggctgatgttgctggaccgaagtgggcagggcaaggtgtatggactcattgggcggcgacgcttccagcagatggatgtgctggaggggctcaacctgctcatcaccatctcagggaaaaggaacaaactgcgggtgtattacctgtcctggctccggaacaagattctgcacaatgacccagaagtggagaagaagcagggctggaccaccgtgggggacatggagggctgcgggcactaccgtgttgtgaaatacgagcggattaagttcctggtcatcgccctcaagagctccgtggaggtgtatgcctgggcccccaaaccctaccacaaattcatggccttcaagtcctttgccgacctcccccaccgccctctgctggtcgacctgacagtagaggaggggcagcggctcaaggtcatctatggctccagtgctggcttccatgctgtggatgtcgactcggggaacagctatgacatctacatccctgtgcacatccagagccagatcacgccccatgccatcatcttcctccccaacaccgacggcatggagatgctgctgtgctacgaggacgagggtgtctacgtcaacacgtacgggcgcatcattaaggatgtggtgctgcagtggggggagatgcctacttctgtggcctacatctgctccaaccagataatgggctggggtgagaaagccattgagatccgctctgtggagacgggccacctcgacggggtcttcatgcacaaacgagctcagaggctcaagttcctgtgtgagcggaatgacaaggtgttttttgcctcagtccgctctgggggcagcagccaagtttacttcatgactctgaaccgtaactgcatcatgaactggtgacggggccctgggctggggctgtcccacactggacccagctctccccctgcagccaggcttcccgggccgcccctctttcccctccctgggcttttgcttttactggtttgatttcactggagcctgctgggaacgtgacctctgacccctgatgctttcgtgatcacgtgaccatcctcttccccaacatgtcctcttcccaaaactgtgcctgtccccagcttctggggagggacacagcttccccttcccaggaattgagtgggcctagcccctccccccttttctccatttgagaggagagtgcttggggcttgaaccccttaccccactgctggggcagggaccatttcttcattttctgaaagcactttaatgattccccttcccccaaactccagggaatggaggggggaccccgccagccaaaacattccccccattcccgacccccctctcctcttctagcccatgcccttccccggtggagggagggagcagggagccctcactctccacgccccttgcttgcatctgtatatagtgtgagcagcaagtaacccttctccctccccccccacccctcctcaatgtagtggccttggatatcctgtttgttaataaagacaattcaaccagctccc

SEQ ID NO: 18196 - DNA, 4941 bp, Homo sapiens
  source 1..4941: mol_type = unassigned DNA
gtcagtcggtgggtcggtcctcgcgccggccctccccctccccggtctccgggggaggcgcggtggagtccgcccccggggttctccgatgggggagaagcggcgacggcggcagtggagtaaccgagccggagcgtgagcggccccggtgccccgttccccacggaggccatgggcgacccagcccccgcccgcagcctggacgacatcgacctgtccgccctgcgggctttatggttccagttcttctaccattctggaagctccctagaatctcctggaatgcttaatggacctttccagcaccgaaattcaagaattatgactcatcggtcagcagaaaagaccctgctgggatctttgagcttgtggaggtggtcggcaatggaacctacggacaggtgtacaagggtcggcatgtcaagacggggcagctggctgccatcaaggtcatggatgtcacggaggacgaggaggaagagatcaaacaggagatcaacatgctgaaaaagtactctcaccaccgcaacatcgccacctactacggagccttcatcaagaagagccccccgggaaacgatgaccagctctggctggtgatggagttctgtggtgctggttcagtgactgacctggtaaagaacacaaaaggcaacgccctgaaggaggactgtatcgcctatatctgcagggagatcctcaggggtctggcccatctccatgcccacaaggtgatccatcgagacatcaaggggcagaatgtgctgctgacagagaatgctgaggtcaagctagtggattttggggtgagtgctcagctggaccgcaccgtgggcagacggaacactttcattgggactccctactggatggctccagaggtcatcgcctgtgatgagaaccctgatgccacctatgattacaggagtgatatttggtctctaggaatcacagccatcgagatggcagagggagccccccctctgtgtgacatgcaccccatgcgagccctcttcctcattcctcggaaccctccgcccaggctcaagtccaagaagtggtctaagaagttcattgacttcattgacacatgtctcatcaagacttacctgagccgcccacccacggagcagctactgaagtttcccttcatccgggaccagcccacggagcggcaggtccgcatccagcttaaggaccacattgaccgatcccggaagaagcggggtgagaaagaggagacagaatatgagtacagcggcagcgaggaggaagatgacagccatggagaggaaggagagccaagctccatcatgaacgtgcctggagagtcgactctacgccgggagtttctccggctccagcaggaaaataagagcaactcagaggctttaaaacagcagcagcagctgcagcagcagcagcagcgagaccccgaggcacacatcaaacacctgctgcaccagcggcagcggcgcatagaggagcagaaggaggagcggcgccgcgtggaggagcaacagcggcgggagcgggagcagcggaagctgcaggagaaggagcagcagcggcggctggaggacatgcaggctctgcggcgggaggaggagcggcggcaggcggagcgcgagcaggaatacaagcggaagcagctggaggagcagcggcagtcagaacgtctccagaggcagctgcagcaggagcatgcctacctcaagtccctgcagcagcagcaacagcagcagcagcttcagaaacagcagcagcagcagctcctgcctggggacaggaagcccctgtaccattatggtcggggcatgaatcccgctgacaaaccagcctgggcccgagaggtagaagagagaacaaggatgaacaagcagcagaactctcccttggccaagagcaagccaggcagcacggggcctgagccccccatcccccaggcctccccagggcccccaggacccctttcccagactcctcctatgcagaggccggtggagccccaggagggaccgcacaagagcctggtggcacaccgggtcccactgaagccatatgcagcacctgtaccccgatcccagtccctgcaggaccagcccacccgaaacctggctgccttcccagcctcccatgaccccgaccctgccatccccgcacccactgccacgcccagtgcccgaggagctgtcatccgccagaattcagaccccacctctgaaggacctggccccagcccgaatcccccagcctgggtccgcccagataacgaggccccacccaaggtgcctcagaggacctcatctatcgccactgcccttaacaccagtggggccggagggtcccggccagcccaggcagtccgtgccagtaaccccgacctcaggaggagcgaccctggctgggaacgctcggacagcgtccttccagcctctcacgggcacctcccccaggctggctcactggagcggaaccgcgtgggagtctcctccaaaccggacagctcccctgtgctctcccctgggaataaagccaagcccgacgaccaccgctcacggccaggccggcccgcagactttgtgttgctgaaagagcggactctggacgaggcccctcggcctcccaagaaggccatggactactcgtcgtccagcgaggaggtggaaagcagtgaggacgacgaggaggaaggcgaaggcgggccagcagaggggagcagagatacccctgggggccgcagcgatggggatacagacagcgtcagcaccatggtggtccacgacgtcgaggagatcaccgggacccagcccccatacgggggcggcaccatggtggtccagcgcacccctgaagaggagcggaacctgctgcatgctgacagcaatgggtacacaaacctgcctgacgtggtccagcccagccactcacccaccgagaacagcaaaggccaaagcccaccctcgaaggatgggagtggtgactaccagtctcgtgggctggtaaaggcccctggcaagagctcgttcacgatgtttgtggatctagggatctaccagcctggaggcagtggggacagcatccccatcacagccctagtgggtggagagggcactcggctcgaccagctgcagtacgacgtgaggaagggttctgtggtcaacgtgaatcccaccaacacccgggcccacagtgagacccctgagatccggaagtacaagaagcgattcaactccgagatcctctgtgcagccctttggggggtcaacctgctggtgggcacggagaacgggctgatgttgctggaccgaagtgggcagggcaaggtgtatggactcattgggcggcgacgcttccagcagatggatgtgctggaggggctcaacctgctcatcaccatctcagggaaaaggaacaaactgcgggtgtattacctgtcctggctccggaacaagattctgcacaatgacccagaagtggagaagaagcagggctggaccaccgtgggggacatggagggctgcgggcactaccgtgttgtgaaatacgagcggattaagttcctggtcatcgccctcaagagctccgtggaggtgtatgcctgggcccccaaaccctaccacaaattcatggccttcaagtcctttgccgacctcccccaccgccctctgctggtcgacctgacagtagaggaggggcagcggctcaaggtcatctatggctccagtgctggcttccatgctgtggatgtcgactcggggaacagctatgacatctacatccctgtgcacatccagagccagatcacgccccatgccatcatcttcctccccaacaccgacggcatggagatgctgctgtgctacgaggacgagggtgtctacgtcaacacgtacgggcgcatcattaaggatgtggtgctgcagtggggggagatgcctacttctgtggcctacatctgctccaaccagataatgggctggggtgagaaagccattgagatccgctctgtggagacgggccacctcgacggggtcttcatgcacaaacgagctcagaggctcaagttcctgtgtgagcggaatgacaaggtgttttttgcctcagtccgctctgggggcagcagccaagtttacttcatgactctgaaccgtaactgcatcatgaactggtgacggggccctgggctggggctgtcccacactggacccagctctccccctgcagccaggcttcccgggccgcccctctttcccctccctgggcttttgcttttactggtttgatttcactggagcctgctgggaacgtgacctctgacccctgatgctttcgtgatcacgtgaccatcctcttccccaacatgtcctcttcccaaaactgtgcctgtccccagcttctggggagggacacagcttccccttcccaggaattgagtgggcctagcccctccccccttttctccatttgagaggagagtgcttggggcttgaaccccttaccccactgctgctgactgggcagggccctggacccctttatttgcacgtcaggggagccggctccccccttgaatgtaccagaccctggggggggtcactgggccctagatttttggggggtcaccagccactccaggggcagggaccatttcttcattttctgaaagcactttaatgattccccttcccccaaactccagggaatggaggggggaccccgccagccaaaacattccccccattcccgacccccctctcctcttctagcccatgcccttccccggtggagggagggagcagggagccctcactctccacgccccttgcttgcatctgtatatagtgtgagcagcaagtaacccttctccctccccccccacccctcctcaatgtagtggccttggatatcctgtttgttaataaagacaattcaaccagc

SEQ ID NO: 18197 - DNA, 2170 bp, Homo sapiens
  source 1..2170: mol_type = unassigned DNA
agctgagccaccacctcccactccccgcgccgccccccagaaggacgcactgctctgattggcccggaagggttcaggagctgcccagcctttgggctcggggccaaaggccgcaccttcccccagcggccccgggcgaccagcgcgctccggccttgccgccgccacctcgcggagaagccagccatgggcgccgccggctcctccgcgctggcgcgctttgtcctcctcgcgcaatcccggcccgggtggctcggggttgccgcgctgggcctgaccgcggtggcgctgggggctgtcgcctggcgccgcgcatggcccacgcggcgccggcggctgctgcagcaggtgggcacagtggcgcagctctggatctaccctgtgaaatcctgcaagggggtgccggtgagcgaggcggagtgcacggccatggggctgcgcagcggcaacctgcgggacaggttttggcttgtgatcaaccaggagggaaacatggttactgctcgccaggaacctcgcctggtcctgatttccctgacctgcgatggtgacaccctgactctcagtgcagcctacacaaaggacctactactgcctatcaaaacgcccaccacaaatgcagtgcacaagtgcagagtgcacggcctggagatagagggcagggactgtggcgaggccaccgcccagtggataaccagcttcctgaagtcacagccctaccgcctggtgcacttcgagcctcacatgcgaccgagacgtcctcatcaaatagcagacttgttccgacccaaggaccagattgcttactcagacaccagcccattcttgatcctttctgaggcgtcgctggcggatctcaactccaggctagagaagaaagttaaagcaaccaacttcaggcccaatattgtaatttcaggatgcgatgtctatgcagaggattcttgggatgagcttcttattggtgacgtggaactgaaaagggtgatggcttgttccagatgcattttaaccacagtggacccagacaccggtgtcatgagcaggaaggaaccgctggaaacactgaagagttatcgccagtgtgacccttcagaacgaaagttatatggaaaatcaccactctttgggcagtattttgtgctggaaaacccagggaccatcaaagtgggagaccctgtgtacctgctgggccagtaatgggaaccgtatgtcctggaatattagatgccttttaaaaatgttctcaaaaatgacaacacttgaagcatggtgtttcagaactgagacctctacattttctttaaatttgtgattttcacatttttcgtcttttggacttctggtgtctcaatgcttcaatgtcccagtgcaaaaagtaaagaaatatagtctcaataacttagtaggacttcagtaagtcacttaaatgacaagacaggattctgaaaactccccgtttaactgattatggaatagttctttctcctgcttctccgtttatctaccaagagcgcagacttgcatcctgtcactaccactcgttagagaaagagaagaagagaaagaggaagagtgggtgggctggaagaatatcctagaatgtgttattgcccctgttcatgaggtacgcaatgaaaattaaattgcaccccaaatatggctggaatgccacttcccttttcttctcaagccccgggctagcttttgaaatggcataaagactgaggtgaccttcaggaagcactgcagatattaattttccatagatctggatctggccctgctgcttctcagacagcattggatttcctaaaggtgctcaggaggatggttgtgtagtcatggaggacccctggatccttgccattcccctcagctaatgacggagtgctccttctccagttccgggtgaaaaagttctgaattctgtggaggagaagaaaagtgattcagtgatttcagatagactactgaaaacctttaaagggggaaaaggaaagcatatgtcagttgtttaaaacccaatatctattttttaactgattgtataactctaagatctgatgaagtatattttttattgccattttgtcctttgattatattgggaagttgactaaacttgaaaaatgtttttaaaactgtgaataaatggaagctactttga

SEQ ID NO: 18198 - DNA, 1335 bp, Homo sapiens
  source 1..1335: mol_type = unassigned DNA
cgtcgctcccacggcgcccagggtacccccgccgctgtctgcctgtcttcctccattaccgcgcaggcttggtcaccgcattaaggcattcccgctctccgcggaactgctctgccgtctcggcggtgaaagtgtgagagggtccgtagttgggtcaactttgactcctctcgcctgcccggatccttaagggcctcctcgtcctcccggtctccggtcgctgccgggtctgtgcgccggtccgcgcccgccctcgctctgccatgggcgcttccagctcctccgcgctggcccgcctcggcctcccagcccggccctggcccaggtggctcggggtcgccgcgctaggactggccgccgtggccctggggactgtcgcctggcgccgcgcatggcccaggcggcgccggcggctgcagcaggtgggcaccgtggcgaagctctggatctacccggtgaaatcctgcaaaggggtgccggtgagcgaggctgagtgcacggccatggggctgcgcagcggcaacctgcgggacaggttttggctggtgattaaggaagatggacacatggtcactgcccgacaggagcctcgcctcgtgctcatctccatcatttatgagaataactgcctgatcttcagggctccagacatggaccagctggttttgcctagcaagcagccttcctcaaacaaactccacaactgcaggatatttggccttgacattaaaggcagagactgtggcaatgaggcagctaagtggttcaccaacttcttgaaaactgaagcgtatagattggttcaatttgagacaaacatgaagggaagaacatcaagaaaacttctccccactcttgatcagaatttccaggtggcctacccagactactgcccgctcctgatcatgacagatgcctccctggtagatttgaataccaggatggagaagaaaatgaaaatggagaatttcaggccaaatattgtggtgaccggctgtgatgcttttgaggaggcttcagcaaccaggagggattgactgagatcttaacaacagcagcaacgatacatcagcaaatccttattatccagccttcaactatctttaccctggaaaacaatctcgatttttgacttttcaaagttgtgtatgctccaggttaatgcaaggaaagtattagaggggggaatatgaaagtatatatataaattttaggtactgaaggctttaaaaataattaagatcatcaaaaatgctattttgaatgttatcatggctattacacttttacttcctgactttaatattgatgaataaagcaagtttaatgaatcaa

SEQ ID NO: 18199 - DNA, 2127 bp, Homo sapiens
  source 1..2127: mol_type = unassigned DNA
ggcttggtcaccgcattaaggcattcccgctctccgcggaactgctctgccgtctcggcggtgaaagtgtgagagggtccgtagttgggtcaactttgactcctctcgcctgcccggatccttaagggcctcctcgtcctcccggtctccggtcgctgccgggtctgtgcgccggtccgcgcccgccctcgctctgccatgggcgcttccagctcctccgcgctggcccgcctcggcctcccagcccggccctggcccaggtggctcggggtcgccgcgctaggactggccgccgtggccctggggactgtcgcctggcgccgcgcatggcccaggcggcgccggcggctgcagcaggtgggcaccgtggcgaagctctggatctacccggtgaaatcctgcaaaggggtgccggtgagcgaggctgagtgcacggccatggggctgcgcagcggcaacctgcgggacaggttttggctggtgattaaggaagatggacacatggtcactgcccgacaggagcctcgcctcgtgctcatctccatcatttatgagaataactgcctgatcttcagggctccagacatggaccagctggttttgcctagcaagcagccttcctcaaacaaactccacaactgcaggatatttggccttgacattaaaggcagagactgtggcaatgaggcagctaagtggttcaccaacttcttgaaaactgaagcgtatagattggttcaatttgagacaaacatgaagggaagaacatcaagaaaacttctccccactcttgatcagaatttccaggtggcctacccagactactgcccgctcctgatcatgacagatgcctccctggtagatttgaataccaggatggagaagaaaatgaaaatggagaatttcaggccaaatattgtggtgaccggctgtgatgcttttgaggaggatacctgggatgaactcctaattggtagtgtagaagtgaaaaaggtaatggcatgccccaggtgtattttgacaacggtggacccagacactggagtcatagacaggaaacagccactggacaccctgaagagctaccgcctgtgtgatccttctgagagggaattgtacaagttgtctccactttttgggatctattattcagtggaaaaaattggaagcctgagagttggtgaccctgtgtatcggatggtgtagtgatgagtgatggatccactagggtgatatggcttcagcaaccaggagggattgactgagatcttaacaacagcagcaacgatacatcagcaaatccttattatccagccttcaactatctttaccctggaaaacaatctcgatttttgacttttcaaagttgtgtatgctccaggttaatgcaaggaaagtattagaggggggaatatgaaagtatatatataaattttaggtactgaaggctttaaaaataattaagatcatcaaaaatgctattttgaatgttatcatggctattacacttttacttcctgactttaatattgatgaataaagcaagtttaatgaatcaactaaaaagctgcaaaaatgtttttaaaatgtgtgccttttattacctatcagtctatgttttgggagaaatgggaagcaacagatcactgtgtcctgatgtgcaggacgcatgttaccacactcacaaatgcctaatattggtctttatgtggccattgagtcctgttgactttccactcatgtgctttttactctagcattatggaatctgggctgtacttgagtatggaaattctcttatagacttagttttagtactctattacacctttactaagccacataaaagtaatctgtttgtgtgtaactgccagatataccacctggaattccaagtaagataaggaagaggatgacatttaaaagagaatggaattttgagagtaggaatgcaaggaagacagcatgaacatatttttttcagtgcaaataattttttcgtaacaaagaaacgaacaactttggtatgatcttaagcaaaaatactcactgaaatagtatgtggatgaattcacctacttacaattttatggtttctttgtaaataataaatgtgaatctcaatcc

SEQ ID NO: 18200 - DNA, 585 bp, Homo sapiens
  source 1..585: mol_type = unassigned DNA
ggacacatggtcactgcccgacaggagcctcgcctcgtgctcatctccatcatttatgagaataactgcctgatcttcagggctccagacatggaccagctggttttgcctagcaagcagccttcctcaaacaaactccacaactgcaggatatttggccttgacattaaaggcagagactgtggcaatgaggcagctaagtggttcaccaacttcttgaaaactgaagcgtatagattggttcaatttgagacaaacatgaagggaagaacatcaagaaaacttctccccactcttgatcagaatttccaggtggcctacccagactactgcccgctcctgatcatgacagatgcctccctggtagatttgaataccaggatggagaagaaaatgaaaatggagaatttcaggccaaatattgtggtgaccggctgtgatgcttttgaggaggatacctgggatgaactcctaattggtagtgtagaagtgaaaaaggtaatggcatgccccaggtaaggagcctagctagaccccaggactgtggtgtggcccattcattggttcctaagcatcacctaaccc

SEQ ID NO: 18201 - DNA, 575 bp, Homo sapiens
  source 1..575: mol_type = unassigned DNA
gcgggaagggtcctgggccccgggcggcggtcgccaggtctcagggccgggggtacccgagtctcgtttcctctcagtccatccacccttcatggggccagagccctctctccagaatctgagcagcaatgccgtttgctgaagacaagacctataagtatatctgccgcaatttcagcaatttttgcaatgtggatgttgtagagattctgccttacctgccctgcctcacagcaagagaccaggatcgactgcgggccacctgcacactctcagggaaccgggacaccctctggcatctcttcaatacccttcagctccctacatgggctggggaggagacacctggtgggcagagctcaggcagaggtttggatttcagctccctcacttccggggctgtgtggctttggcagatgtcagacttctggtcttgcttctccacgtggacagtgagtatctggctcattcttcactgggttcttctgagattgaacctacaggtgtttgccaagtgcctggcccagagcaagtggccactgcttctcccatctctctcctgcccaacctggtag

SEQ ID NO: 18202 - DNA, 1450 bp, Homo sapiens
  source 1..1450: mol_type = unassigned DNA
atgccgtttgctgaagacaagacctataagtatatctgccgcaatttcagcaatttttgcaatgtggatgttgtagagattctgccttacctgccctgcctcacagcaagagaccaggatcgactgcgggccacctgcacactctcagggaaccgggacaccctctggcatctcttcaatacccttcagcggcggcccggctgggtggagtacttcattgcggcactgaggggctgtgagctagttgatctcgcggacgaagtggcctctgtctaccagagctaccagcctcaattcagagcaagccctgcagacgctcagccccagagccatcccaaggaatccagatggtggccccctggagtcctcctctgacctggcagccctcagccctctgacctccagcgggcatcaggagcaggacacagaactgggcagtacccacacagcaggtgcgacctccagcctcacaccatcccgtgggcctgtgtctccatctgtctccttccagcccctggcccgttccacccccagggcaagccgcttgcctggacccacagggtcagttgtatctactggcacctccttctcctcctcatcccctggcttggcctctgcaggggctgcagagggtaaacagggtgcagagagtgaccaggccgagcctatcatctgctccagtggggcagaggcacctgccaactctctgccctccaaagtgcctaccaccttgatgcctgtgaacacagtggccctgaaagtgcctgccaacccagcatctgtcagcacagtgccctccaagttgccaactagctcaaagccccctggtgcagtgccttctaatgcgctcaccaatccagcaccatccaaattgcccatcaactcaacccgtgctggcatggtgccatccaaagtgcctactagcatggtgctcaccaaggtgtctgccagcacagtccccactgacgggagcagcagaaatgaggagaccccagcagctccaacacccgccggcgccactggaggcagctcagcctggctagacagcagctctgagaataggggccttgggtcggagctgagtaagcctggcgtgctggcatcccaggtagacagcccgttctcgggctgcttcgaggatcttgccatcagtgccagcacctccttgggcatggggccctgccatggcccagaggagaatgagtataagtccgagggcacctttgggatccacgtggctgagaaccccagcatccagctcctggagggcaaccctgggccacctgcggacccggatggcggccccaggccacaagccgaccggaagttccaggagagggaggtgccatgccacaggccctcacctggggctctgtggctccaggtggctgtgacaggggtgctggtagtcacactcctggtggtgctgtaccggcggcgtctgcactag

SEQ ID NO: 18203 - DNA, 1707 bp, Homo sapiens
  source 1..1707: mol_type = unassigned DNA
gctgcgggaagggtcctgggccccgggcggcggtcgccaggtctcagggccgggggtacccgagtctcgtttcctctcagtccatccacccttcatggggccagagccctctctccagaatctgagcagcaatgccgtttgctgaagacaagacctataagtatatctgccgcaatttcagcaatttttgcaatgtggatgttgtagagattctgccttacctgccctgcctcacagcaagagaccagggacctcggaccgtcccccagacccactggagccaccgtcacttcctgctgagaggccagggccccccacacctgctgcggcccacagcatcccctacaacagctgcagagagaaggagccaagttaccccatgcctgtccaggagacccaggcgccagagtccccaggagagaattcagagcaagccctgcagacgctcagccccagagccatcccaaggaatccagatggtggccccctggagtcctcctctgacctggcagccctcagccctctgacctccagcgggcatcaggagcaggacacagaactgggcagtacccacacagcaggtgcgacctccagcctcacaccatcccgtgggcctgtgtctccatctgtctccttccagcccctggcccgttccacccccagggcaagccgcttgcctggacccacagggtcagttgtatctactggcacctccttctcctcctcatcccctggcttggcctctgcaggggctgcagagggtaaacagggtgcagagagtgaccaggccgagcctatcatctgctccagtggggcagaggcacctgccaactctctgccctccaaagtgcctaccaccttgatgcctgtgaacacagtggccctgaaagtgcctgccaacccagcatctgtcagcacagtgccctccaagttgccaactagctcaaagccccctggtgcagtgccttctaatgcgctcaccaatccagcaccatccaaattgcccatcaactcaacccgtgctggcatggtgccatccaaagtgcctactagcatggtgctcaccaaggtgtctgccagcacagtccccactgacgggagcagcagaaatgaggagaccccagcagctccaacacccgccggcgccactggaggcagctcagcctggctagacagcagctctgagaataggggccttgggtcggagctgagtaagcctggcgtgctggcatcccaggtagacagcccgttctcgggctgcttcgaggatcttgccatcagtgccagcacctccttgggcatggggccctgccatggcccagaggagaatgagtataagtccgagggcacctttgggatccacgtggctgagaaccccagcatccagctcctggagggcaaccctgggccacctgcggacccggatggcggccccaggccacaagccgaccggaagttccaggagagggaggtgccatgccacaggccctcacctggggctctgtggctccaggtggctgtgacaggggtgctggtagtcacactcctggtggtgctgtaccggcggcgtctgcactagtgaagccctgggctcttcccaccacccatctgttccgttcctgcagtacacctggcccctctccgaagccccttgtccctttcttggggattgtggaggctgggtcagaggggagttaagggactgca

SEQ ID NO: 18204 - DNA, 4237 bp, Homo sapiens
  source 1..4237: mol_type = unassigned DNA
gcgggaagggtcctgggccccgggcggcggtcgccaggtctcagggccgggggtacccgagtctcgtttcctctcagtccatccacccttcatggggccagagccctctctccagaatctgagcagcaatgccgtttgctgaagacaagacctataagtatatctgccgcaatttcagcaatttttgcaatgtggatgttgtagagattctgccttacctgccctgcctcacagcaagagaccaggatcgactgcgggccacctgcacactctcagggaaccgggacaccctctggcatctcttcaatacccttcagcggcggcccggctgggtggagtacttcattgcggcactgaggggctgtgagctagttgatctcgcggacgaagtggcctctgtctaccagagctaccagcctcggacctcggaccgtcccccagacccactggagccaccgtcacttcctgctgagaggccagggccccccacacctgctgcggcccacagcatcccctacaacagctgcagagagaaggagccaagttaccccatgcctgtccaggagacccaggcgccagagtccccaggagagaattcagagcaagccctgcagacgctcagccccagagccatcccaaggaatccagatggtggccccctggagtcctcctctgacctggcagccctcagccctctgacctccagcgggcatcaggagcaggacacagaactgggcagtacccacacagcaggtgcgacctccagcctcacaccatcccgtgggcctgtgtctccatctgtctccttccagcccctggcccgttccacccccagggcaagccgcttgcctggacccacagggtcagttgtatctactggcacctccttctcctcctcatcccctggcttggcctctgcaggggctgcagagggtaaacagggtgcagagagtgaccaggccgagcctatcatctgctccagtggggcagaggcacctgccaactctctgccctccaaagtgcctaccaccttgatgcctgtgaacacagtggccctgaaagtgcctgccaacccagcatctgtcagcacagtgccctccaagttgccaactagctcaaagccccctggtgcagtgccttctaatgcgctcaccaatccagcaccatccaaattgcccatcaactcaacccgtgctggcatggtgccatccaaagtgcctactagcatggtgctcaccaaggtgtctgccagcacagtccccactgacgggagcagcagaaatgaggagaccccagcagctccaacacccgccggcgccactggaggcagctcagcctggctagacagcagctctgagaataggggccttgggtcggagctgagtaagcctggcgtgctggcatcccaggtagacagcccgttctcgggctgcttcgaggatcttgccatcagtgccagcacctccttgggcatggggccctgccatggcccagaggagaatgagtataagtccgagggcacctttgggatccacgtggctgagaaccccagcatccagctcctggagggcaaccctgggccacctgcggacccggatggcggccccaggccacaagccgaccggaagttccaggagagggaggtgccatgccacaggccctcacctggggctctgtggctccaggtggctgtgacaggggtgctggtagtcacactcctggtggtgctgtaccggcggcgtctgcactagtgaagccctgggctcttcccaccacccatctgttccgttcctgcagtacacctggcccctctccgaagccccttgtccctttcttggggattgtggaggctgggtcagaggggagttaagggactgcaggcctggcagcaggacatgccttggctgaaccaagtcctgagagcagcatctctgtccccacggtgccttgtgtgggtccccgtccttggctttctgggtcctgggctgcccccagtgctccagaccttccccactggcaatccaggttatcatccatgtcctccagaggagcttcctcctccaggcctcagccctgttggcccaggtggagcaggagggaccactggaacatgtggtgcttgggaatgcctctcctgttgcattggtccctgaaggcctcagggcaggtatgtggtgtgtgggcgactccacaagacctgcctcccatcctggcagcccagcctgagaccgttgcattgaggcaggcaggagcggcagggtggctgctctccaggagcccaactgccttgagttcctgccccactgggccccctcccctgctgggcaatcctgggaaggtctggaggttcctgtggacctcagggaagccaggggcagctgtcaggcctgaggaagacctgtggagctcctctccagcctcctctttccctcccctctggtctccattctcttcagctccctacatgggctggggaggagacacctggtgggcagagctcaggcagaggtttggatttcagctccctcacttccggggctgtgtggctttggcagatgtcagacttctggtcttgcttctccacgtggacagtgagtatctggctcattcttcactgggttcttctgagattgaacctacaggtgtttgccaagtgcctggcccagagcaagtggccactgcttctcccatctctctcctgcccaacctggtagagctgagggcatgagaggcagagtgcacagtggtcaagggtgcagctctgcagcacaggcagcctaggcctgcgtcccaacctgcctctcaccagctctgtgaccttgggcaagggatttatctgtctgtcccttagttttctcacctgtaaaaggaggataagtatatatatatatttcccagtgttgtgaagattaaaggagtttatcgatgtaggtcttaggatgagtcctggcatttaccaagggttggatatatgttattatcactattaagtgttgagggtccaggcatgctgggcaacagggaccccatctctacaaaaaagtttaaaaaattagccaggcgtggtggtgcacctgtcgtcttagctacttgggaggctgaggtgggaggatcacttgagcccagaagcttgaagctgcagtgagctaggatcgtgccactgcactccaacctgggtgagagagcgagaccctgtctcaagaaaaagaaaaatgcagagaaacaggagtcttggctactcctttagaggcagactcagaccctcctgcctcacagctttatctttgtatttgccccttactttatcttgtgccttgagaaattgctggggagagaggtatgtccactgggcagctgtacaggatggaggatatagggcgtttccactcccagcagccaggttccctcaccccaagctcacccactgttggggagattatctacaataacaccagaaacacattggggtggattgggggtatccttatgggttcttttcagggaaccattgctggacaaggcacaggagccacctccatttctgagctctgcaagggacaagaactagagccatcaggggctgggctcactgtggccccaccccaagccgtcagcctccagggatctacaccctgccttggctgctacagctttttcactccactgccctaggggagttcagcaacctaatgatctctatctctgaacatctcttcatcccatgctccaagtccagcaacctgcaccctggaaccaggagtggaccctacccgagctgtctgtattaatccccatcccccaccaccaatcttaaaaagccctctgtccccctaccctaaaccccagttaggtacccatgctgggcaggtcagttaacaatttatgcacaggtactagttttattgtattaccgttccagggtagctttgaaaaaagtatctcaaaaaggcaacatgggccgagcgcagtggctcacgcctgtaatcccagcactttgggaggccaaggtgggcagatcgcctgaggtctggagttcaagaccagcctggccaacagggtgaaaccccgtctctacaaaaataagaaaattagccaggtgtagtggcagacgtctgtaatcccagctattcaggaggctgaggcacgagaattccatgaacccaggatgcggaggttgcagtgagccgagattgtgccactgcgctccagcctgggcgacagagtggtattctgtttc

SEQ ID NO: 18205 - DNA, 2874 bp, Homo sapiens
  source 1..2874: mol_type = unassigned DNA
agttgagagatggcggccgccgcaggtagatcgctcctgctgctcctctcctctcggggcggcggcggcgggggcgccggcggctgcggggcgctgactgccggctgcttccctgggctgggcgtcagccgccaccggcagcagcagcaccaccggacggtacaccagaggatcgcttcctggcagaatttgggagctgtttattgcagcactgttgtgccctctgatgatgttacagtggtttatcaaaatgggttacctgtgatatctgtgaggctaccatcccggcgtgaacgctgtcagttcacactcaagcctatctctgactctgttggtgtatttttacgacaactgcaagaagaggatcggggaattgacagagttgctatctattcaccagatggtgttcgcgttgctgcttcaacaggaatagacctcctcctccttgatgactttaagctggtcattaatgacttaacataccacgtacgaccaccaaaaagagtagagatggggttttgccatgttggccagaatggttttgaactcctgacctcaagttatctacctgcctcagcctcccaaagtgccgagattatagccgtacgaattgagattagcagaaaagctgagaagaggaccactttggtgctatggggtggccttgcctacatggccacacagtttggcattttggcccggcttacctggtgggaatattcctgggacatcatggagccagtaacatacttcatcacttatggaagtgccatggcaatgtatgcatattttgtaatgacacgccaggaatatgtttatccagaagccagagacagacaatacttactatttttccataaaggagccaaaaagtcacgttttgacctagagaaatacaatcaactcaaggatgcaattgctcaggcagaaatggaccttaagagactgagagacccattacaagtacatctgcctctccgacaaattggtgaaaaagattgatctgcaaaaagcctctgaatcctggcagaaggaacacctgtttgcctttttaattaaagcattgcaggtggaagctgggagccatgtggggggtagagcgtttttacctttaattataaaacaaaaacagaaaggatctgagggaagaagggaatgttaaaacctgaggatcaggcattgtggaatataagctcaaagggcttagtgaatattgtcttaaccaagtatctcagtttctggatgaaaatgatgcagttatatagttgagagattcataaagagaaaacaatgctgggggtgttcgtttcttgcatcttctttgcagagtcagcaaaagagtaacacaccagcaccccactcgactctatttgtttttaatttaactgtccctatttttgacataggagtaaataaatatactagaaaagcaaattctcatgatatgctaaaatatcattagcatttattttaaattggacccagtctctgcagagttaccaggaatctttccttccagcatccctttactgaccacctacctgtacctcttggttacactcattttttccatttgataattggaaccaacttataactgtttaataattgacactttagattatctcttaataccttcttaaatgtctatatatcccagtgctctggatcagtgtctaaaaatcactggcaacactgcatgaggttgttggttttgttttgttttattaattagtctttcacaggaggaataattgccctcctttatatacttatctattgataatcccctctccctccagaacacaaatcagagggaaagggggtgttcagctgtactaccaaatcaggaagatgtaaggtttacaaattggctaagaatcatggctctgtagccatttcaaccagaataattttattgctaatctgctttgtgtgacagcattccaggccagccagatgggactgccttgtctggaggctttgttcatctcgaaggacacacacttccacactgtttgtgagccctcccacctccacaacttcagttgtaaatcaagtgtgtggatctcaaagggtgcaatttatctttatataggaatacatttctagggcttccttcaagcccactctcttcaccctattttttcttatcttaaattgagagaaagagaattaatcttatactttgtcaaaacattttctaccatatttccagatgacatctgcgcttgaagagtcaaaggaatctgtgtctaatatcctgtttttaactgctgtaggggcaggatggaaaggatgatgggggctgccacaccactgattggccttttctttcacgtgattcatccttcctcattgtggcaaggagtttctttctctttttcttcctcctttgggatcattgtgtatgaaaagaaaaactttaaatgacaaacccagactccaggtgccttgcaaaggttgaaggccagccaggattgctgctgctgctgctactcctgccaacacccctttcattggcatgacggaatgaaaggatgcatgtctccacttcctgaccctccgcccacttccttctccctccaccacccccagtcgtcagctccttccctcatttatttttgttaagttgtgtgaattatttttaacccatttatcctgtttgtgcatagggtttttaagaagaaacagcacagtgcaacgagcaaatctttttggggtgtgtgggaagcaagggagggaggacatggagaaaagttctttaaacaaatagcaaactattgaacatgtgtaaaatcctgtatcatttatgaaatatgtataaaaagcaatgtaccttctggaacaataaatacttattcaatttttgaa

SEQ ID NO: 18206 - DNA, 2949 bp, Homo sapiens
  source 1..2949: mol_type = unassigned DNA
ggcgccgtttccagttgagagatggcggccgccgcaggtagatcgctcctgctgctcctctcctctcggggcggcggcggcgggggcgccggcggctgcggggcgctgactgccggctgcttccctgggctgggcgtcagccgccaccggcagcagcagcaccaccggacggtacaccagaggatcgcttcctggcagaatttgggagctgtttattgcagcactgttgtgccctctgatgatgttacagtggtttatcaaaatgggttacctgtgatatctgtgaggctaccatcccggcgtgaacgctgtcagttcacactcaagcctatctctgactctgttggtgtatttttacgacaactgcaagaagaggatcggggaattgacagagttgctatctattcaccagatggtgttcgcgttgctgcttcaacaggaatagacctcctcctccttgatgactttaagctggtcattaatgacttaacataccacgtacgaccaccaaaaagagacctcttaagtcatgaaaatgcagcaacgctgaatgatgtaaagacattggtccagcaactatacaccacactgtgcattgagcagcaccagttaaacaaggaaagggagcttattgaaagactagaggatctcaaagagcagctggctcccctggaaaaggtacgaattgagattagcagaaaagctgagaagaggaccactttggtgctatggggtggccttgcctacatggccacacagtttggcattttggcccggcttacctggtgggaatattcctgggacatcatggagccagtaacatacttcatcacttatggaagtgccatggcaatgtatgcatattttgtaatgacacgccaggaatatgtttatccagaagccagagacagacaatacttactatttttccataaaggagccaaaaagtcacgttttgacctagagaaatacaatcaactcaaggatgcaattgctcaggcagaaatggaccttaagagactgagagacccattacaagtacatctgcctctccgacaaattggtgaaaaagattgatctgcaaaaagcctctgaatcctggcagaaggaacacctgtttgcctttttaattaaagcattgcaggtggaagctgggagccatgtggggggtagagcgtttttacctttaattataaaacaaaaacagaaaggatctgagggaagaagggaatgttaaaacctgaggatcaggcattgtggaatataagctcaaagggcttagtgaatattgtcttaaccaagtatctcagtttctggatgaaaatgatgcagttatatagttgagagattcataaagagaaaacaatgctgggggtgttcgtttcttgcatcttctttgcagagtcagcaaaagagtaacacaccagcaccccactcgactctatttgtttttaatttaactgtccctatttttgacataggagtaaataaatatactagaaaagcaaattctcatgatatgctaaaatatcattagcatttattttaaattggacccagtctctgcagagttaccaggaatctttccttccagcatccctttactgaccacctacctgtacctcttggttacactcattttttccatttgataattggaaccaacttataactgtttaataattgacactttagattatctcttaataccttcttaaatgtctatatatcccagtgctctggatcagtgtctaaaaatcactggcaacactgcatgaggttgttggttttgttttgttttattaattagtctttcacaggaggaataattgccctcctttatatacttatctattgataatcccctctccctccagaacacaaatcagagggaaagggggtgttcagctgtactaccaaatcaggaagatgtaaggtttacaaattggctaagaatcatggctctgtagccatttcaaccagaataattttattgctaatctgctttgtgtgacagcattccaggccagccagatgggactgccttgtctggaggctttgttcatctcgaaggacacacacttccacactgtttgtgagccctcccacctccacaacttcagttgtaaatcaagtgtgtggatctcaaagggtgcaatttatctttatataggaatacatttctagggcttccttcaagcccactctcttcaccctattttttcttatcttaaattgagagaaagagaattaatcttatactttgtcaaaacattttctaccatatttccagatgacatctgcgcttgaagagtcaaaggaatctgtgtctaatatcctgtttttaactgctgtaggggcaggatggaaaggatgatgggggctgccacaccactgattggccttttctttcacgtgattcatccttcctcattgtggcaaggagtttctttctctttttcttcctcctttgggatcattgtgtatgaaaagaaaaactttaaatgacaaacccagactccaggtgccttgcaaaggttgaaggccagccaggattgctgctgctgctgctactcctgccaacacccctttcattggcatgacggaatgaaaggatgcatgtctccacttcctgaccctccgcccacttccttctccctccaccacccccagtcgtcagctccttccctcatttatttttgttaagttgtgtgaattatttttaacccatttatcctgtttgtgcatagggtttttaagaagaaacagcacagtgcaacgagcaaatctttttggggtgtgtgggaagcaagggagggaggacatggagaaaagttctttaaacaaatagcaaactattgaacatgtgtaaaatcctgtatcatttatgaaatatgtataaaaagcaatgtaccttctggaacaataaatacttattcaatttttgaa

SEQ ID NO: 18207 - DNA, 3224 bp, Homo sapiens
  source 1..3224: mol_type = unassigned DNA
cttcgttcttaacagccctgccccaaggctccctgaacggagccagatggaagttgtcccctttccctcctcctccgggcgggttggggagttctgagttgccgcggccgccttgtgtgtgccaggagagtggcagtgccatgctgctgggagctgccccggagagcagcccaggaccccggcggggccgcccctcgtcctctctcgtccccgaggggtcgggcaggaaggaaaatcaaactttattcccctctgtgacttcctctgtgtgtgtgcatggggaaccggctccctcgagatggatgctgcattgcttcaggaggcaagcttcatcctcttgggtccttaaaggtgcttttgggggtcctttcgagggctactgtataagcgtgttcacgcgtgcctgaagcgggaagggtggtcagcaggcacaggagaagcgaatatggtacaccagaggatcgcttcctggcagaatttgggagctgtttattgcagcactgttgtgccctctgatgatgttacagtggtttatcaaaatgggttacctgtgatatctgtgaggctaccatcccggcgtgaacgctgtcagttcacactcaagcctatctctgactctgttggtgtatttttacgacaactgcaagaagaggatcggggaattgacagagttgctatctattcaccagatggtgttcgcgttgctgcttcaacaggaatagacctcctcctccttgatgactttaagctggtcattaatgacttaacataccacgtacgaccaccaaaaagagacctcttaagtcatgaaaatgcagcaacgctgaatgatgtaaagacattggtccagcaactatacaccacactgtgcattgagcagcaccagttaaacaaggaaagggagcttattgaaagactagaggatctcaaagagcagctggctcccctggaaaaggtacgaattgagattagcagaaaagctgagaagaggaccactttggtgctatggggtggccttgcctacatggccacacagtttggcattttggcccggcttacctggtgggaatattcctgggacatcatggagccagtaacatacttcatcacttatggaagtgccatggcaatgtatgcatattttgtaatgacacgccaggaatatgtttatccagaagccagagacagacaatacttactatttttccataaaggagccaaaaagtcacgttttgacctagagaaatacaatcaactcaaggatgcaattgctcaggcagaaatggaccttaagagactgagagacccattacaagtacatctgcctctccgacaaattggtgaaaaagattgatctgcaaaaagcctctgaatcctggcagaaggaacacctgtttgcctttttaattaaagcattgcaggtggaagctgggagccatgtggggggtagagcgtttttacctttaattataaaacaaaaacagaaaggatctgagggaagaagggaatgttaaaacctgaggatcaggcattgtggaatataagctcaaagggcttagtgaatattgtcttaaccaagtatctcagtttctggatgaaaatgatgcagttatatagttgagagattcataaagagaaaacaatgctgggggtgttcgtttcttgcatcttctttgcagagtcagcaaaagagtaacacaccagcaccccactcgactctatttgtttttaatttaactgtccctatttttgacataggagtaaataaatatactagaaaagcaaattctcatgatatgctaaaatatcattagcatttattttaaattggacccagtctctgcagagttaccaggaatctttccttccagcatccctttactgaccacctacctgtacctcttggttacactcattttttccatttgataattggaaccaacttataactgtttaataattgacactttagattatctcttaataccttcttaaatgtctatatatcccagtgctctggatcagtgtctaaaaatcactggcaacactgcatgaggttgttggttttgttttgttttattaattagtctttcacaggaggaataattgccctcctttatatacttatctattgataatcccctctccctccagaacacaaatcagagggaaagggggtgttcagctgtactaccaaatcaggaagatgtaaggtttacaaattggctaagaatcatggctctgtagccatttcaaccagaataattttattgctaatctgctttgtgtgacagcattccaggccagccagatgggactgccttgtctggaggctttgttcatctcgaaggacacacacttccacactgtttgtgagccctcccacctccacaacttcagttgtaaatcaagtgtgtggatctcaaagggtgcaatttatctttatataggaatacatttctagggcttccttcaagcccactctcttcaccctattttttcttatcttaaattgagagaaagagaattaatcttatactttgtcaaaacattttctaccatatttccagatgacatctgcgcttgaagagtcaaaggaatctgtgtctaatatcctgtttttaactgctgtaggggcaggatggaaaggatgatgggggctgccacaccactgattggccttttctttcacgtgattcatccttcctcattgtggcaaggagtttctttctctttttcttcctcctttgggatcattgtgtatgaaaagaaaaactttaaatgacaaacccagactccaggtgccttgcaaaggttgaaggccagccaggattgctgctgctgctgctactcctgccaacacccctttcattggcatgacggaatgaaaggatgcatgtctccacttcctgaccctccgcccacttccttctccctccaccacccccagtcgtcagctccttccctcatttatttttgttaagttgtgtgaattatttttaacccatttatcctgtttgtgcatagggtttttaagaagaaacagcacagtgcaacgagcaaatctttttggggtgtgtgggaagcaagggagggaggacatggagaaaagttctttaaacaaatagcaaactattgaacatgtgtaaaatcctgtatcatttatgaaatatgtataaaaagcaatgtaccttctggaacaataaatacttattcaatttttg

SEQ ID NO: 18208 - DNA, 2587 bp, Homo sapiens
  source 1..2587: mol_type = unassigned DNA
ggggcggggactgggcggagaggcgcgtgctgctgcgtgcgtgcgcgcgcgccgcgggcgggccagtgaaaccggcggccctggcacgtgacctaggaccggctcaccgggtcgcttggtggctccgtctgtctgtccgtccgcccgcgggtgccatcatggcggacgcggccagtcaggtgctcctgggctccggtctcaccatcctgtcccagccgctcatgtacgtgaaagtgctcatccaggtgggatatgagcctcttcctccaacaataggacgaaatatttttgggcggcaagtgtgtcagcttcctggtctctttagttatgctcagcacattgccagtatcgatgggaggcgcgggttgttcacaggcttaactccaagactgtgttcgggagtccttggaactgtggtccatggtaaagttttacagcattaccaggagagtgacaagggtgaggagttaggacctggaaatgtacagaaagaagtctcatcttcctttgaccacgttatcaaggagacaactcgagagatgatcgctcgttctgctgctaccctcatcacacatcccttccatgtgatcactctgagatctatggtacagttcattggcagagaatccaagtactgtggactttgtgattccataataaccatctatcgggaagagggcattctaggatttttcgcgggtcttgttcctcgccttctaggtgacatcctttctttgtggctgtgtaactcactggcctacctcgtcaatacctatgcactggacagtggggtttctaccatgaatgaaatgaagagttattctcaagctgtcacaggattttttgcgagtatgttgacctatccctttgtgcttgtctccaatcttatggctgtcaacaactgtggtcttgctggtggatgccctccttactccccaatatatacgtcttggatagactgttggtgcatgctacaaaaagaggggaatatgagccgaggaaatagcttatttttccggaaggtcccctttgggaagacttattgttgtgacctgaaaatgttaatttgaagatgtggggcagggacagtgacatttctgtagtcccagatgcacagaattatgggagagaatgttgatttctatacagtgtggcgcgcttttttaataatcatttaatcttgggaaaattcaggtgtttggtgtctgccttttttgttcttttttccagcacaacataacttaccactgatactccccctttagttattctgaattaggatatttttgctccaaattcttattttacttaaccagaagggaaaaaaagttgtattttcctgaagctacaggcactttgtcatgtgatttttgagtctcaatttaaggctttgtaaaatgaagagtagaattccaagaaaaatgagaaataattttgtaaaacttaacaaaatcactaaattaaactatatgggaggttatgaattactttttcttgggtagaccctaaaatgtcagtagcatgcaccagaatctgactcccattatgcttctaagcacatttcattgaccttgtctctcatacttcaagaaaaggacagtacattgctacattaccctagaaagtctgtgtgaggatctgccccttcagtctgttattgcaaagtaataaaatgtcacctacagggagcctctgagcctactctagttcaagaggctacctgaaaaaaaataaataagataaagggtcagcaacaacaaagaaaaagacaattacagaaaataagcaagatttggaaaggaagtataatggcacttttttcctcaaaggaagttcttgttttcacataaaatatgaaaagcagatcctgcaggagtaacccccttctttaagagccaagtatttgccagtgcttaaattacaccatacagttctaattatatataatcttttgttcttcagttttttgttttgtttcctttttgttattgttgccgaaggtgagtagttttgcatttctgatgacagccttggaaagtatatttgtaactccatgtctggtaatgccaacccaagtcgacatgggtcttaggacactgaccacctcacatgccataccctcagttaagcatgttaacatttataggaggaaaaaaatcactttgggagaaaataaaattcaactcaagcataaagcttctgtttactcaggccttctaaaaagcaggttaaaatgctctaaaatgagaaagcctgtggtttcacttatttatataactcactgggacattgccaaatgagtaagcacttaattcgctgcttctgagacttctctgtcaaaacagccccactgataatattagacagaacgagaatgcaggggtctcttccctcccctggggtttaggaagctcatgaggagctcggcttaaaatgtctttgatgtctcttcctttgtctcaaaaagtaatgtcaattttatatactatttcaatattactatctgcatttgttttaatataaaaatgtttgctgcctacctttttctcccaaaaaatctttaagtaaagatgatctgggaaaatgt

SEQ ID NO: 18209 - DNA, 1443 bp, Homo sapiens
  source 1..1443: mol_type = unassigned DNA
gacctaggaccggctcaccgggtcgcttggtggctccgtctgtctgtccgtccgcccgcgggtgccatcatggcggacgcggccagtcaggtgctcctgggctccggtctcaccatcctgtcccagccgctcatgtacgtgaaagtgctcatccaggtgggatatgagcctcttcctccaacaataggacgaaatatttttgggcggcaagtgtgtcagcttcctggtctctttagttatgctcagcacattgccagtatcgatgggaggcgcgggttgttcacaggcttaactccaagactgtgttcgggagtccttggaactgtggtccatggtaaagttttacagcattaccaggagagtgacaagggtgaggagttaggacctggaaatgtacagaaagaagtctcatcttcctttgaccacgttatcaaggagtgatcactctgagatctatggtacagttcattggcagagaatccaagtactgtggactttgtgattccataataaccatctatcgggaagagggcattctaggatttttcgcgggtcttgttcctcgccttctaggtgacatcctttctttgtggctgtgtaactcactggcctacctcgtcaatacctatgcactggacagtggggtttctaccatgaatgaaatgaagagttattctcaagctgtcacaggattttttgcgagtatgttgacctatccctttgtgcttgtctccaatcttatggctgtcaacaactgtggtcttgctggtggatgccctccttactccccaatatatacgtcttggatagactgttggtgcatgctacaaaaagaggggaatatgagccgaggaaatagcttatttttccggaaggtcccctttgggaagacttattgttgtgacctgaaaatgttaatttgaagatgtggggcagggacagtgacatttctgtagtcccagatgcacagaattatgggagagaatgttgatttctatacagtgtggcgcgcttttttaataatcatttaatcttgggaaaattcaggtgtttggtgtctgccttttttgttcttttttccagcacaacataacttaccactgatactccccctttagttattctgaattaggatatttttgctccaaattcttattttacttaaccagaagggaaaaaaagttgtattttcctgaagctacaggcactttgtcatgtgatttttgagtctcaatttaaggctttgtaaaatgaagagtagaattccaagaaaaatgagaaataattttgtaaaacttaacaaaatcactaaattaaactatatgggaggttatgaattactttttcttgggtagaccctaaaatgtcagtagcatgcaccagaatctgactcccattatgcttctaagcacatttcattgaccttgtctctcatacttcaag

SEQ ID NO: 18210 - DNA, 955 bp, Homo sapiens
  source 1..955: mol_type = unassigned DNA
aaacactagatcaaaaaaaaaaaatcacagacctgtggtaggctgggcaccagtgctctaaagcaagttctgcctaaactggcagggacatttttcacatcaggaacaggagttgttcctggactctgtctggggccaggctgggagagacgtggggcagagtggggcaggggcaggggcagggctgggggctggggcctgggcagggccaggcactcaagtgaggccaagtcctggagcgaaccagttcctggtggccgttggacagctcacacagctccctgccaggtcacccgccatggtcctccctctgccctggctctctcggtaccatttccttcgcctccttctgccctcctggtccttggcaccccagggctcccatgggtgctgctcccaaaaccccaaagcaagcatggaagagcagaccagctccagaggaaatgggaagatgacgtcccctcccaggggccctgggacccaccgcacagctgagctggcccgagctgaagagttgttggagcagcagctggagctgtaccaggccctccttgaagggcaggagggagcctgggaggcccaagccctggtgctcaagatccagaagctgaaggaacagatgaggaggcaccaagagagccttggaggaggcgcctaagtttcccccagtgcccacagcaccctccggcgctgaaaatacacgcaccacccaccaggagccttgggatcataaacaccccagcgtcttcccaggccagagaaagtggaagagaccacaaagcgcaggcaattggcaggcagtgggggagccagggctctgcagtcttagtcccattcccctttgatctcacagcaggcagggcacccaggccttataggaattcaccctggaccatgccctaaaataacctcaccccaaatacaataaagggacgaagcacttatagataccaca

SEQ ID NO: 18211 - DNA, 955 bp, Homo sapiens
  source 1..955: mol_type = unassigned DNA
aaacactagatcaaaaaaaaaaaatcacagacctgtggtaggctgggcaccagtgctctaaagcaagttctgcctaaactggcagggacatttttcacatcaggaacaggagttgttcctggactctgtctggggccaggctgggagagacgtggggcagagtggggcaggggcaggggcagggctgggggctggggcctgggcagggccaggcactcaagtgaggccaagtcctggagcgaaccagttcctggtggccgttggacagctcacacagctcccggccaggtcacccgccatggtcctccctctgccctggctctctcggtaccatttccttcgcctccttctgccctcctggtccttggcaccccagggctcccatgggtgctgctcccaaaaccccaaagcaagcatggaagagcagaccaactccagaggaaatgggaagatgacgtcccctcccaggggccctgggacccaccgcacagctgagctggcccgagctgaagagttgttggagcagcagctggagctgtaccaggccctccttgaagggcaggagggagcctgggaggcccaagccctggtgctcaagatccagaagctgaaggaacagatgaggaggcaccaagagagccttggaggaggtgcctaagtttcccccagtgcccacagcaccctccggcactgaaaatacacgcaccacccaccaggagccttgggatcataaacaccccagcgtcttcccaggccagagaaagtggaagagaccacaaaccgcaggcaattggcaggcagtgggggagccagggctctgcagtcttagtcccattcccctttgatctcacagcaggcagggcacccaggccttataggaattcaccctggaccatgccctaaaataacctcaccccaaatacaataaagggacgaagcacttatagataccaca

SEQ ID NO: 18212 - DNA, 955 bp, Homo sapiens
  source 1..955: mol_type = unassigned DNA
aaacactagatcaaaaaaaaaaaatcacagacctgtggtaggctgggcaccagtgctctaaagcaagttctgcctgaactggcagggacatttttcacatcaggaacaggagttgttcctggactctgtctggggccaggctgggagagacgtggggcagagtggggcaggggcaggggcagggctgggggctggggcctgggcagggccaggcactcaagtgaggccaagtcctggagcgaaccagttcctggtggccgttggacagctcacacagctcccggccaggtcacccgccatggtcctccctctgccctggctctctcggtaccatttccttcgcctccttctgccctcctggtccttggcaccccagggctcccatgggtgctgctcccaaaaccccaaagcaagcatggaagagcagaccaactccagaggaaatgggaagatgacgtcccctcccaggggccctgggacccaccgcacagctgagctggcccgagctgaagagttgttggagcagcagctggagctgtaccaggccctccttgaagggcaggagggagcctgggaggcccaagccctggtgctcaagatccagaagctgaaggaacagatgaggaggcaccaagagagccttggaggaggtgcctaagtttcccccagtgcccacagcaccctccggcactgaaaatacacgcaccacccaccaggagccttgggatcataaacaccccagcgtcttcccaggccagagaaagtggaagagaccacaaaccgcaggcaattggcaggcagtgggggagccagggctctgcagtcttagtcccattcccctttgatctcacagcaggcagggcacccaggccttataggaattcaccctggaccatgccctaaaataacctcaccccaaatacaataaagggacgaagcacttatagataccaca

SEQ ID NO: 18213 - DNA, 955 bp, Homo sapiens
  source 1..955: mol_type = unassigned DNA
aaacactagatcaaaaaaaaaaaatcacagacctgtggtaggctgggcaccagtgctctaaagcaagttctgcctaaactggcagggacatttttcacatcaggaacaggagttgttcctggactctgtctggggccaggctgggagagacgtggggcagagtggggcaggggcaggggcagggctgggggctggggcctgggcagggccaggcactcaagtgaggccaagtcctggagcgaaccagttcctggtggccgttggacagctcacacagctccctgccaggtcacccgccatggtcctccctctgccctggctctctcggtaccatttccttcgcctccttctgccctcctggtccttggcaccccagggctcccatgggtgctgctcccaaaaccccaaagcaagcatggaagagcagaccagctccagaggaaatgggaagatgacgtcccctcccaggggccctgggacccaccgcacagctgagctggcccgagctgaagagttgttggagcagcagctggagctgtaccaggccctccttgaagggcaggagggggcctgggaggcccaagccctggtgctcaagatccagaagctgaaggaacagatgaggaggcaccaagagagccttggaggaggcgcctaagtttcccccagtgcccacagcaccctccggcgctgaaaatacacgcaccacccaccaggagccttgggatcataaacaccccagcgtcttcccaggccagagaaagtggaagagaccacaaagcgcaggcaattggcaggcagtgggggagccagggctctgcagtcttagtcccattcccctttgatctcacagcaggcagggcacccaggccttataggaattcaccctggaccatgccctaaaataacctcaccccaaatacaataaagggacgaagcacttatagataccaca

SEQ ID NO: 18214 - DNA, 955 bp, Homo sapiens; identical to SEQ ID NO: 18210
  source 1..955: mol_type = unassigned DNA

SEQ ID NO: 18215 - DNA, 955 bp, Homo sapiens
  source 1..955: mol_type = unassigned DNA
aaacactagatcaaaaaaaaaaaatcacagacctgtggtaggctgggcaccagtgctctaaagcaagttctgcctaaactggcagggacatttttcacatcaggaacaggagttgttcctggactctgtctggggccaggctgggagagacgtggggcagagtggggcaggggcaggggcagggctgggggctggggcctgggcagggccaggcactcaagtgaggccaagtcctggagcgaaccagttcctggtggccgttggacagctcacacagctcccggccaggtcacccgcgatggtcctccctctgccctggctctctcggtaccatttccttcgcctccttctgccctcctggtccttggcaccccagggctcccatgggtgctgctcccaaaaccccaaagcaagcatggaaaagcagaccaactccagaggaaatgggaagatgacgtcccctcccaggggccctgggacccaccgcacagctgagctggcccgagctgaagagttgttggagcagcagctggagctgtaccaggccctccttgaagggcaggagggagcctgggaggcccaagccctggtgctcaagatccagaagctgaaggaacagatgaggaggcaccaagagagccttggaggaggtgcctaagtttcccccagtgcccacagcaccctccggcactgaaaatacacgcaccacccaccaggagccttgggatcataaacaccccagcgtcttcccaggccagagaaagtggaagagaccacaaaccgcaggcaattggcaggcagtgggggagccagggctctgcagtcttagtcccattcccctttgatctcacagcaggcagggcacccaggccttataggaattcaccctggaccatgccctaaaataacctcaccccaaatacaataaagggacgaagcacttatagataccaca

SEQ ID NO: 18216 - DNA, 955 bp, Homo sapiens; identical to SEQ ID NO: 18211
  source 1..955: mol_type = unassigned DNA

SEQ ID NO: 18217 - DNA, 955 bp, Homo sapiens; identical to SEQ ID NO: 18211
  source 1..955: mol_type = unassigned DNA

SEQ ID NO: 18218 - DNA, 2436 bp, Homo sapiens
  source 1..2436: mol_type = unassigned DNA
atcgctgggcgactgatttcgagtttccggtcaggttaggccgggggggtgcggtcctggtcggaaggaggtggagagtcgggggtcaccaggcctatccttggcgccacagtcggccaccggggctcgccgccgtcatggagagcggagggcggccctcgctgtgccagttcatcctcctgggcaccacctctgtggtcaccgccgccctgtactccgtgtaccggcagaaggcccgggtctcccaagagctcaagggagctaaaaaagttcatttgggtgaagatttaaagagtattctttcagaagctccaggaaaatgcgtgccttatgctgttatagaaggagctgtgcggtctgttaaagaaacgcttaacagccagtttgtggaaaactgcaagggggtaattcagcggctgacacttcaggagcacaagatggtgtggaatcgaaccacccacctttggaatgattgctcaaagatcattcatcagaggaccaacacagtgccctttgacctggtgccccacgaggatggcgtggatgtggctgtgcgagtgctgaagcccctggactcagtggatctgggtctagagactgtgtatgagaagttccacccctcgattcagtccttcaccgatgtcatcggccactacatcagcggtgagcggcccaaaggcatccaagagaccgaggagatgctgaaggtgggggccaccctcacaggggttggcgaactggtcctggacaacaactctgtccgcctgcagccgcccaaacaaggcatgcagtactatctaagcagccaggacttcgacagcctgctgcagaggcaggagtcgagcgtcaggctctggaaggtgctggcgctggtttttggctttgccacatgtgccaccctcttcttcattctccggaagcagtatctgcagcggcaggagcgcctgcgcctcaagcagatgcaggaggagttccaggagcatgaggcccagctgctgagccgagccaagcctgaggacagggagagtctgaagagcgcctgtgtagtgtgtctgagcagcttcaagtcctgcgtctttctggagtgtgggcacgtttgttcctgcaccgagtgctaccgcgccttgccagagcccaagaagtgccctatctgcagacaggcgatcacccgggtgatacccctgtacaacagctaatagtttggaagccgcacagcttgacctggaagcacccctgcccccttttcagggatttttatctcgaggcctttggaggagcagtggtgggggtagctgtcacctccaggtatgattgagggaggaattgggtagaaactctccagacccatgcctccaatggcaggatgctgcctttcccacctgagaggggaccctgtccatgtgcagcctcatcagagcctcaccctgggaggatgccgtggcgtctcctcccaggagccagatcagtgcgagtgtgactgaaaatgcctcatcacttaagcaccaaagccagtgatcagcagctcttctgttcctgtgtcttctgtttttttctggtgaatcgttgcttgctgtggacttggtggaggactcagaggggaggaaaggctgggccccgagtacaacggatgccttgggtgctgcctccgaagagactctgccgcagcttttcttctttttcctcatgccccgggaaacagtctttcttcagaattgtcaggctgggcaggtcaacttgtgttcctttcccctcacctgcttgcctccttaacgcctgcacgtgtgtgtagaggacaaaagaaagtgaagtcagcacatccgcttctgcccagatggtcggggccccgggcaacagattgaagagagatcatgtgaagggcagttggtcaggcaggcctcctggtttcgccactggccctgatttgaactcctgccacttgggagagctcggggtggtccctggttttccctcctggagaatgaggcgcagaggcctcgcctcctgaaggacgcagtgtggatgccactggcctagtgtcctggcctcacagcttccttgcaaggctgtcacaaggaaaagcagccggctggcaccctgagcatatgccctcttggggctccctcatccagcccgtcgcagctttgacatcttggtgtactcatgtcgcttctccttgtgttaccccctcccagtattaccatttgcccctcacctgcccttggtgagccttttagtgcaagacagatggggctgttttcccccacctctgagtagttggaggtcacatacacagctctttttttattgcccttttctgcctctgaatgttcatctctcgtcctcctttgtgcaggcgaggaaggggtgccctcaggggccgacactagtatgatgcagtgtccagtgtgaacagcagaaattaaacatgttgcaacc

SEQ ID NO: 18219 - DNA, 2400 bp, Homo sapiens
  source 1..2400: mol_type = unassigned DNA
cggcgtgggctgctgccttggaaacgcggagcgcgcgctcccagcgaaagcagcagggcagggatctgcgttggaggaagggactgctctggtgctagaatgctgtgcgtcggaaggctgggcggcttgggagccagagcagcagctctgccgccccgccgggcgggccggggaagcctcgaagccgggatccgggcccgaagggtcagcaccagctggtctcccgtgggcgccgccttcaatgtcaagccccagggcagccgcttggacctgttcggcgagcgccggggtctttttggagttcctgagctgagtgccccagaaggatttcatattgcacaagaaaaagccttgagaaagacagaattgcttgtggaccgtgcatgttccaccccacctgggccccagaccgtgctgatcttcgatgagctctcggattccttatgcagagtggccgacttggctgattttgtgaaaatcgctcaccctgagccagcattcagagaagctgcggaagaagcttgtagaagtattggcaccatggtagagaagttgaacacaaatgtggatttatatcaaagtttgcaaaaattactagctgataaaaaacttgtggattcccttgatccagaaacaaggcgagtggctgaactgtttatgtttgattttgaaattagtggaatccatctagacaaagaaaagcgtaaaagagcagtggacctcaatgttaaaatcttggatttgagtagtacatttcttatgggaaccaattttcccaacaagattgagaagcatctcttaccagaacacattcgtcgtaactttacatctgctggggatcatatcataattgatggtctccacgcagaatcaccagatgacttggtgcgagaagctgcttataaaatttttctttatcccaatgctggtcaattgaaatgtttagaagaattgctcagcagcagagatcttctggcaaagttggtggggtattccacgttttctcacagggctctccaaggaacgatagctaaaaatccagagactgtcatgcagttccttgaaaaactatctgacaaactttctgaaagaactctgaaagattttgagatgatacgagggatgaaaatgaaactgaatcctcaaaattccgaagtaatgccctgggaccccccttactacagtggtgtgattcgtgcagaaaggtataatattgagcccagcctatattgcccgtttttctctcttggagcatgcatggaaggcctgaatattttgcttaacagactgttggggatttcattatatgcagagcagcctgcaaaaggagaggtgtggagcgaagatgtccgaaaactggctgttgttcatgaatctgaaggattgttggggtacatttactgtgatttttttcagcgagcagacaaaccacatcaggattgccatttcactatccgtggaggcagactaaaggaagatggagactatcaactcccagttgtagttcttatgctgaatcttccccgttcctcaaggagttctccaactttgctaactcctagcatgatggaaaatcttttccatgaaatgggacatgccatgcattcaatgctaggacgtactcgttaccaacacgtcactgggaccaggtgccctactgattttgctgaggttccttctattctgatggagtactttgcaaatgattatcgagtagttaaccaatttgccagacattatcagactggacagccactgccaaaaaatatggtgtctcgtctttgtgaatctaaaaaggtttgtgctgcagctgatatgcaacttcaggtcttttatgccactctggatcaaatctaccatgggaagcatcccctgaggaattcaaccacagacattctcaaggaaacacaagagaaattctatggcctaccatatgttccaaatactgcctggcagctgcgattcagccacctcgtggggtatggtgctagatattactcttacctcatgtccagagcggtcgcctccatggtttggaaggagtgttttctacaggatcctttcaacagggctgccggggagcgctatcgcagggagatgctggcccacggtggaggcagggagcccatgctcatggttgaaggtatgcttcagaagtgtccttctgttgatgacttcgtaagtgccctcgtttccgacttggatctggacttcgaaactttcctcatggattctgaataaaagaaacactctacacctcttaaatcaaggtcatgtagataatgactttgttataaatgctacagctgtgagagcttgtttctgatttcattgttcgcttctgtaattctgaaaaactttaaactggtagaacttggaataaataatttgttttaatta

SEQ ID NO: 18220 - DNA, 1739 bp, Homo sapiens
  source 1..1739: mol_type = unassigned DNA
cggcggccgaggcgatgagggtgttggtgcggcgctgttggggtcctccgctggctcatggcgccaggcgtgggaggccgagtccccagtggcgagcactggcccgactcggctgggaggactgccgggactccagagtccgcgagaagcctccctggcgggtgctcttcttcggcacggaccagttcgcccgcgaggcgctgcgggcgctgcacgccgccagggaaaacaaagaagaagagttaatcgacaaactggaggtggtcacaatgccttccccatcaccaaaaggactgccagtgaagcaatatgctgtgcagtctcagcttcccgtatatgagtggccggatgtgggatctggagaatatgatgttggagtagtggcttcgtttggccgacttttgaatgaggctcttattcttaaatttccctatggcatattgaatgttcatcccagttgcctcccgagatggcgtggcccagcccctgtaatccatacagtgcttcacggagacacagttactggagtaacaattatgcaaattagacctaaaaggtttgatgtaggcccaattctcaaacaagaaactgttcctgtgccacccaagagcactgcaaaggaattggaagcagtgttgtcaagactgggtgccaacatgctcatttcagttttgaaaaatttgcctgaaagtctgagcaatggaaggcagcagccaatggagggggcgacttacgcccctaagatttctgctggtaccagttgtataaaatgggaggaacaaacttcagaacaaatattcagactttaccgtgccattggaaatataattccgttgcagacgctctggatggcgaataccattaaacttctggatttggtagaagttaacagttcagtccttgctgatccaaaattaacgggacaggctcttattccaggatcagtaatataccacaaacagtcacaaatactattggtttattgcaaggatggttggattggtgttcgatcagtgatgctcaagaaatcactaacagctactgacttctacaatggatatttgcacccctggtaccagaaaaattcccaagctcaaccaagccaatgcagatttcagactctcagacttccaacaaagaagaagcagaaaaaaactgttgctatgcaacaatgcattgagtagttaggaagaagatggataaaaacctattacatatttgtaatttattaaaaaccttatttacaaggaattatctggacttttttttttttttttttttttgagacagagtctcactctgtcacccaggctggaatccagtggcactatctcagctcactgcaacctccgcctcccaggttcaagcaattctcctgcctcagcctcctgagtagctgggattacaggcacacgccaccacacgcagctaatttttgtatttttagtagagatggggtttcaccatgttggtcaggctggtctcgaactcctgaccttgtgatctgcccacctcagcctcccaaagtgctatgattacagacgtgagccaccgtgcctggcctggaattatctggactttcaaagaagatggcattattataagaagagaagattattgccgaaaagatggattgcctcactttccactttttatgtaacagtagttaaaaaacagctttttttttacttgaattacaaaaaagtttaaataaaacttgtatttatgatacgaaactc

SEQ ID NO: 18221 - DNA, 1522 bp, Homo sapiens
  source 1..1522: mol_type = unassigned DNA
gcgatgagggtgttggtgcggcgctgttggggtcctccgctggctcatggcgccaggcgtgggaggccgagtccccagtggcgagcactggcccgactcggctgggaggactgccgggactccagagtccgcgagaagcctccctggcgggtgctcttcttcggcacggaccagttcgcccgcgaggcgctgcgggcgctgcacgccgccagggaaaacaaagaagaagagttaatcgacaaactggaggtggtcacaatgccttccccatcaccaaaaggactgccagtgaagcaatatgctgtgcagtctcagcttcccgtatatgagtggccggatgtgggatctggagaatatgatgttggagtagtggcttcgtttggccgacttttgaatgaggctcttattcttaaatttccctatggcatattgaatgttcatcccagttgcctcccgagatggcgtggcccagcccctgtaatccatacagtgcttcacggagacacagttactggagtaacaattatgcaaattagacctaaaaggtttgatgtaggcccaattctcaaacaagaaactgttcctgtgccacccaagagcactgcaaaggaattggaagcagtgttgtcaagactgggtgccaacatgctcatttcagttttgaaaaatttgcctgaaagtctgagcaatggaaggcagcagccaatggagggggcgacttacgcccctaagatttctgctggtaccagttgtataaaatgggaggaacaaacttcagaacaaatattcagactttaccgtgccattggaaatataattccgttgcagacgctctggatggcgaataccattaaacttctggatttggtagaagttaacagttcagtccttgctgatccaaaattaacgggacaggctcttattccaggatcagtaatataccacaaacagtcacaaatactattggtttattgcaaggatggttggattggtgttcgatcagtgatgctcaagaaatcactaacagctactgacttctacaatggatatttgcacccctggtaccagaaaaattcccaagctcaaccaagccaatgcagatttcagactctcagacttccaacaaagaagaagcagaaaaaaactgttgctatgcaacaatgcattgagtagttaggaagaagatggataaaaacctattacatatttgtaatttattaaaaaccttatttacaaggaattatctggacttttttttttttttttttttttgagacagagtctcactctgtcacccaggctggaatccagtggcactatctcagctcactgcaacctccgcctcccaggttcaagcaattctcctgcctcagcctcctgatgctatgattacagacgtgagccaccgtgcctggcctggaattatctggactttcaaagaagatggcattattataagaagagaagattattgccgaaaagatggattgcctcactttccactttttatgtaacagtagtt

SEQ ID NO: 18222 - DNA, 2572 bp, Homo sapiens
  source 1..2572: mol_type = unassigned DNA
agcttcgcgctagtgctgttttttttttttttttttttttagcaatggcggttcccggcgtggggctcttgacccgtttgaacctgtgtgcccggagaagaactcgagtccagcggcctatcgtcaggcttttgagttgcccaggaactgtggccaaagaccttaggagagacgagcagccttcagggagcgtggagacaggctttgaagacaagattcccaaaaggagattctctgagatgcaaaatgaaagacgagaacaggcacagcggactgttttaatacattgcccagagaaaatcagtgaaaacaagtttcttaaatatttatcccaatttggacctattaataatcatttcttctatgaaagctttggtctctatgctgtcgtagaattttgccaaaaggaaagcataggttcactgcagaatgggactcatactccaagcacggccatggagactgcaattccattcagatcacgtttcttcaatctgaagttgaaaaaccagacttctgaacggtcacgcgtacggtcaagtaatcagttgccacgttcaaacaagcagctttttgaattactttgttatgcagaaagtatagacgatcagctgaacactctcttgaaggagttccagctaacagaggagaacactaagctccgatatctcacctgttctcttattgaagacatggccgccgcgtattttccagactgcatagtcagaccctttggctcctcagtcaacacttttgggaagttaggatgtgatttggacatgtttttggatctagatgaaaccagaaacctcagcgctcacaagatctcaggaaattttctgatggaatttcaagtgaaaaatgttccttcagaaagaattgcaactcagaagatcctgtctgtgttaggagagtgccttgaccactttggccctggctgtgtgggtgtgcaaaaaatattaaatgcccggtgtccgctcgtgaggttctcacaccaggcctccggatttcagtgtgatttgactacgaacaataggattgccttgacaagttccgaactcctttatatatatggtgccctagactcaagagtgagagccttggtgttcagtgtacggtgctgggctcgagcacattcactaacaagtagtattcctggtgcatggattacaaatttctcccttacaatgatggtcatcttttttctccagagaagatcaccccctattcttccaacactagattccttaaaaaccctagcagatgcagaagataaatgtgtaatagaaggcaacaactgcacatttgttcgtgacttgagtagaattaaaccttcacagaacacagaaacattagaattactactgaaggaattttttgagtattttggcaattttgctttcgataaaaattccataaatattcgacagggaagggagcaaaacaaacctgattcttctcctctgtacattcagaatccatttgaaacttctctcaacataagcaaaaatgtaagtcaaagccagctgcaaaaatttgtagatttggcccgagaaagtgcctggattttacaacaggaagatacagatcgaccttccatatcaagtaatcggccctgggggctggtatccctattgctaccatctgctccaaacagaaagtcctttaccaagaagaaaagcaataagtttgcaattgaaacagtcaaaaacttgctagaatctttaaaaggtaacagaacagaaaatttcacaaaaaccagtgggaagagaacaattagtactcagacatgatggctgctacattgtgtaaagaactgggcttagcctatcaaatggtctgtggacttacttggaaaaactgatttgaaactttcacagatctcagctttcatctgatgtcacttttcatgatcttctcattggcccccttaacctggtctgaagttctgggatgttttcagtttgatcagtctgatactcagtggcactttattaaaacatcagctgtggagtgtggcggtgcacacctgtagtcccagctgctcaggaggctgaggcaggaggatctcttgagcccaggattttgaatccatcgtggacaacatagcaagattccatctctaaaaaaaatgaaaataaacataagccacaaggaatgggtgaaagattattgtaatgtgctttaactaaataggtaaatatactaaacaaatgctaaaactcagttttaggatgaaaccattgttgatatccacatcagtccctgtttagaaaacatttaaaatgacttttagttatgtacagtacgttggcaatgaatacattaagcttcaaaatttggtagtgctctcgaatatgtatatttgtatttttcaagcgaagttctcttattcacatataaattaaagtgggttggtactgatatcaaaaaatgtttatgtttttagaacagacatttcagtcactgcattcttaggtattccaaaccaaatatgatgacatcaatagattgcattttaaaaatattgtttgatttttctattttcaaaaataaaattctgtttctaact

SEQ ID NO: 18223 - DNA, 5947 bp, Homo sapiens
  source 1..5947: mol_type = unassigned DNA
atggcatgggccaagaaggttgggggcagagcagggcagggcaggtcgctctcaagatgtgaccccattattttggatccagagtggctttatggacctcctgaaggagaaggtggacctgaaggagtgggtggagaaactagagcttcgatccatccacctctcaggacaggcagacaccatcagaaagtaaatcacaacatacgagggccagagggcagcgccaaagacgcggcaccaggaggaggaggacatcatcaggctggcccaggacaaagaggagatgaagatggggcattgcagcacctctgtgggggtgggggtggggtgggtgtgagcgtgggcaggggcactggcaccagcgtggcagctgagcacccctcccttcaggtgaaactgctggagctgcaggagctggtgttgcggcttgcaggcgatcacaacgaggggcatggcaaattcctggccgctgcccagaaccctgctgatgatcctgctccaggggccccagcccctcaggagcttggggctgctgacaagcagggtggctttgaagacaagattcccaaaaggagattctctgagatgcaaaatgaaagacgagaacaggcacagcggactgttttaatacattgcccagagaaaatcagtgaaaacaagtttcttaaatatttatcccaatttggacctattaataatcatttcttctatgaaagctttggtctctatgctgtcgtagaattttgccaaaaggaaagcataggttcactgcagaatgggactcatactccaagcacggccatggagactgcaattccattcagatcacgtttcttcaatctgaagttgaaaaaccagacttctgaacggtcacgcgtacggtcaagtaatcagttgccacgttcaaacaagcagctttttgaattactttgttatgcagaaagtatagacgatcagctgaacactctcttgaaggagttccagctaacagaggagaacactaagctccgatatctcacctgttctcttattgaagacatggccgccgcgtattttccagactgcatagtcagaccctttggctcctcagtcaacacttttgggaagttaggatgtgatttggacatgtttttggatctagatgaaaccagaaacctcagcgctcacaagatctcaggaaattttctgatggaatttcaagtgaaaaatgttccttcagaaagaattgcaactcagaagatcctgtctgtgttaggagagtgccttgaccactttggccctggctgtgtgggtgtgcaaaaaatattaaatgcccggtgtccgctcgtgaggttctcacaccaggcctccggatttcagtgtgatttgactacgaacaataggattgccttgacaagttccgaactcctttatatatatggtgccctagactcaagagtgagagccttggtgttcagtgtacggtgctgggctcgagcacattcactaacaagtagtattcctggtgcatggattacaaatttctcccttacaatgatggtcatcttttttctccagagaagatcaccccctattcttccaacactagattccttaaaaaccctagcagatgcagaagataaatgtgtaatagaaggcaacaactgcacatttgttcgtgacttgagtagaattaaaccttcacagaacacagaaacattagaattactactgaaggaattttttgagtattttggcaattttgctttcgataaaaattccataaatattcgacagggaagggagcaaaacaaacctgattcttctcctctgtacattcagaatccatttgaaacttctctcaacataagcaaaaatgtaagtcaaagccagctgcaaaaatttgtagatttggcccgagaaagtgcctggattttacaacaggaagatacagatcgaccttccatatcaagtaatcggccctgggggctggtatccctattgctaccatctgctccaaacagaaagtcctttaccaagaagaaaagcaataagtttgcaattgaaacagtcaaaaacttgctagaatctttaaaaggtaacagaacagaaaatttcacaaaaaccagtgggaagagaacaattagtactcagacatgatggctgctacattgtgtaaagaactgggcttagcctatcaaatggtctgtggacttacttggaaaaactgatttgaaactttcacagatctcagctttcatctgatgtcacttttcatgatcttctcattggcccccttaacctggtctgaagttctgggatgttttcagtttgatcagtctgatactcagtggcactttattaaaacatcagctgtggagtgtggcggtgcacacctgtagtcccagctgctcaggaggctgaggcaggaggatctcttgagcccaggattttgaatccatcgtggacaacatagcaagattccatctctaaaaaaaatgaaaataaacataagccacaaggaatgggtgaaagattattgtaatgtgctttaactaaataggtaaatatactaaacaaatgctaaaactcagttttaggatgaaaccattgttgatatccacatcagtccctgtttagaaaacatttaaaatgacttttagttatgtacagtacgttggcaatgaatacattaagcttcaaaatttggtagtgctctcgaatatgtatatttgtatttttcaagcgaagttctcttattcacatataaattaaagtgggttggtactgatatcaaaaaatgtttatgtttttagaacagacatttcagtcactgcattcttaggtattccaaaccaaatatgatgacatcaatagattgcattttaaaaatattgtttgatttttctattttcaaaaataaaattctgtttctaactaaaatgtgatattcccagtattccttcacatctcttttgagaactcccctcttcctgcaggaaagagacatatttgtctctcagtatatgcagaaaattggttccaggaccatccacgtacacccagatctgcacacactgaactccttcagtcctgtggagcccgtgcatgggagaattccaccttgcacataagcagattttgcatcctgtgaaagtactgtattttctttctttcttttttttttttttttttttttgagacagagtctcgctctgtcgcccaggctagagtgcagtggcgcaatctcggctcactgcaagctctgcctcccaggttcacgccattctcctgcctcagcctctctgagtagctgggactataggtgcccgccaccacgcccggacaatttttttgtatttttagtagagacagggtttcaccatggtctcgatctcccgacctcgtgatcagcccacctcaacctcccaaagtgctgggattacaagcgtgagccaccatgcctggccgagaatactgtattttcaatccaagtttggttggaaaaaatctgtgtgtaaatggacttcgcagttgaaacccatgttgttcaatgggcaactgtatattgaaatttaatttccattacattctctgtggagcaacttttttgctttgtttcgttttgtttctgagacggagttttgctcttgttgcccaggctggggtgcaatggcacaatctcagctcactgcaacctccgcctcccggattcaagtgattctcctgcctcagctgggattacaggcgcccaccaccaagcccagctaatttttgtagttttagtagggacagggtttcaccatgttggccaggctgatctcgaactcctgacctcaggtgatcgcccaccttggccttccaaagtgttggaattacaggcgtgagccactgcacctggcttctgtggagtaactttctatttaagaagcaagtaaggcctgggcatagcggcacatgcctgtagtcccaggtacttgggaggccgaggcacaaggactgcttgaacctgggaggcagaggctgcagtgagctgagatcacagcactgtactccatcctgggcgacagtgagactctctcaaaggaaaagaagcaagtagtatagtgtttaaaaacagacttgagcgagactggctcaatgacaagttactcagtctcttggggcccctgtttgatctgtaaaatggggatcatgatcagatcaatgtgaggattaagcgagggatgtaggaaaatgctaggtcagtgcattttcctggcgcgaagtaaatgttacttctctttaactgttgcctttcggtgtttgtggtatgtaattaccttttttgctactcaaaattcagatttagagtttgtagtactttaaaaatttttcccatttaaattttatgtcagaaattataatgggttctgcatgggatattttaagaaactcagcattgttatgaagcaaatgaattctgtgtccttgtgtctgtgctattggattgcacatttgacaccaacaaatatcagtgttctgtacaggcgatgtctttaaaagccatttttcatttgttctttattttgttgggctagaaatccatattgatttaaaaagcttaaaaagcataaaccacttaagggtttctaaatgaaatttttttttctgttcacagatatttagtcagatattttcttttttaggttggtgctaggtgtaatatggttatttaagcacataaagtatgtgtatgggttagcattttcttttctttttggtaatttgtaggacagccttgacactaggctgttttacttttcagaatcagatttaattatgtgattaattttaaatctacaaagacttgttttttgtttttttttttgagagcaaatcttgctctgtcacccaggctagactgcagtggtgcgatctcggctcactgcaacctctgcctcctgggttcaagcgatactcctgccccagcctcccaagtaactgggattacaggcgcctgccaccatgcctagctaatttttgtatgttagtagagacggggtttcaccatgttggccaggctggtcttgaattcctgacctcaagtgatctacctgtctcagcctctcaaagtgctgggattacaggttacaggtgtgagccaccgcacctggcctacaaagacccttttttttttttttttttgagatgggtctccctctgtcacccaggctggagagtgcagtgatcttggctcactgaaacctccacttcccgggttcaggtgattcttctgcctcagcctcctgagtagctgggattacaggtgcatgccaccacacctggctaagttttctatttttagtagagatggggttttactctgttggccaggctggtctcgaactcctgacctcaggtgacctgcccacctcgccctcccaaaatgctgggattacaggcatgagccaccacgcctggctgcaaagaccttttaatacacagttttaaagtctgttcaactgaatatagactacagacaaatatattttctcataactttagtgtatcacaacccagatttttaaaatatttttattacgtgatagtgataactagcaattatttgtcattgctgtttcttaattaaaaataattgcaatgttaagtaaaacttttttcaagtttttttcttctataactattactaggctttcattcagtagctttcacctgtaatgagttttactaagtatgtgaaagtaattttgataggagactacccagatcaaaacgatttcagctatagcccactagtataattcctggagctattatccatctttagaaaatttgagaattagccagagactttctaggaaataacgattagcctgaaacgttataggaaaactgtgtgtaattatctcattcaccttcagttaccataaaggagaagggaaaataaagttgagttgaaataaga

SEQ ID NO: 18224 - DNA, 816 bp, Homo sapiens
  source 1..816: mol_type = unassigned DNA
gatctctgtaggggaacccagggtcgccgccgttgctgaggcagaagtgagatgtgtgatgtttgtttggggcgactcctgtgtacagtaatggagttgtttagacttccatgaaattcaggctttgaagacaagattcccaaaaggagattctctgagatgcaaaatgaaagacgagaacaggcacagcggactgttttaatacattgcccagagaaaatcagtgaaaacaagtttcttaaatatttatcccaatttggacctattaataatcatttcttctatgaaagctttggtctctatgctgtcgtagaattttgccaaaaggaaagcataggttcactgcagaatgggactcatactccaagcacggccatggagactgcaattccattcagatcacgtttcttcaatctgaagttgaaaaaccagacttctgaacggtcacgcgtacggtcaagtaatcagttgccacgttcaaacaagcagctttttgaattactttgttatgcagaaagtatagacgatcagctgaacactctcttgaaggagttccagctaacagaggagaacactaagctccgatatctcacctgttctcttattgaagacatggccgccgcgtattttccagactgcatagtcagaccctttggctcctcagtcaacacttttgggaagttaggatgtgatttggacatgtttttggatctagatgaaaccagaaacctcagcgctcacaagatctcaggaaattttctgatggaatttcaagtgaaaaatgttccttcagaaagaattgcaactcagaagatc

SEQ ID NO: 18225 - DNA, 695 bp, Homo sapiens
  source 1..695: mol_type = unassigned DNA
gaccttaggagagacgagcagccttcagggagcgtggagacaggctttgaagacaagattcccaaaaggagattctctgagatgcaaaatgaaagacgagaacaggcacagcggactgttttaatacattgcccagagaaaatcagtgaaaacaagtttcttaaatatttatcccaatttggacctattaataatcatttcttctatgaaagctttggtctctatgctgtcgtagaattttgccaaaaggaaagcataggttcactgcagaatgggactcatactccaagcacggccatggagactgcaattccattcagatcacgtttcttcaatctgaagttgaaaaaccagacttctgaacggtcacgcgtacggtcaagtaatcagttgccacgttcaaacaagcagctttttgaattactttgttatgcagaaagtgtaagtttttaggtgtacctcaacttttagaactatgtatttttttatgaacaataaagattcctgtaaaatgttcaagctacattattgtttaatgggtatagatcttcagttttacaaggtgaaaagagttacggagatgaatcgtggtggtggatgcataatgagatgaaggaaagtttttttctatttctagctttctaagaatgtcgtcatgctcaacacattgagtagatgttgagttttgacatttg

SEQ ID NO: 18226 - DNA, 2246 bp, Homo sapiens
  source 1..2246: mol_type = unassigned DNA
gcgagacgggtgcgcttacgccacggcgtctgctggcggccgcggagacgcagagtcttgagcagcgcggcaggcaccatgttcctgactgcgctcctctggcgcggccgcattcccggccgtcagtggatcgggaagcaccggcggccgcggttcgtgtcgttgcgcgccaagcagaacatgatccgccgcctggagatcgaggcggagaaccattactggctgagcatgccctacatgacccgggagcaggagcgcggccacgccgcggtgcgcaggagggaggccttcgaggccataaaggcggccgccacttccaagttccccccgcatagattcattgcggaccagctcgaccatctcaatgtcaccaagaaatggtcctaatcctgagtcgtcacccttggattttatggatcacggagctgaccatctttacctggtcctggaactgaaaaactgtagcttgtgtgaaaatgagcctttggaccagtctttattaaaacaaacaaacatgagtagtctgcatatcgaatatctagagctctaaacccccaatacttaaaagtctaattgctgtcctgtggtttcattagtctgataggaagatagggatttcctcagtcacagatgatattttgaaggaaagctgcaataaagccacaatgatttgaggtctttgcttaagtatgagatacttgatgggggctttatcatgcaacattagtttgcttaccttaagaattgcccaaaaatgaaagaaaatatgagcttttcagttaaacatactcctaaaaacattttccgggattttactactaaaattggacatttaagcgaagtaaaagaggccgggtgcggtggctcacgcctgtaatcccaacactttaggagtccaaggcgggcggatcacttgaggtcaggagttcaagaccagcttggccaaggtgataaaacccgtctctactaatacaaaaaaaattagctgggtatgttggtgcaggcttgcaatcccagctacttgggacgctgaggtgggaggatcgcctgaacctcagaggcagaggttgcaatgaagcggaggttgcagtgagccgagagcatgccgctgcactccagcctgggagactgcatctcaaaaaagaaaaataaacgaagtaaaagatatttatcagagctgttacaggaaggtgtattttttagctattttggcagggtgctgtggtgcttgcatgtagtcccagctattcaggaatattgcttgagtccagcttgggcaacatagcgagaccctatctaaaataacaataatatatggccaggcgggatggctcacgcctgtaatcccagcactttgggaggctgaggcgggcagatcacttgaggccaggagttcaagaccagcccaaccaacatggtgaaaccctgtctccactgaaaatacataaaattagccgggtgcagtggtgaggcctgtaatcccagctactcaggaggctgaggcaggagaatcgcttgcacccaggaggtggaggctgcagtaagtcgagattgtgtcactgcactctagcctgggcgacagaaaaagaaaatttaggtggggaaaaaaatcagaattgcgtctgtgggaacaggaataaaggagaaaccactattgactgggaagacacacaaagaactttgtcaaagttgtatggctgaggcccacacggtggctcacttctgtaatcccatcactttgggaggcttaggcagaaggatcacctgagatcaggagttccagaccagcctggccaacatggcgaaaccccatctctactaaaaatacaaaaattagccgggcgtggtggcttacgcctgtaatcccagcactttgggaggccaaggtgggcggatcacaaggtcaggagttcgagaccagcctggccaatatggtgaaaccccatctctactaaaaatataaaaatcagcaaaaaaaatttagccaggcttggtcatgcatgcctgtaatcctagctactgggaaggctgaggaaggagaattgcttgaacccaggtggtggaggttgcagtgagctgagatcgtgccactgctctccagcctgcatgacgggagtgagacaccatctcaaaaaatacatataataatataaataaaaatatcttttttgaaaataatttaatataccatgtaatttaccagttgaagatgttcgctttcagaatataataaaaatagtcaaaaa

SEQ ID NO: 18227 - DNA, 1490 bp, Homo sapiens
  source 1..1490: mol_type = unassigned DNA
gtcgctctgagtacacttgcaggatcaaaaaagaaaaagaataagaaggaaggattaaaataatcacagcatcgccaacaggatcgtattttcccgaaggtggttaaccagccataccggaaccacgaaacacacagggtcctgggcaacacggaggactaacagtaacaccgccacgccggcagcaaagctcattttggtccccgccccgttcctctttctctttttaactccttccctctttgcggattctagaacggaacctttttttaattcttcccagtagaaacgtaggaacaatttcgtgaacgcaatccggagtgcccaacatggcggcggccgtaaggtgcatgggtagagccttgatacatcatcaaaggcatagcctttccaagatggtttatcagacatcactttgttcttgttctgtaaacatccgagtgcccaacagacattttgctgctgctacaaagtctgcaaagaaaacaaaaaaaggtgctaaagaaaaaacaccagatgagaaaaaagatgaaatagaaaaaataaaagcatatccctatatggaaggcgaacctgaggatgatgtctatttaaaacgcttatacccgagacagatatatgaggtggagaaagctgttcacttacttaagaaatttcaaattcttgactttactagtccaaagcaaagtgtttatcttgatttgacactggatatggcactgggaaagaagaaaaacgtggagccatttaccagtgttcttagtttgccatacccatttgcttccgaaatcaataaagttgctgtatttacagagaatgcatcagaggtcaaaatagcggaagaaaatggagctgcatttgcaggaggcactagtctgatacagaagatttgggatgatgaaattgttgcagacttttacgtagctgttccagaaataatgcctgaacttaatcgattaaggaagaaactgaataaaaaatatccaaagctttctcgaaattccattggccgtgacatccccaaaatgcttgaattatttaaaaatggacatgaaattaaggtagatgaagaaagggagaactttctccagaccaaaatagcaacattggatatgtcaagtgaccagatagctgccaatctgcaagcagttattaatgaagtttgtaggcacagaccgctgaatttgggtccctttgtggtacgtgctttccttcgtagttcaacaagtgaaggtttattactgaagattgatccattgttgcctaaagaagtaaaaaatgaagaaagtgaaaaagaagatgcctaaatgtggtgaattgtgaaattactttcagtggtttaagaagcaatggagaaaatgataatacagcataatttttacatttgatgtcttgttattgatcatacttgaaagtgaactttaacattgaaaaatcgtacagtcatttcaagaataagaaaataaaattttctctttgtctgaacctgc

SEQ ID NO: 18228 - DNA, 983 bp, Homo sapiens
  source 1..983: mol_type = unassigned DNA
gagtgcccaacatggcggcggccgtaaggtgcatgggtagagccttgatacatcatcaaaggcatagcctttccaagatggtttatcagacatcactttgttcttgttctgtaaacatccgagtgcccaacagacattttgctgctgctacaaagtctgcaaagaaaacaaaaaaaggtgctaaagaaaaaacaccagatgagaaaaaagatgaaatagaaaaaataaaagcatatccctatatggaaggcgaacctgaggatgatgtctatttaaaacgcttatacccgagacagatatatgaggtggagaaagctgttcacttacttaagaaatttcaaattcttgactttactagtccaaagcaaagtgtttatcttgatttgacactggatatggcactgggaaagaagaaaaacgtggagccatttaccagtgttcttagtttgccatacccatttgcttccgaaatcaataaagttgctgtatttacagagaatgcatcagaggtcaaaatagcggaagaaaatggagctgcatttgcaggaggcactagtctgatacagaagatttgggatgatgaaattgttgcagacttttacgtagctgttccagaaataatgcctgaacttaatcgattaaggaagaaactgaataaaaaatatccaaagctttctcgaaattccattggccgtgacatccccaaaatgcttgaattatttaaaaatggacatgaaattaaggtagatgaagaaagggagaactttctccagaccaaaatagcaacattggatatgtcaagtgaccagatagctgccaatctgcaagcagttattaatgaagtttgtaggcacagaccgctgaatttgggtccctttgtggtacgtgctttccttcgtagttcaacaagtgaaggtttattactgaagattgatccattgttgcctaaagaaataaaaagccaaccaaaaaaaaaaaaaaac

SEQ ID NO: 18229 - DNA, 2013 bp, Homo sapiens
  source 1..2013: mol_type = unassigned DNA
caagtgagctgcccaccttggcctcccaaagtgttgggattacaggcgtgagccaccacacccagcaaaatttctaacaagctctcaaatgatgctgatgttgctggttggggtggaggtggggcataccttgagagccactagattagaccaggggttggcgtattatggcagggccagtcactgtgttttataaaattctattggtacatagtttctgctgtctctttaaatattgtctgtggctgcttttggcagagttgagcattagagacagattacatgggccccaaacttaaaatatttactgtttgaccattttaagaaaaagtttatttaaccttatcccctttttctttctctctctctctctctctttccttccttccttccttccttctttttttttctgagacggagtcttactctgtgcccaggctagagtgcagtggcatgatctcggctcactgcaacctccacctcccgggttcaagcgattctcctgcctcagcctctcaagtagctgggattacaggccggctgcctaccctccagactgtccgctatggctccaaggctgttacccgccaccgtcgtgtgatgcactttcagcggcagaagctgatggctgtgactgaatatatccccccgaaaccagccatccacccatcatgcctgccatctcctcccagccccccacaggaggagataggcctcatcaggcttctccgccgggagatagcagcagttttccaggacaaccgaatgatagccgtctgccagaatgtggctctgagtgcagaggacaagcttcttatgcgacaccagctgcggaaacacaagatcctgatgaaggtcttccccaaccaggtcctgaagcccttcctggaggattccaagtaccaaaatctgctgcccctttttgtggggcacaacatgctgctggtcagtgaagagcccaaggtcaaggagatggtacggatcttaaggactgtgccattcctgccgctgctaggtggctgcattgatgacaccatcctcagcaggcagggctttatcaactactccaagctccccagcctgcccctggtgcagggggagcttgtaggaggcctcacctgcctcacagcccagacccactccctgctccagcaccagcccctccagctgaccaccctgttggaccagtacatcagagagcaacgcgagaaggattctgtcatgtcggccaatgggaagccagatcctgacactgttccggactcgtagccagcctgtttagccagccctgcgcataaatacactctgcgttattggctgtgctctcctcaatgggacatgtggaagaacttggggtcggggagtgtgtttgtcacttggttttcactagtaatgatattgtcaggtatagggccacttggagatgcagaggattccatttcagatgtcagtcaccggcttcgtccttagttttcccaacttgggacgtgataggagcaaagtctctccattctccaggtccaaggcagagatcctgaaaagatagggctattgtcccctgcctccttggtcactgcctcttgctgcacgggctcctgagcccacccccttggggcacaacctgccactgccacagtagctcaaccaagcagttgtgctgagaatggcacctggtgagagcctgctgtgtgccaggctttgtgctgagtgctgtacatgtattagttcctttactgctgaccacattgtacccatttcacagagaaggagcagagaaattaagtggcttgctcaaggtcatgcagttagtaagtggcagaacagggacttgaaccaagccctctgctctgaagaccgcgtcctgaatttcttcactagagcttcctcatcaggttacccagaagtgggtcccatccaccatccaggtgtgcttggatgttagttctccaccctcgaggtgtacgctgtgaaaagtttgggagcactgctttataataaaatgaaatatattct

SEQ ID NO: 18230 - DNA, 1725 bp, Homo sapiens
  source 1..1725: mol_type = unassigned DNA
gtggagatggctgcggccgtggcggggatgctgcgagggggtctcctgccccaggcgggccggctgcctaccctccagactgtccgctatggctccaaggctgttacccgccaccgtcgtgtgatgcactttcagcggcagaagctgatggctgtgactgaatatatccccccgaaaccagccatccacccatcatgcctgccatctcctcccagccccccacaggaggagataggcctcatcaggcttctccgccgggagatagcagcagttttccaggacaaccgaatgatagccgtctgccagaatgtggctctgagtgcagaggacaagcttcttatgcgacaccagctgcggaaacacaagatcctgatgaaggtcttccccaaccaggtcctgaagcccttcctggaggattccaagtaccaaaatctgctgcccctttttgtggggcacaacatgctgctggtcagtgaagagcccaaggtcaaggagatggtacggatcttaaggactgtgccattcctgccgctgctaggtggctgcattgatgacaccatcctcagcaggcagggctttatcaactactccaagctccccagcctgcccctggtgcagggggagcttgtaggaggcctcacctgcctcacagcccagacccactccctgctccagcaccagcccctccagctgaccaccctgttggaccagtacatcagagagcaacgcgagaaggattctgtcatgtcggccaatgggaagccagatcctgacactgttccggactcgtagccagcctgtttagccagccctgcgcataaatacactctgcgttattggctgtgctctcctcaatgggacatgtggaagaacttggggtcggggagtgtgtttgtcacttggttttcactagtaatgatattgtcaggtatagggccacttggagatgcagaggattccatttcagatgtcagtcaccggcttcgtccttagttttcccaacttgggacgtgataggagcaaagtctctccattctccaggtccaaggcagagatcctgaaaagatagggctattgtcccctgcctccttggtcactgcctcttgctgcacgggctcctgagcccacccccttggggcacaacctgccactgccacagtagctcaaccaagcagttgtgctgagaatggcacctggtgagagcctgctgtgtgccaggctttgtgctgagtgctgtacatgtattagttcctttactgctgaccacattgtacccatttcacagagaaggagcagagaaattaagtggcttgctcaaggtcatgcagttagtaagtggcagaacagggacttgaaccaagccctctgctctgaagaccgcgtcctgaatttcttcactagagcttcctcatcaggttacccagaagtgggtcccatccaccatccaggtgtgcttggatgttagttctccaccctcgaggtgtacgctgtgaaaagtttgggagcactgctttataataaaatgaaatatattctacttcctttattttgtggtttacacggttgtcctccctctaaacttactctcaggggcttctctgtcatctgactttcctcactcttgcttcccttcctaggaaaatcctcttcccctatacctgttcccacaaatggcatcccgcgcatgcttgccctattaaaggcagctgacagctgtacccacta

SEQ ID NO: 18231 - DNA, 1622 bp, Homo sapiens
  source 1..1622: mol_type = unassigned DNA
ttccgtccattcttccggtggagatggctgcggccgtggcggggatgctgcgagggggtctcctgccccaggcgggctagagtgcagtggcatgatctcggctcactgcaacctccacctcccgggttcaagcgattctcctgcctcagcctctcaagtagctgggattacaggccggctgcctaccctccagactgtccgctatggctccaaggctgttacccgccaccgtcgtgtgatgcactttcagcggcagaagctgatggctgtgactgaatatatccccccgaaaccagccatccacccatcatgcctgccatctcctcccagccccccacaggaggagataggcctcatcaggcttctccgccgggagatagcagcagttttccaggacaaccgaatgatagccgtctgccagaatgtggctctgagtgcagaggacaagcttcttatgcgacaccagctgcggaaacacaagatcctgatgaaggtcttccccaaccaggtcctgaagcccttcctggaggattccaagtaccaaaatctgctgcccctttttgtggggcacaacatgctgctggtcagtgaagagcccaaggtcaaggagatggtacggatcttaaggactgtgccattcctgccgctgctaggtggctgcattgatgacaccatcctcagcaggcagggctttatcaactactccaagctccccagcctgcccctggtgcagggggagcttgtaggaggcctcacctgcctcacagcccagacccactccctgctccagcaccagcccctccagctgaccaccctgttggaccagtacatcagagagcaacgcgagaaggattctgtcatgtcggccaatgggaagccagatcctgacactgttccggactcgtagccagcctgtttagccagccctgcgcataaatacactctgcgttattggctgtgctctcctcaatgggacatgtggaagaacttggggtcggggagtgtgtttgtcacttggttttcactagtaatgatattgtcaggtatagggccacttggagatgcagaggattccatttcagatgtcagtcaccggcttcgtccttagttttcccaacttgggacgtgataggagcaaagtctctccattctccaggtccaaggcagagatcctgaaaagatagggctattgtcccctgcctccttggtcactgcctcttgctgcacgggctcctgagcccacccccttggggcacaacctgccactgccacagtagctcaaccaagcagttgtgctgagaatggcacctggtgagagcctgctgtgtgccaggctttgtgctgagtgctgtacatgtattagttcctttactgctgaccacattgtacccatttcacagagaaggagcagagaaattaagtggcttgctcaaggtcatgcagttagtaagtggcagaacagggacttgaaccaagccctctgctctgaagaccgcgtcctgaatttcttcactagagcttcctcatcaggttacccagaagtgggtcccatccaccatccaggtgtgcttggatgttagttctccaccctcgaggtgtacgctgtgaaaagtttgggagca

SEQ ID NO: 18232 - DNA, 1605 bp, Homo sapiens
  source 1..1605: mol_type = unassigned DNA
gtgaggacccttgacctctggcccaagatggtggcgcccagagcttcgctcttgctgctcccctgaggtgaactgaagccagcagccccgcatcatgtcaaagctcggccgggccgcccggggcctcaggaagcccgaggtcggcggtgtgatccgggcgatcgtgcgggcaggcctggccatgcccgggcccccactaggcccagtgctgggtcagagaggcgtttccatcaaccagttttgcaaggagttcaatgagaggacaaaggacatcaaggaaggcattcctctgcctaccaagattttagtgaagcctgacaggacatttgaaattaagattggacagcccactgtttcctacttcctgaaggcagcagctgggattgaaaagggggcccggcaaacagggaaagaggtggcaggcctggtgaccttgaagcatgtgtatgagattgcccgcatcaaagctcaggatgaggcatttgccctgcaggatgtacccctgtcgtctgttgtccgctccatcatcgggtctgcccgttctctgggcattcgcgtggtgaaggacctcagttcagaagagcttgcagctttccagaaggaacgagccatcttcctggctgctcagaaggaggcagatttggctgcccaagaagaagctgccaagaagtgacccttgccccaccaactcccagatttcaaaggaggtagttgcaaaagctgtgcccaaggggaggaaggaggtcacaccaatatgatgatggttttcatgactttgaatgatatatttttgtacatctagctgtatcgaggcatcaggcctgaataaacatcctttcttacccactgtcatcttctatcttgggacctcagggaagggaaccagtactggtggtagccaatatgggcagacattaggaaattggggtcttcatactgcttctcagatgtgcaaactgaggttcagccaagcaaagtaacttgcccaggtccttttttttcttttttaagttataattttgttttattgcccaggttctgaattggtgccagaggtaggaatagaacccaggccttctcatttgaaatcctgtgttcttcccctccccagggtgggaactatggttgctagggctgaggtgtattgcttacttcttccatcaaaaatctcttttatctctgaacaacttgccacctctgcagaaacaagtccctgtggagatctcagttcagccccaggcagggttactacatggagtacccagatcccaggggctacttcaggcccttctactaagctcctgaccctggctctgggtcagatgttggctgaacatgaactattgtagggctgacagctacagaccacagaaagagcaaagcttcagtaggttcctgcctgatggagaagtcctcgggaagcccttggccttctatttcctcattgtcctttcagagaagagagcaggagttgggggagaaaggagattcgcatttactgaccatctgttatgtgctagacacttcattttacactgagaaaatatggaaagcatagataaacacctaaaagaaaataaaaacctcatgttatcccaccaccca

SEQ ID NO: 18233 - DNA, 922 bp, Homo sapiens
  source 1..922: mol_type = unassigned DNA
cctctggcccaagatggtggcgcccagagcttcgctcttgctgctcccctgaggtgaactgaagccagcagccccgcatcatgtcaaagctcggccgggccgcccggggcctcaggaagcccgaggtcggcggtgtgatccgggcgatcgtgcgggcaggcctggccatgcccgggcccccactaggcccagtgctgggtcagagaggcgtttccatcaaccagttttgcaaggagttcaatgagaggacaaaggacatcaaggaaggcattcctctgcctaccaagattttagtgaagcctgacaggacatttgaaattaagattggacagcccactgtttcctacttcctgaaggcagcagctgggattgaaaagggggcccggcaaacagggaaagaggtggcaggcctggtgaccttgaagcatgtgtatgagattgcccgcatcaaagctcaggatgaggcatttgccctgcaggatgtacccctgtcgtctgttgtccgctccatcatcgggtctgcccgttctctgggcattcgcgtggtgaaggaacgttgttctgcaaatgttctaagaaatggaaagatctccatgaaggatccaagtgggagaagttcagtgtgacctgggtctgtcgtcctagagcctcagttcagaagagcttgcagctttccagaaggaacgagccatcttcctggctgctcagaaggaggcagatttggctgcccaagaagaagctgccaagaagtgacccttgccccaccaactcccagatttcaaaggaggtagttgcaaaagctgtgcccaaggggaggaaggaggtcacaccaatatgatgatggttttcatgactttgaatgatatatttttgtacatctagctgtatcgaggcatcaggcctgaataaacatcctttctta

SEQ ID NO: 18234 - DNA, 1527 bp, Homo sapiens
  source 1..1527: mol_type = unassigned DNA
gtgaggacccttgacctctggcccaagatggtggcgcccagagcttcgctcttgctgctcccctgaggtgaactgaagccagcagccccgcatcatgtcaaagctcggccgggccgcccggggcctcaggaagcccgagagaggcgtttccatcaaccagttttgcaaggagttcaatgagaggacaaaggacatcaaggaaggcattcctctgcctaccaagattttagtgaagcctgacaggacatttgaaattaagattggacagcccactgtttcctacttcctgaaggcagcagctgggattgaaaagggggcccggcaaacagggaaagaggtggcaggcctggtgaccttgaagcatgtgtatgagattgcccgcatcaaagctcaggatgaggcatttgccctgcaggatgtacccctgtcgtctgttgtccgctccatcatcgggtctgcccgttctctgggcattcgcgtggtgaaggacctcagttcagaagagcttgcagctttccagaaggaacgagccatcttcctggctgctcagaaggaggcagatttggctgcccaagaagaagctgccaagaagtgacccttgccccaccaactcccagatttcaaaggaggtagttgcaaaagctgtgcccaaggggaggaaggaggtcacaccaatatgatgatggttttcatgactttgaatgatatatttttgtacatctagctgtatcgaggcatcaggcctgaataaacatcctttcttacccactgtcatcttctatcttgggacctcagggaagggaaccagtactggtggtagccaatatgggcagacattaggaaattggggtcttcatactgcttctcagatgtgcaaactgaggttcagccaagcaaagtaacttgcccaggtccttttttttcttttttaagttataattttgttttattgcccaggttctgaattggtgccagaggtaggaatagaacccaggccttctcatttgaaatcctgtgttcttcccctccccagggtgggaactatggttgctagggctgaggtgtattgcttacttcttccatcaaaaatctcttttatctctgaacaacttgccacctctgcagaaacaagtccctgtggagatctcagttcagccccaggcagggttactacatggagtacccagatcccaggggctacttcaggcccttctactaagctcctgaccctggctctgggtcagatgttggctgaacatgaactattgtagggctgacagctacagaccacagaaagagcaaagcttcagtaggttcctgcctgatggagaagtcctcgggaagcccttggccttctatttcctcattgtcctttcagagaagagagcaggagttgggggagaaaggagattcgcatttactgaccatctgttatgtgctagacacttcattttacactgagaaaatatggaaagcatagataaacacctaaaagaaaataaaaacctcatgttatcccaccaccca

SEQ ID NO: 18235 - DNA, 1945 bp, Homo sapiens
  source 1..1945: mol_type = unassigned DNA
cgcgcgggcggcgctttgaaccgggcgcggggcgcggggcgcggggcgctgcggccggtacacgccggggtagggccggggtcgggttgtggtcgggccgggattgggctctcctgggccatggcagccgaggcgcgcgtgtcgcgctggtacttcggggggctggcctcctgcggggccgcctgctgcacgcacccgctggacctgctcaaggtgcatctgcagacgcagcaggaggtgaagctgcgcatgacgggcatggcgctgcgggtggtgcgtaccgacggcatcctggcactctacagcggcctgagcgcctcgctgtgcagacagatgacctactccctgactcggttcgccatctacgagactgtgcgggaccgtgtggccaagggcagccaggggcctctccccttccacgagaaggtgttgctgggctccgtcagcggtttagctggaggcttcgtggggacgcccgcagacttggtcaacgtcaggatgcagaacgacgtgaagctgccccagggtcagcggcgcaactacgcccatgcgctggatggcctgtaccgcgtagctcgtgaagagggtctcaggagactgttctcgggtgcaaccatggcatccagccgaggggccttagtcactgtgggccagctgtcctgctacgaccaggccaagcagctggtccttagcaccgggtacctctctgacaacatcttcactcactttgtcgccagctttattgcagccgctggtgacgagccccctcctcagggtggatgtgccacgttcctgtgccagcccctggatgtgctgaagactcgcctgatgaactccaagggggagtatcagggcgttttccactgcgccgtggagacagcgaagctcgggcctctggccttttacaagggcctcgtcccagctggcatccgcctcatcccccacaccgtgctcacttttgtgtttctggaacagctacgcaaaaactttggcatcaaagtgccatcctgaccagccgtgggaatggctgggctgccaggccagacacgctaggttcttccaaagagtcccaagcccagcacctgctcctggggccacgacctccctggccgtggccacccgtcctccgcagcaggcccctgctgtccccccacctgctggctgagctcctcctggcctcgtcccctctcagctgtagctgcaccacccccgctctggctaccaggctctcccggctgggcactgcgtggccttgcccctctcccgctggcagctcctcaggggaacaggggctaccagaggctgatttctcccctctcctgggccaggggaggggtattatccctgcctcctgcccccgatgcccaaagcagcatcttccagcactttccatcgaggacttgggtggcagagtgtgggtgcagcctggctgttgctcacccaagtgctagctctgcacttcgtgtctgctgagagcaaccagaccttccatgtcctcgggcagctgcaactccccgcgagaccccgcagctgggtgggatgaacaagcaacgcagaccacaagcgagtgcctgggagggagtggcccagggtggttctggagccattgtgggtgagggtcgagggccaccgaggtcccgcgcaccgctgcctgccctgcagtggctttaacagttagttttgccaaagcctctccactcaccagcaggcggtctctgtcttcagggattgtgcctgcgtccctcgggcacctgggcccccccgcttggctccctgggggaatggcccaggcgggccgcggttcctccttagggccttctccccgacaaggagtccgacggggcggatgctgcatcctctgcctccctggtcgctgggcttcaccccacctgggaagggcagtgtgctctgtgggggctgcaatcaataaatgccgggagctgcc

SEQ ID NO: 18236 - DNA, 885 bp, Homo sapiens
  source 1..885: mol_type = unassigned DNA
cagcccgcggaccgatgctgccggcggccgctcgccccctgtgggggccttgccttgggcttcgggccgctgcgttccgccttgccaggcgacaggtgccatgtgtctgtgccgtgcgacatatgaggagcagcggccatcagaggtgtgaggccctcgctggtgcacccctggataacgcccccaaggagtacccccccaagatacagcagctggtccaggacatcgccagcctcactctcttggaaatctcagacctcaacgagctcctgaagaaaacgttgaagatccaggatgtcgggcttgtgccgatgggtggtgtgatgtctggggctgtccctgctgcagcagcccaggaggcggtggaagaagatatccccatagcgaaagaacggacacatttcaccgtccgcctgaccgaggcgaagcccgtggacaaagtgaagctgatcaaggaaatcaagaactacatcaaggcatcaacctcgtccaggcaaagaagctggtggagtccctgcccaggaaatcaaagccaatgtcgccaaagctgaggcggagaagatcaaggcggccctggaggcggtgggcggcaccgtggttctggagtagcctccagctcggaggacttgtgttcaggggtcctgggccccgggcgaggtcccgccctcccgtggtcactggctccgcccccagcaccaggcgcccagtggagccgtttgggagaattgcctgcgccacgcagcggggccggacaggccgcacagacctactgtggcgggagggaggggcggctgctgcctggtgacggcacccggaggcccaccaggacgcgccaccggtgaatgtgcctctggtggctgctgagaaaaatacactgtgcagctc

SEQ ID NO: 18237 - DNA, 998 bp, Homo sapiens
  source 1..998: mol_type = unassigned DNA
gctcgaatgcccggcagccgtggcggctagagcgttcctccccagctcgaatgcccggcggccgaggcggctagagcgtcgcctcctcccggggaaccgcgtgtgaccttccagcccgcggaccgatgctgccggcggccgctcgccccctgtgggggccttgccttgggcttcgggccgctgcgttccgccttgccaggcgacaggtgccatgtgtctgtgccgtgcgacatatgaggagcagcggccatcagaggtgtgaggccctcgctggtgcacccctggataacgcccccaaggagtacccccccaagatacagcagctggtccaggacatcgccagcctcactctcttggaaatctcagacctcaacgagctcctgaagaaaacgttgaagatccaggatgtcgggcttgtgccgatgggtggtgtgatgtctggggctgtccctgctgcagcagcccaggaggcggtggaagaagatatccccatagcgaaagaacggacacatttcaccgtccgcctgaccgaggcgaagcccgtggacaaagtgaagctgatcaaggaaatcaagaactacatccaaggcatcaacctcgtccaggcaaagaagctggtggagtccctgccccaggaaatcaaagccaatgtcgccaaagctgaggcggagaagatcaaggcggccctggaggcggtgggcggcaccgtggttctggagtagcctccagctcggaggacttgtgttcaggggtcctgggccccgggcgaggtcccgccctcccgtggtcactggctccgcccccagcaccaggcgcccagtggagccgtttgggagaattgcctgcgccacgcagcggggccggacaggccgcacagacctactgtggcgggagggaggggcggctgctgcctggtgacggcacccggaggcccaccaggacgcgccaccggtgaatgtgcctctggtggctgctgagaaaaatacactgtgcagctc

SEQ ID NO: 18238 - DNA, 1884 bp, Homo sapiens
  source 1..1884: mol_type = unassigned DNA
cggggcgcggggcgctgcggccggtacacgccggggtagggccggggtcgggttgtggtcgggccgggattgggctctcctgggccatggcagccgaggcgcgcgtgtcgcgctggtacttcggggggctggcctcctgcggggccgcctgctgcacgcacccgctggacctgctcaaggtgcatctgcagacgcagcaggaggtgaagctgcgcatgacgggcatggcgctgcgggtggtgcgtaccgacggcatcctggcactctacagcggcctgagcgcctcgctgtgcagacagatgacctactccctgactcggttcgccatctacgagactgtgcgggaccgtgtggccaagggcagccaggggcctctccccttccacgagaaggtgttgctgggctccgtcagcggtttagctggaggcttcgtggggacgcccgcagacttggtcaacgtcaggatgcagaacgacgtgaagctgccccagggtcagcggcgcaactacgcccatgcgctggatggcctgtaccgcgtagctcgtgaagagggtctcaggagactgttctcgggtgcaaccatggcatccagccgaggggccttagtcactgtgggccagctgtcctgctacgaccaggccaagcagctggtccttagcaccgggtacctctctgacaacatcttcactcactttgtcgccagctttattgcaggtggatgtgccacgttcctgtgccagcccctggatgtgctgaagactcgcctgatgaactccaagggggagtatcagggcgttttccactgcgccgtggagacagcgaagctcgggcctctggccttttacaagggcctcgtcccagctggcatccgcctcatcccccacaccgtgctcacttttgtgtttctggaacagctacgcaaaaactttggcatcaaagtgccatcctgaccagccgtgggaatggctgggctgccaggccagacacgctaggttcttccaaagagtcccaagcccagcacctgctcctggggccacgacctccctggccgtggccacccgtcctccgcagcaggcccctgctgtccccccacctgctggctgagctcctcctggcctcgtcccctctcagctgtagctgcaccacccccgctctggctaccaggctctcccggctgggcactgcgtggccttgcccctctcccgctggcagctcctcaggggaacaggggctaccagaggctgatttctcccctctcctgggccaggggaggggtattatccctgcctcctgcccccgatgcccaaagcagcatcttccagcactttccatcgaggacttgggtggcagagtgtgggtgcagcctggctgttgctcacccaagtgctagctctgcacttcgtgtctgctgagagcaaccagaccttccatgtcctcgggcagctgcaactccccgcgagaccccgcagctgggtgggatgaacaagcaacgcagaccacaagcgagtgcctgggagggagtggcccagggtggttctggagccattgtgggtgagggtcgagggccaccgaggtcccgcgcaccgctgcctgccctgcagtggctttaacagttagttttgccaaagcctctccactcaccagcaggcggtctctgtcttcagggattgtgcctgcgtccctcgggcacctgggcccccccgcttggctccctgggggaatggcccaggcgggccgcggttcctccttagggccttctccccgacaaggagtccgacggggcggatgctgcatcctctgcctccctggtcgctgggcttcaccccacctgggaagggcagtgtgctctgtgggggctgcaatcaataaatgccgggagctgcc

SEQ ID NO: 18239 - DNA, 1919 bp, Homo sapiens
  source 1..1919: mol_type = unassigned DNA
ccggctcgaatgcccggcagccgtggcggctagagcgttcctccccagctcgaatgcccggcggccgaggcggctagagcgtcgcctcctcccggggaaccgcgtgtgaccttccagcccgcggaccgatgctgccggcggccgctcgccccctgtgggggccttgccttgggcttcgggccgctgcgttccgccttgccaggcgacaggtgccatgtgtctgtgccgtgcgacatatgaggagcagcggccatcagaggtgtgaggccctcgctggtgcacccctggataacgcccccaaggagtacccccccaagatacagcagctggtccaggacatcgccagcctcactctcttggaaatctcagacctcaacgagctcctgaagaaaacgttgaagatccaggatgtcgggcttgtgccgatgggtggtgtgatgtctggggctgtccctgctgcagcagcccaggaggcggtggaagaagatatccccatagcgaaagaacggacacatttcaccgtccgcctgaccgaggcgaagcccgtggacaaagtgaagctgatcaaggaaatcaagaactacatccaaggcatcaacctcgtccaggcaaagaagctggtggagtccctgccccaggaaatcaaagccaatgtcgccaaagctgaggcggagaagatcaaggcggccctggaggcgacgcagcaggaggtgaagctgcgcatgacgggcatggcgctgcgggtggtgcgtaccgacggcatcctggcactctacagcggcctgagcgcctcgctgtgcagacagatgacctactccctgactcggttcgccatctacgagactgtgcgggaccgtgtggccaagggcagccaggggcctctccccttccacgagaaggtgttgctgggctccgtcagcggtttagctggaggcttcgtggggacgcccgcagacttggtcaacgtcaggatgcagaacgacgtgaagctgccccagggtcagcggcgcaactacgcccatgcgctggatggcctgtaccgcgtagctcgtgaagagggtctcaggagactgttctcgggtgcaaccatggcatccagccgaggggccttagtcactgtgggccagctgtcctgctacgaccaggccaagcagctggtccttagcaccgggtacctctctgacaacatcttcactcactttgtcgccagctttattgcaggtggatgtgccacgttcctgtgccagcccctggatgtgctgaagactcgcctgatgaactccaagggggagtatcagggcgttttccactgcgccgtggagacagcgaagctcgggcctctggccttttacaagggcctcgtcccagctggcatccgcctcatcccccacaccgtgctcacttttgtgtttctggaacagctacgcaaaaactttggcatcaaagtgccatcctgaccagccgtgggaatggctgggctgccaggccagacacgctaggttcttccaaagagtcccaagcccagcacctgctcctggggccacgacctccctggccgtggccacccgtcctccgcagcaggcccctgctgtccccccacctgctggctgagctcctcctggcctcgtcccctctcagctgtagctgcaccacccccgctctggctaccaggctctcccggctgggcactgcgtggccttgcccctctcccgctggcagctcctcaggggaacaggggctaccagaggctgatttctcccctctcctgggccaggggaggggtattatccctgcctcctgcccccgatgcccaaagcagcatcttccagcactttccatcgaggacttgggtggcagagtgtgggtgcagcctggctgttgctcacccaagtgctagctctgcacttcgtgtctgctga

SEQ ID NO: 18240 - DNA, 1087 bp, Homo sapiens
  source 1..1087: mol_type = unassigned DNA
cagcagcctttgaggggactggctttactaatgagcaacaatgctggtcgctgcgtgaaggccaggtgcatctgcagacgcagcaggaggtgaagctgcgcatgacgggcatggcgctgcgggtggtgcgtaccgacggcatcctggcactctacagcggcctgagcgcctcgctgtgcagacagatgacctactccctgactcggttcgccatctacgagactgtgcgggaccgtgtggccaagggcagccaggggcctctccccttccacgagaaggtgttgctgggctccgtcagcggtttagctggaggcttcgtggggacgcccgcagacttggtcaacgtcaggatgcagaacgacgtgaagctgccccagggtcagcggcgcaactacgcccatgcgctggatggcctgtaccgcgtagctcgtgaagagggtctcaggagactgttctcgggtgcaaccatggcatccagccgaggggccttagtcactgtgggccagctgtcctgctacgaccaggccaagcagctggtccttagcaccgggtacctctctgacaacatcttcactcactttgtcgccagctttattgcaggtggatgtgccacgttcctgtgccagcccctggatgtgctgaagactcgcctgatgaactccaagggggagtatcagggcgttttccactgcgccgtggagacagcgaagctcgggcctctggccttttacaagggcctcgtcccagctggcatccgcctcatcccccacaccgtgctcacttttgtgtttctggaacagctacgcaaaaactttggcatcaaagtgccatcctgaccagccgtgggaatggctgggctgccaggccagacacgctaggttcttccaaagagtcccaagcccagcacctgctcctggggccacgacctccctggccgtggccacccgtcctccgcagcaggcccctgctgtccccccacctgctggctgagctcctcctggcctcgtcccctctcagctgtagctgcaccacccccgctctggctaccaggctctcccggctgggcactgcgtggccttgcccctct

SEQ ID NO: 18241 - DNA, 956 bp, Homo sapiens
  source 1..956: mol_type = unassigned DNA
atcgcgtccgccgggctgggcctggcgcgcaggcgctaggaagaggccgcgtggggcgaaggcggcgcttggctggtggggcccgcggcgggattttcccgggcggcgagagcggatctatcttgggatcccatggctttctttactgggctctggggccccttcacctgtgtaagcagagtgctgagccatcactgtttcagcaccactgggagtctgagtgcgattcagaagatgacgcgggtacgagtggtggacaacagtgccctggggaacagcccataccatcgggctcctcgctgcatccatgtctataagaagaatggagtgggcaaggtgggcgaccagatactactggccatcaagggacagaagaaaaaggcgctcattgtggggcactgcatgcctggcccccgaatgacccccagattcgactccaacaacgtggtcctcattgaggacaacgggaaccctgtggggacacgaattaagacacccatccccaccagcctgcgcaagcgggaaggcgagtattccaaggtgctggccattgctcagaactttgtgtgagttgagcccaggcctctggttgcaggactcgtgaatggagcagttctgagaaccacccttttgctaagggagcttgggagccacatggctgctcccttcacactgggtaacagtgtagtatcctgtgagagaataaatgtattcatttatgtgtttttccagagctttctgggatgtgggaaaataaattacactgaagcagttgaaaggtggcttacccgagtctggccacacggggtagcattctttacatggagcagccttggtgccagggtctgagcccttgcttttctggtttggaccctataagttcatccaggactgtcaggccctggaaaactgaggtacacaccaaatgccaatttataaatgtaccatggctctaa

SEQ ID NO: 18242 - DNA, 1147 bp, Homo sapiens
  source 1..1147: mol_type = unassigned DNA
acaaagcagcccccgagaccacgtggcctccgagcagctcagggcgcccttgaaagttcttggatctgcgggttatggccggtcccttgcagggcggtggggcccgggccctggacctactccggggcctgccgcgtgtgagcctggccaacttaaagccgaatcccggctccaagaaaccggagagaagaccaagaggtcggagaagaggtagaaaatgtggcagaggccataaaggagaaaggcaaagaggaacccggccccgcttgggctttgagggaggccagactccattttacatccgaatcccaaaatacgggtttaacgaaggacatagtttcagacgccagtataagcctttgagtctcaatagactgcagtatcttattgatttgggtcgtgttgatcctagtcaacctattgacttaacccagcttgtcaatgggagaggtgtgaccatccagccacttaaaagggattatggtgtccagctggttgaggagggtgctgacacctttacggcaaaagttaatattgaagtacagttggcttcagaactagctattgctgccattgaaaaaaatggtggtgttgttactacagccttctatgatccaagaagtctggacattgtatgcaaacctgttccattctttcttcgtggacaacccattccaaaaagaatgcttccaccagaagaactggtaccatattacactgatgcaaagaaccgtgggtacctggcggatcctgccaaatttcctgaagcacgacttgaactcgccaggaagtatggttatatcttacctgatatcactaaagatgaactcttcaaaatgctctgtactaggaaggatccaaggcagattttctttggtcttgctccaggatgggtggtgaatatggccgataagaaaatcctaaaacctacagatgaaaatctccttaagtattatacctcatgaattcccgtccaaggaagcagagttgttaaagagtactggaataggggctgaaggatctatattcccttattgcattttccttatgtataattttccagatggtgatgttacttttcagtgtactcatatgtctcattttcatctaaaattaaatggcaggaaacaaggactgcatagagaaa

SEQ ID NO: 18243 - DNA, 1182 bp, Homo sapiens
  source 1..1182: mol_type = unassigned DNA
actcaacctcccccggaactcaacccccgtcgctcgagtttctttcgcttccgtcgggactctgcggagtggacccgagtgaacacaacttccggccccactgagcggtgtcctgagccgattacagctaggtagtggagcgccgctgcttacctgggtgcaggagacagccggagtcgctgggggagctccgcgccgccggacgcccgtgaccatgtggaggctgctggctcgcgctagtgcgccgctcctgcgggtgcccttgtcagattcctgggcactcctccccgccagtgctggcgtaaagacactgctcccagtaccaagttttgaagatgtttccattcctgaaaaacccaagcttagatttattgaaagggcaccacttgtgccaaaagtaagaagagaacctaaaaatttaagtgacatacggggaccttccactgaagctacggagtttacagaaggcaattttgcaatcttggcattgggtggtggctacctgcattggggccactttgaaatgatgcgcctgacaatcaaccgctctatggaccccaagaacatgtttgccatatggcgagtaccagcccctttcaagcccatcactcgcaaaagtgttgggcatcgcatggggggaggcaaaggtgctattgaccactacgtgacacctgtgaaggctggccgccttgttgtagagatgggtgggcgttgtgaatttgaagaagtgcaaggtttccttgaccaggttgcccacaagttgcccttcgcagcaaaggctgtgagccgcgggactctagagaagatgcgaaaagatcaagaggaaagagaacgtaacaaccagaacccctggacatttgagcgaatagccactgccaacatgctgggcatacggaaagtactgagcccatatgacttgacccacaaggggaaatactggggcaagttctacatgcccaaacgtgtgtagtgagtgtaggagataactgtatataggctactgaaagaaggattctgcatttctattcccctcagcctacccactgaagtctttgggtagctcttaagccataactaaggagcagcatttgagtagatttctgaaaaacaatgttatttgttgatttaaaaagaaaactgtatttttattaaataaaatttaaacatcacttcaggatataa

SEQ ID NO: 18244 - DNA, 1969 bp, Homo sapiens
  source 1..1969: mol_type = unassigned DNA
accacgctccgagctaaggcgcatgcgttccctgaaattgccgccaccggctctaccttccagtttccagttccggcctccaaggggcgggcagaagttggaaacatgcggctgtcggtcgctgcagcgatctcccatggccgcgtatttcgccgtatgggcctcggtcccgagtcccgcatccatctgttgcggaacttgctcacagggctggtgcggcacgaacgcatcgaggcaccatgggcgcgtgtggacgaaatgaggggctacgcggagaagctcatcgactatgggaagctgggagacactaacgaacgagccatgcgcatggctgacttctggctcacagagaaggatttgatcccaaagctgtttcaagtactggcccctcggtacaaagatcaaactgggggctacacaagaatgctgcagatcccaaatcggagtttggatcgggccaagatggcagtgatcgagtataaagggaattgcctcccacccctgcctctgcctcgcagagacagccaccttacactcctaaaccagctgctgcagggtttgcggcaggacctcaggcaaagccaggaagcaagcaaccacagctcccacacagctcaaacaccagggatttaactggatctgaagagtctgcagcccttaatcagtacccatgatcacaggcctttggagcacttttactctctgagaagaactggagctagagatgtaaaatggacagtcttgatggggttgagaaccttctggggagccagatgaccctctctttgcacaatagataaaagtctttatatgaatatatataaatttatttattttttccttcctgtgggatttctggagaatgagaattatccaaatgctcagtctacctgagatagtaaattcatggcttatgcttctggtccttaaatttgggttatttttggttagtgcaattttgtttttcttaatgccagtttacatgggaatgcatcctataattccaaatgttgccagaggtggttgtgttttgacatctggtctcctagagatgagtgcttgggatttcttagagaaagattacttcctgacaggggtaggggagtgacaatctgcaagtgaaacttccttaaacaatctagtaccctgcgaaccttcaggggatactgcaatcagtcctctgttttgaggcaggatcacacattaccttaatgtgttcccttcaaccccctgaatgggcctgggaggagaggacccaagaactcagatgttccaccagtttggccaaaggggtggagacattcagcagaggatgttgggctccaggataagctccttcctcttggtgaggggaaggggtaagaaagagggtctatgcgagagaaggattaggaaattaaacctcctaggaatttcctggaagtttttattgttgtcaaatctggcctctctgggaacccagaaaagggaaatccggcttcagaatgtgagaagctgggagcccctttcttggcacagccaggctgccgttcccttgggttcagaggctttagtagggtagtagttatggaaggacttagaaaggagccatcagtcttggtccaaacacttgatagcagtgcctgataattgccatatccccagtaaagtgggtagaagagattttatcttaggctctatcttctgagtgtatttggcccactgaacccatccactgtctgagataataagtaagagtaagggtaaagggatcactggtgtagcagacatggcttcagtgacagaacgaactattctggtgctaatttagctgtagctgccttagtctgatactcatctactcccaacagagctctttatctctttttctctactatggtttgttcttcacactatagccagaaagctcttatattttaaatgaaatatagtagacactcaaaacatttatgaaataaagctacaactc

SEQ ID NO: 18245 - DNA, 978 bp, Homo sapiens
  source 1..978: mol_type = unassigned DNA
ggagagtttggggatctacagcagccaaaggcttgtccctgactttatatggctgctcctggcgagcgactgagtcgtccgtgaggaaaaagaggcgaggcttttccgagatcgtctcagcgatggcgcttcggtcgcggttttgggggttgttctcggtttgcaggaaccctgggtgcaggttcgcagccctgtcaaccagctccgagccggcagcgaaacctgaagtggaccctgtggaaaatgaagctgtcgccccagaattcaccaaccggaacccccggaacctggagcttttatctgtagccaggaaagagcggggctggcggacggtgtttccctcccgtgagttctggcacaggttgcgagttataaggactcagcatcatgtagaagcacttgtggagcatcagaatggcaaggttgtggtttcggcctccactcgtgagtgggctattaaaaagcacctttatagtaccagaaatgtggtggcttgtgagagtataggacgagtgctggcacagagatgcttagaggcgggaatcaacttcatggtctaccaaccaaccccgtgggaggcagcctcagactcgatgaaacgactacaaagtgccatgacagaaggtggtgtggttctacgggaacctcagagaatctatgaataaatggaagcattaattgttttgaacatgtaaatataaatctgtcagccactacagccatcaaaagagagcatctggaagaacagccagcttggaagttttacagcaataatgttgcagtggaatattatttgtagttaaggtcatcctcctcccctttctgtttttttaaatcaagaactacgttctgcccctctcttgggcttcagaagcatctaagaaaagcagtcatcaattataattaactttcaaagggcaagtcagaagttgtttataaattacaaaataaaggcatattatgaactcttattttctg

SEQ ID NO: 18246 - DNA, 3479 bp, Homo sapiens
  source 1..3479: mol_type = unassigned DNA
gtagtcttgacgtgagctagctggcatggcggcctgcattgcagcggggcactgggctgcaatgggcctaggccggagtttccaagccgccaggactctgctccccccgccggcctctatcgcctgcagggtccacgcggggcctgtccggcagcagagcactgggccttccgagcccggtgcgttccaaccgccgccgaaaccggtcatcgtggacaagcaccgccccgtggaaccggaacgcaggttcttgagtcctgaattcattcctcgaaggggaagaacagatcctctgaaatttcaaatagaaagaaaagatatgttagaaaggagaaaagtactccacattccagagttctatgttggaagtattcttcgtgttactacagctgacccatatgccagtggaaaaatcagccagtttctggggatttgcattcagagatcaggaagaggacttggagctactttcatccttaggaatgttatcgaaggacaaggtgtcgagatttgctttgaactttataatcctcgggtccaggagattcaggtggtcaaattagagaaacggctggatgatagcttgctatacttacgagatgcccttcctgaatatagcacttttgatgtgaatatgaagccagtagtacaagagcctaaccaaaaagttcctgttaatgagctgaaagtaaaaatgaagcctaagccctggtctaaacgctgggaacgtccaaattttaatattaaaggaatcagatttgatctttgtttaactgaacagcaaatgaaagaagctcagaagtggaatcagccatggcttgaatttgatatgatgagggaatatgatacttcaaaaattgaagctgcaatatggaaggaaattgaagcgtcgaaaaggtcttgattctgagaatgaatttggttagttgcagaagatacattggctctaagaggatatattttgagaccaatttaatttcatttataagaacatagtaattaagtgaactaagcattcattgttttattaatactttttttctaaaataaaacttgtacaccagtttattactctaaaaagagaattacacatgccaaatggaccaatgtccatttgcttattggaggcaaagctacaatagaagtcagagcatcaccagaatggtctttaatgagcatggaacctgagcaaagggaataggtgggatgaattttttttttaattgtgaaacaattcataagcacaatatgatttacagaataataaacattcatgtacccactatcaggttaagaaatagaacatttattaatatgtaggaatgttaagaaataaaacatttaataagatctcagaagactccagtaaatctgcaattgtatctctctcctttttaaatgtaaatatcatcttgacttgttaattattcccttgcatttcttttagtttactgccaacacatatattcttcaacaatatatttaattttgaaaaacctgaaaaaaaaaacctgttagcaagtataaaggggcagtattactattattgcatgaaggcttcaagggaaacgttacagtctttgggtcatagtctggcttcagcttcctctgagagtttacagaggccaattttgagcaaattcatggctaaggttatgagtgagttctgctaaacagaaggctcaccacaaggtatctggcaggattatactgggtagctggatgttgcagaaatgtggttagaggaagtaaactgttttttgatgctcacagcatgatgaatcaaactctgtatcttaggattaggttaaaacaatacctttggtatgatatgagtgttgttgctgatccatgcagcatggattggaaagctggggtataagcacacatgctaaagaaaaacatgtaatttggtccatactcacctggatatactgttcctcaggttaaaaaatacagtactatcctaaatcttgaaggcaactctcagcctatccattgagttaccttcagatctgccctctggttcctagctgtcttgggactaacttctttcctgcgctcagctgttttctggattccatgttttccattttattgagtactaacttgttttgctgcagcacatcctttggtagcttctagaggaagtttgtgtggaggtaaaatttttgagaccttgcatgtctcatgtttgattgatactttatacgtttaggtaggaggtaattttccttcaggactttaaaaatattgttgctccattttctttgtttctattgttgtattgagaaatccaatgccattttgatttccccatcataaatttcatgatgatgtgtcttggtgtgggtctatatttatccattgtattgggttttaggtgaacccttccagatagtaactcatttctgtcagttctgggaaacacttagcattggttgatgatttattctctgctgctttgttctcccaactattatttggatgttggatatccagcactgggtatctattttcttacctccctcccttgaccccagtctctgttttttagctctttagctcaatcttccaactctttgctattgtattttaaaatcttaagaccccttcttgatttgtagaagttccttttcttacaaccaaaaagcctttatctatggatttgttcacagataaggggtattcaatatagtgtatttttttttcatttaaaattgtttgcgcatctatttcctccaaatttctttctgtatttattttttgttgtctatatttcagacttttccaggatatctgataatctttggctgtcttcttatggttgaaagagggactaaaaagcttggaaagcctttgggttgtgggaaggggctgtctttaggattatctgaatgggcttttttgggagtcccctcctccacatgaatattttggttttgtcagattccctagaatagaggcttccaatctccttcctggaggggtctgtccaggaaggagattgtctaggggtctgtcagacagcagctttcagctacttccttgatctttttcactaatgattatatagtcatctaactactgtcaacaagtaatagatatcctatccttcacttgtttagattatttgctgagataacctctcaaaagaacctctcaaaataaaaggttaacaagagcctatatcttatatttttcttctctttatcttgttagaagatagctattaaaacctgttctttttctgtcttgataaacacacttcaatcttggtagaatggtagatgggacagtatattttaggacctaaagctctgcaaatgtatgatcagcttgtaagtacaggtgctcaaaaacatgtaaacaatcatgctttttactctgtaggaatatctttaaaattcttgtgaatttttccccagaagtaaagcaaatcttcccccagaaataaaattaaatgtgcataatctaaa

SEQ ID NO: 18247 - DNA, 1076 bp, Homo sapiens
  source 1..1076: mol_type = unassigned DNA
ctggcatggcggcctgcattgcagcggggcactgggctgcaatgggcctaggccggagtttccaagccgccaggactctgctccccccgccggcctctatcgcctgcagggtccacgcggggcctgtccggcagcagagcactgggccttccgagcccggtgcgttccaaccgccgccgaaaccggtcatcgtggacaagcaccgccccgtggaaccggaacgcaggttcttgagtcctgaattcattcctcgaaggggaagaacagatcctctgaaatttcaaatagaaagaaaagatatgttagaaaggagaaaagtactccacattccagagttctatgttggaagtattcttcgtgttactacagctgacccatatgccagtggaaaaatcagccagtttctggggatttgcattcagagatcaggaagaggacttggagctactttcatccttaggaatgttatcgaaggacaaggtgtcgagatttgctttgaactttataatcctcgggtccaggagattcaggtggtcaaattagagaaacggctggatgatagcttgctatacttacgagatgcccttcctgaatatagcacttttgatgtgaatatgaagccagtagtacaagagcctaaccaaaaagttcctgttaatgagctgaaagtaaaaatgaagcctaagccctggtctaaacgctgggaacgtccaaattttaatattaaaggaatcagatttgatctttgtttaactgaacagcaaatgaaagaagctcagaagtggaatcagccatggcttgaatttgatatgatgagggaatatgatacttcaaaaattgaagctgcaatatggaaggaaattgaagcgtcgaaaaggtcttgattctgagaatgaatttgccgggggccatcaagtataagaccacaggaccacgtgattcataaagaactactgtcaaaactagggccgccattaccaacatgtgaccttgagaaggcaatcaacgctgagagcttcattcctctgatacataaagatttataatcacctttgagtttgaagataacttggatt

SEQ ID NO: 18248 - DNA, 475 bp, Homo sapiens
  source 1..475: mol_type = unassigned DNA
aaagttcctgttaatgagctgaaagtaaaaatgaagcctaagccctggtctaaacgctgggaacgtccaaattttaatattaaaggaatcagatttgatctttgtttaactgaacagcaaatgaaagaagctcagaagtggaatcagccatggcttgaatttgatatgatgagggaatatgatacttcaaaaattgaagctgcaatatggaaggaaattgaagcgtcgaaaaggtcttgattctgagaatgaatttggtaccttcgagattcaatctcttctaaaatccactgagttttttcatctactgagaagtttccacttgtggatgtctcatctttgcctgttaataaataaaattgacttcatactacaaattctcaaaagaaaaaagtaaaatgctttgaaaataaaggtaatatcatggatgtataaacatatgcatatgtaaatacataaatatgcttaaattttg

SEQ ID NO: 18249 - DNA, 1588 bp, Homo sapiens
  source 1..1588: mol_type = unassigned DNA
ttttggaggctggagttttgtaaggttggttggagggggtttgttcatctttctggtagtgcgagaataagagatggcagagaccttaaccttcagccccaggataccctcaaagactcacctgcaatctgccggtgtggctgccgctcttgccggtactgcccctttaaatccatgatggctgccgctcgaggcaattgttttgacgggtctgggggggcggggcctgtttcctagtcacgcgacattagagctgcccgcggattggctctcacggcgttcaggtaggaaaggaggtgtgtatccagcttgggctccagttttctgcccgcctccttttacgttattgcggagcgacggcgccggacagtcaacgtcatctaggagcaccgagcagcttggctaaaagtaagggtgtcgtgctgatggccctgtgcgcactgacccgcgctctgcgctctctgaacctggcgcccccgaccgtcgccgcccctgccccgagtctgttccccgccgcccagatgatgaacaatggcctcctccaacagccctctgccttgatgttgctcccctgccgcccagttcttacttctgtggcccttaatgccaactttgtgtcctggaagagtcgtaccaagtacaccattacaccagtgaagatgaggaagtctgggggccgagaccacacaggccgaatccgggtgcatggtattggcgggggccacaagcaacgttatcgaatgattgactttctgcgtttccggcctgaggagaccaagtcaggaccctttgaggagaaggttatccaagtccgctatgatccctgtaggtcagcagacatagctctggttgctgggggcagccggaaacgctggatcatcgccacagaaaacatgcaggctggagatacaatcttgaactctaaccacataggccgaatggcagttgctgctcgggaaggggatgcgcatcctcttggggctctgcctgtggggaccctcatcaacaacgtggaaagtgagccaggccggggtgcccaatatatccgagctgcagggacgtgtggtgtgctactgcggaaggtgaatggcacagccattatccagctgccctctaagaggcagatgcaggtgctggaaacgtgcgtagcaacagtaggccgagtatccaacgttgatcataacaaacgggtcattggcaaggcaggtcgcaaccgctggctgggcaagaggcctaacagtgggcggtggcaccgcaaggggggctgggctggccgaaagattcggccactaccccccatgaagagttacgtgaagctgccttctgcttctgcccaaagctgatatccctgtactctaataaaatgccccccccccccgttttaatctgttactgtggttttgttttgggtgttttttgttttttttgttgttgttttttttttgcgggggaggggatggtacagactaaacgtggggaaaagaagtaaaaagtgtggaagagaaagtacaggacactgggtctgtccccaccccaattcccttacaagtaatggagccggggatggaaataaatgacgtccaaggtc

SEQ ID NO: 18250 - DNA, 721 bp, Homo sapiens
  source 1..721: mol_type = unassigned DNA
cggaagcgctcgtgaccaccatttccgacccgggcaagatggcagcggcgctgcgcgtgcgttgttgagtgttcgggacgccggcctgcaggcgccatggtcttcctcaccgcgcagctctggctgcggaatcgcgtcaccgaccgctactttcggatccaggaggtgctgaagcacgccaggcacttccggggaaggaaaaatcgctgctacaggttggcggtcagaaccgtgattcgagcctttgtgaaatgcaccaaagcccgatacctgaagaaaaagaacatgaggaccctctggattaatcgaattacagctgctagccaggaacatggactgaagtatccagcgctcattgggaatttagttaagtgccaggtggagctcaacaggaaagtcctagcggatctggccatctacgagccaaagactttcaaatctttggctgccttggccagtaggaggcgacacgaaggatttgctgctgccttgggggatgggaaggaacctgaaggcattttttccagagtggtgcagtaccactgaggactgttgctgtattgattaggaaaagagacagagtaatttgcagtttgtttgatttatacttttgtttatctacaacccaataacagacatgagggatggccctgtctctctgggacagagcctcacagatgatgtccatgttttgtgtgaatgaaactcaaacactcttcag

SEQ ID NO: 18251 - DNA, 683 bp, Homo sapiens
  source 1..683: mol_type = unassigned DNA
ggctgcggccatggcagcatcttccctgacggtcaccttagggcggctggcgtccgcgtgcagccacagcatcctgagaccttcggggcccggagcagcctccctttggtctgcttctcgaaggttcaattcacagagcacttcatatctaccaggatatgttcctaaaacatccctgagttcaccaccttggccagaagttgttctgccagacccagttgaggagaccagacaccatgcagaggtcgtgaagaaggtgaatgagatgatcgtcacggggcagtatggcaggctctttgccgtggtgcactttgccagccgccagtggaaggtgacctctgaagacctgatcttaattggaaatgaactagaccttgcgtgtggagagagaattcgactggagaaggtcctgctggttggggcagacaacttcacgctgcttggcaagccactcctcggaaaggatcttgttcgagtagaagccacagtcattgaaaagacagaatcatggccaagaatcattatgagattcaggaaaaggaaaaacttcaagaagaaaagaatcgtcacgaccccgcagactgtcctccggataaacagcattgagattgctccgtgtttgttgtgattaccgagttaatacttacaaaaggataaaaataaactcctgcttcccaaggaga

SEQ ID NO: 18252 - DNA, 1263 bp, Homo sapiens
  source 1..1263: mol_type = unassigned DNA
gtttccggccgaggctgcggccatggcagcatcttccctgacggtcaccttagggcggctggcgtccgcgtgcagccacagcatcctgagaccttcggggcccggagcagcctccctttggtctgcttctcgaaggttcaattcacagagcacttcatatctaccaggatatgttcctaaaacatccctgagttcaccaccttggccagaagttgttctgccagacccagttgaggagaccagacaccatgcagaggtcgtgaagaaggtgaatgagatgatcgtcacggggcagtatggcaggctctttgccgtggtgcactttgccagccgccagtggaaggtgacctctgaagacctgatcttaattggaaatgaactagaccttgcgtgtggagagagaattcgactggagaaggtcctgctggttggggcagacaacttcacgctgcttggcaagccactcctcggaaaggatcttgttcgagtagaagccacagtcattgaaaagacagaatcatggccaagaatcattatgagattcaggaaaaggaaaaacttcaagaagaaaagaagtaagttagagaaagtaccgctgggccctgttgcacggtgctggttgcccaggcgcatgcggacggagggtgtggggcacgtgggtctcgggacaggaagcccaggcaggtctcaacctggctgccactgcccacttgccaccctcatcctagagggagcacccagagggtccagcctcgctccccttctcctccacgctccacgcgtgaccccacctcgctccccttctcctccacgctccgcacgtgaccccacctcgctccccttctcctccaccctccgcgcgtgaccccacctcgctccccttctcctccaccctccgcgcatgaccccacctcgctccccttctcctccaccctccgcgcgtgaccccacctcgctccccttctcctccaccctccgcgcgtgaccccacctcgctccccttctcctccaccctccgcgcgtgaccccacctcgctccccttctcctccaccctccgcgcgtgaccccacctcgctccccttctcctccaccctccacgcatgaccccactttgttccaacccatgacgcctagcactgtccccaaagcagcagtgaatccgcaagcaggtgtagggctgtcctagcaggtctgcactgaggacatcccccatagtgggcatcctgagggatggcacccacggggcatgggccacatagctg

SEQ ID NO: 18253 - DNA, 662 bp, Homo sapiens
  source 1..662: mol_type = unassigned DNA
accttagggcggctggcgtccgcgtgcagccacagcatcctgagaccttcggggcccggagcagcctccctttggtctgcttctcgaaggttcaattcacagagcacttcatatctaccagggtaatatcaaaatatatgttcctaaaacatccctgagttcaccaccttggccagaagttgttctgccagacccagttgaggagaccagacaccatgcagaggtcgtgaagaaggtgaatgagatgatcgtcacggggcagtatggcaggctctttgccgtggtgcactttgccagccgccagtggaaggtgacctctgaagacctgatcttaattggaaatgaactagaccttgcgtgtggagagagaattcgactggagaaggtcctgctggttggggcagacaacttcacgctgcttggcaagccactcctcggaaaggatcttgttcgagtagaagccacagtcattgaaaagacagaatcatggccaagaatcattatgagattcaggaaaaggaaaaacttcaagaagaaaagaatcgtcacgaccccgcagactgtcctccggataaacagcattgagattgctccgtgtttgttgtgattaccgagttaatacttacaaaaggataaaaataaactcctgcttcccaaggaga

SEQ ID NO: 18254 - DNA, 3035 bp, Homo sapiens
  source 1..3035: mol_type = unassigned DNA
gtagcgggagggcgaaagatggcggcggcagtactgggacagttgggtgcgttatggatacataacctgaggagccgggggaagctggccttggggaaatctaccactgtcgaagacaaataaaatatagcaaagacaagatgtggtatttggcaaaattgatacgaggaatgtctattgaccaggctttggctcagttggaattcaatgacaaaaaaggggccaaaataattaaagaggttctcttagaagcacaagatatggcagtgagagaccataacgtggaattcaggtccaatttatatatagctgagtccacctcaggacgaggccagtgcctgaaacgcatccgctaccatggcagaggtcgctttgggatcatggagaaggtttattgccattattttgtgaagttggtggaagggcccccacctccacctgagccaccaaagacggcagttgcccatgccaaagagtatattcagcagcttcgcagccggaccatcgttcacactctatgatgaggagattcagactccacagtgtatatattttgccatttattttctaaaaataaacaaaaattgaaggcaaatgctttttatgatttctcattgaattattgaaacagtgtataactgctagttgtaaatgaatatttataaggctttgcccatttcttttgagcctctgggcatatttgtatgcatttgcgacttggaaggggaaatcagctttaaacatagtaacagactatatttcaaaaggcttttggagtaactttgaaagggaatgttaactttccaactagtgtcctgcaggtggctgttttgatactggacttgaatacagtgttatgaggtaagaaaattgcttttatttcacttaattttctcttgggaccatgggaagttagagtggctgcatgttgtttcattacagtattttagggtgttcagtggtaccgtttttcctttcactgttggcacaggccagtgagtcaaaaattatattttcctttactgttttagcagtaactcgaaactacaggagtttattagatatacgaatctaaaactccaaaaacctttaactttgaaaattttcttttggttaagcaaagcctgtttttatttcttcttccaacagtgctttatattgtttggatatcttgtttaggattgatttatttttcagggtaaattcaattactgagagaggaattgaaccaatctcagcattgcattctaaaatggggcagtaggtggcactcaaccttttattagcagaaaattgttagtttcaaattagagtgttcaacactgcttccctctcattcatacacgtcttcattaagaagaagtactctttgtctacagccctagtccaacttttgcatgcaaaagaagaatcgaggatgcttgcttgttaatgcagacttctgggccccaccccaatgattcaattcactaggtcttatggggggctggtttcagaaatctatgttttaaacaaacacttccaggtaattctgttgtaggggactacgctttgagaatacggctttaggagaatgaaaaaatgtagttttattgccatgttttaagatggcattaataatagttactgtttactgggaacttgttatttgcaagctctgtgctagtattttacataattcttcacaacatcctgaaaatgtagcttttgttttaccactttacaaaggaataaaccgaagcacacagaattcaaataactatcacaagtcacacagcatgtaaatattggggctatgattgaaaggtttctaaagtagctggttctgcataccttttgagtatacagctgggtttttgtgtctctccagttaacctaatgcatgggtaaaaagacatcaggggtcagtggaataaaccaaggtgtaggacagattcattctgggtcctaagctgttgtagcatggagtcagggaaataacactggaatattaaaaggtaaccttcattctagtctgtgcattctcattagccagaaagaagactggataggtctcttcccttgctggcctccatttcattcatttatgaaacaagagactcaatgttctctgtagaaaaccttttttagaatcacttgaagaatttgtttaaaaatgcaaattcctgggctctactctcagactaagtgaatcagaagctttggtgtgggagaccatggaacctgcagttttaataaatgccccagtgatttgcatgttggagaattatcacaccaggtcactgtgctctcatgtggtggggatgctccacgattgctcttggagttgtgacttccttgggtgtgactaaagccaggtggtgccatggacatcataaatataaattatgtaagtgaaggcactgcttcagtcaggctgtaaaagctattttgaaagtggtaaggaaaaagtaggattgtaatgaagaaaatttccttcccaggttaagccttcatttggaactgcttccagtacgttacaaaaagtaataatagctaacctgtgtcactgactgtatctggtactattttaagcactatatatacattatctcaatgaatctttcccattgtgacatccggctagttttcgtggctaagagtgtactttctaacatccatgaacattgtggtccccacctgaagtttcactttgcatgttcagtgatatggtttggctctgtgttcccacccaatcttatctcaaattgtaatccccatgtgtccagggagggacctgtaatccccacctagtgacggagggaggtgattgatgatgggtgtggtgtaccccatgctgttctcgtgatagtgagtgggttctcatgagatctgatggttttataagtgtttgaaagttccctcttcactcgctgtcttgcctgctgccatgtaaaatgtgcctacttcaccctctgccatgattgtaagtttcctgaggcctccccagccatgcagaactttgacacaattaaatgtcttttctttataaatta

SEQ ID NO: 18255 - DNA, 784 bp, Homo sapiens
  source 1..784: mol_type = unassigned DNA
agcgggagggcgaaagatggcggcggcagtactgggacagttgggtaaggatttcttagtggttaagcgacagaagggagtcgagatggaatctgagttgacggcttgtgttgatgttgcaggtgcgttatggatacataacctgaggagccgggggaagctggccttgggtgttttacctcaatcatatatccacacaagtgcttctcttgacatttctcgaaaatgggagaagaagaataaaattgtttatcctccacaactgcctggagaacctcggagaccagcagaaatctaccactgtcgaagacaaataaaatatagcaaagacaagatgtggtatttggcaaaattgatacgaggaatgtctattgaccaggctttggctcagttggaattcaatgacaaaaaaggggccaaaataattaaagaggttctcttagaagcacaagatatggcagtgagagaccataacgtggaattcaggtccaatttatatatagctgagtccacctcaggacgaggccagtgcctgaaacgcatccgctaccatggcagaggtcgctttgggatcatggagaaggtttattgccattattttgtgaagttggtggaagggcccccacctccacctgagccaccaaagacggcagttgcccatgccaaagagtatattcagcagcttcgcagccggaccatcgttcacactctatgatgaggagattcagactccacagtgtatatattttgccatttattttctaaaaataaacaaaaattgaag

SEQ ID NO: 18256 - DNA, 3162 bp, Homo sapiens
  source 1..3162: mol_type = unassigned DNA
gggcgaaagatggcggcggcagtactgggacagttgggtgcgttatggatacataacctgaggagccgggggaagctggccttggggcttctttcatttcacagtgttttacctcaatcatatatccacacaagtgcttctcttgacatttctcgaaaatgggagaagaagaataaaattgtttatcctccacaactgcctggagaacctcggagaccagcagaaatctaccactgtcgaagacaaataaaatatagcaaagacaagatgtggtatttggcaaaattgatacgaggaatgtctattgaccaggctttggctcagttggaattcaatgacaaaaaaggggccaaaataattaaagaggttctcttagaagcacaagatatggcagtgagagaccataacgtggaattcaggtccaatttatatatagctgagtccacctcaggacgaggccagtgcctgaaacgcatccgctaccatggcagaggtcgctttgggatcatggagaaggtttattgccattattttgtgaagttggtggaagggcccccacctccacctgagccaccaaagacggcagttgcccatgccaaagagtatattcagcagcttcgcagccggaccatcgttcacactctatgatgaggagattcagactccacagtgtatatattttgccatttattttctaaaaataaacaaaaattgaaggcaaatgctttttatgatttctcattgaattattgaaacagtgtataactgctagttgtaaatgaatatttataaggctttgcccatttcttttgagcctctgggcatatttgtatgcatttgcgacttggaaggggaaatcagctttaaacatagtaacagactatatttcaaaaggcttttggagtaactttgaaagggaatgttaactttccaactagtgtcctgcaggtggctgttttgatactggacttgaatacagtgttatgaggtaagaaaattgcttttatttcacttaattttctcttgggaccatgggaagttagagtggctgcatgttgtttcattacagtattttagggtgttcagtggtaccgtttttcctttcactgttggcacaggccagtgagtcaaaaattatattttcctttactgttttagcagtaactcgaaactacaggagtttattagatatacgaatctaaaactccaaaaacctttaactttgaaaattttcttttggttaagcaaagcctgtttttatttcttcttccaacagtgctttatattgtttggatatcttgtttaggattgatttatttttcagggtaaattcaattactgagagaggaattgaaccaatctcagcattgcattctaaaatggggcagtaggtggcactcaaccttttattagcagaaaattgttagtttcaaattagagtgttcaacactgcttccctctcattcatacacgtcttcattaagaagaagtactctttgtctacagccctagtccaacttttgcatgcaaaagaagaatcgaggatgcttgcttgttaatgcagacttctgggccccaccccaatgattcaattcactaggtcttatggggggctggtttcagaaatctatgttttaaacaaacacttccaggtaattctgttgtaggggactacgctttgagaatacggctttaggagaatgaaaaaatgtagttttattgccatgttttaagatggcattaataatagttactgtttactgggaacttgttatttgcaagctctgtgctagtattttacataattcttcacaacatcctgaaaatgtagcttttgttttaccactttacaaaggaataaaccgaagcacacagaattcaaataactatcacaagtcacacagcatgtaaatattggggctatgattgaaaggtttctaaagtagctggttctgcataccttttgagtatacagctgggtttttgtgtctctccagttaacctaatgcatgggtaaaaagacatcaggggtcagtggaataaaccaaggtgtaggacagattcattctgggtcctaagctgttgtagcatggagtcagggaaataacactggaatattaaaaggtaaccttcattctagtctgtgcattctcattagccagaaagaagactggataggtctcttcccttgctggcctccatttcattcatttatgaaacaagagactcaatgttctctgtagaaaaccttttttagaatcacttgaagaatttgtttaaaaatgcaaattcctgggctctactctcagactaagtgaatcagaagctttggtgtgggagaccatggaacctgcagttttaataaatgccccagtgatttgcatgttggagaattatcacaccaggtcactgtgctctcatgtggtggggatgctccacgattgctcttggagttgtgacttccttgggtgtgactaaagccaggtggtgccatggacatcataaatataaattatgtaagtgaaggcactgcttcagtcaggctgtaaaagctattttgaaagtggtaaggaaaaagtaggattgtaatgaagaaaatttccttcccaggttaagccttcatttggaactgcttccagtacgttacaaaaagtaataatagctaacctgtgtcactgactgtatctggtactattttaagcactatatatacattatctcaatgaatctttcccattgtgacatccggctagttttcgtggctaagagtgtactttctaacatccatgaacattgtggtccccacctgaagtttcactttgcatgttcagtgatatggtttggctctgtgttcccacccaatcttatctcaaattgtaatccccatgtgtccagggagggacctgtaatccccacctagtgacggagggaggtgattgatgatgggtgtggtgtaccccatgctgttctcgtgatagtgagtgggttctcatgagatctgatggttttataagtgtttgaaagttccctcttcactcgctgtcttgcctgctgccatgtaaaatgtgcctacttcaccctctgccatgattgtaagtttcctgaggcctccccagccatgcagaactttgacacaattaaatgtcttttctttataaatta

SEQ ID NO: 18257 - DNA, 3176 bp, Homo sapiens
  source 1..3176: mol_type = unassigned DNA
ggcgcttgaactcggcggcttccgtagcgggagggcgaaagatggcggcggcagtactgggacagttgggtgcgttatggatacataacctgaggagccgggggaagctggccttgggtgttttacctcaatcatatatccacacaagtgcttctcttgacatttctcgaaaatgggagaagaagaataaaattgtttatcctccacaactgcctggagaacctcggagaccagcagaaatctaccactgtcgaagacaaataaaatatagcaaagacaagatgtggtatttggcaaaattgatacgaggaatgtctattgaccaggctttggctcagttggaattcaatgacaaaaaaggggccaaaataattaaagaggttctcttagaagcacaagatatggcagtgagagaccataacgtggaattcaggtccaatttatatatagctgagtccacctcaggacgaggccagtgcctgaaacgcatccgctaccatggcagaggtcgctttgggatcatggagaaggtttattgccattattttgtgaagttggtggaagggcccccacctccacctgagccaccaaagacggcagttgcccatgccaaagagtatattcagcagcttcgcagccggaccatcgttcacactctatgatgaggagattcagactccacagtgtatatattttgccatttattttctaaaaataaacaaaaattgaaggcaaatgctttttatgatttctcattgaattattgaaacagtgtataactgctagttgtaaatgaatatttataaggctttgcccatttcttttgagcctctgggcatatttgtatgcatttgcgacttggaaggggaaatcagctttaaacatagtaacagactatatttcaaaaggcttttggagtaactttgaaagggaatgttaactttccaactagtgtcctgcaggtggctgttttgatactggacttgaatacagtgttatgaggtaagaaaattgcttttatttcacttaattttctcttgggaccatgggaagttagagtggctgcatgttgtttcattacagtattttagggtgttcagtggtaccgtttttcctttcactgttggcacaggccagtgagtcaaaaattatattttcctttactgttttagcagtaactcgaaactacaggagtttattagatatacgaatctaaaactccaaaaacctttaactttgaaaattttcttttggttaagcaaagcctgtttttatttcttcttccaacagtgctttatattgtttggatatcttgtttaggattgatttatttttcagggtaaattcaattactgagagaggaattgaaccaatctcagcattgcattctaaaatggggcagtaggtggcactcaaccttttattagcagaaaattgttagtttcaaattagagtgttcaacactgcttccctctcattcatacacgtcttcattaagaagaagtactctttgtctacagccctagtccaacttttgcatgcaaaagaagaatcgaggatgcttgcttgttaatgcagacttctgggccccaccccaatgattcaattcactaggtcttatggggggctggtttcagaaatctatgttttaaacaaacacttccaggtaattctgttgtaggggactacgctttgagaatacggctttaggagaatgaaaaaatgtagttttattgccatgttttaagatggcattaataatagttactgtttactgggaacttgttatttgcaagctctgtgctagtattttacataattcttcacaacatcctgaaaatgtagcttttgttttaccactttacaaaggaataaaccgaagcacacagaattcaaataactatcacaagtcacacagcatgtaaatattggggctatgattgaaaggtttctaaagtagctggttctgcataccttttgagtatacagctgggtttttgtgtctctccagttaacctaatgcatgggtaaaaagacatcaggggtcagtggaataaaccaaggtgtaggacagattcattctgggtcctaagctgttgtagcatggagtcagggaaataacactggaatattaaaaggtaaccttcattctagtctgtgcattctcattagccagaaagaagactggataggtctcttcccttgctggcctccatttcattcatttatgaaacaagagactcaatgttctctgtagaaaaccttttttagaatcacttgaagaatttgtttaaaaatgcaaattcctgggctctactctcagactaagtgaatcagaagctttggtgtgggagaccatggaacctgcagttttaataaatgccccagtgatttgcatgttggagaattatcacaccaggtcactgtgctctcatgtggtggggatgctccacgattgctcttggagttgtgacttccttgggtgtgactaaagccaggtggtgccatggacatcataaatataaattatgtaagtgaaggcactgcttcagtcaggctgtaaaagctattttgaaagtggtaaggaaaaagtaggattgtaatgaagaaaatttccttcccaggttaagccttcatttggaactgcttccagtacgttacaaaaagtaataatagctaacctgtgtcactgactgtatctggtactattttaagcactatatatacattatctcaatgaatctttcccattgtgacatccggctagttttcgtggctaagagtgtactttctaacatccatgaacattgtggtccccacctgaagtttcactttgcatgttcagtgatatggtttggctctgtgttcccacccaatcttatctcaaattgtaatccccatgtgtccagggagggacctgtaatccccacctagtgacggagggaggtgattgatgatgggtgtggtgtaccccatgctgttctcgtgatagtgagtgggttctcatgagatctgatggttttataagtgtttgaaagttccctcttcactcgctgtcttgcctgctgccatgtaaaatgtgcctacttcaccctctgccatgattgtaagtttcctgaggcctccccagccatgcagaactttgacacaattaaatgtcttttctttataaatta

SEQ ID NO: 18258 - DNA, 643 bp, Homo sapiens
  source 1..643: mol_type = unassigned DNA
gggggcgctgtgccaggcggcggccgtgcggggcgggcgcgctgctccttccgcctcgcggaccccggaagcgcgcgtggccgccatggcgcggaatgtggtgtaccccctgtaccggctgggtggcccacaacttcgggtgttccgaaccaacttcttcattcagctggtgcggcccggtgtggcccagcccgaggacaccgtgcagttccggatccccatggaaatgacaagggtggacctcaggaattacctcgagggcatctataacgtgcccgtggctgctgtgcggacacgggtgcagcatggctctaacaagagaagagatcacagaaacgtgaggatcaagaagccggactacaaggtcgcctacgtgcagctggcccatggacagaccttcacgttcccagatctgtttcccgagaaagacgagagccctgaaggcagcgctgccgacgacctctacagcatgctcgaggaggagaggcagcagaggcagagcagcgacccgcggcggggcggcgtccccagctggttcgggctgtgacggggtggccagcagggacgcgccccaggtgggcagctgtggcagagcagtcccgacacctaaataaaagtcttgctgcaggagaaagagccggaa

SEQ ID NO: 18259 - DNA, 736 bp, Homo sapiens
  source 1..736: mol_type = unassigned DNA
gggggcgctgtgccaggcggcggccgtgcggggcgggcgcgctgctccttccgcctcgcggaccccggaagcgcgcgtggccgccatggcgcggaatgtggtgtaccccctgtaccggctgggtggcccacaacttcgggtgttccgaaccaacttcttcattcagctggtgcggcccggtgtggcccagcccgaggacaccgtgcagttccggatccccatggaaatgacaagggtggacctcaggaattacctcgagggcatctataacgtgcccgtggctgctgtgcggacacgggtgcagcatggctctaacaagagaagagatcacagaaacgtgaggatcaagaagccggactacaaggtcgcctacgtgcagctggcccatggacagaccttcacgttcccagatctgtttcccgagaaagacgagagccctgaaggcagcgctgccgacgacctctacagcatgctcgaggaggagaggcagcagaggcagagcagcgacccgcggcggggcggcgtccccagctggttcgggctgtgacggggtggccagcagggacgcgccccaggtgggcagctgtggcagagcagcgacccgcggcggggcggcatccccagctggttcgggccgtgacggggcggccagcagggacgcgccccaggtgggcagctgtggcagagcagtcccgacacctaaataaaagtcttgctgcaggagaaagagccggaa

SEQ ID NO: 18260 - DNA, 883 bp, Homo sapiens
  source 1..883: mol_type = unassigned DNA
atgtgctgaaaatccgaagtgccgcggaaagtggaggtgagggccgcccgccctagaggtgcccgtccgagaggcagagctgacaaggaaggtttcgagcgttttgctggcaaagggatttcttacaacctccaggcatgcgtctttctgccctgctggccttggcatccaaggtcactctgcccccccattaccgctatgggatgagccccccaggctctgttgcagacaagaggaagaaccccccatggatcaggcggcgcccagtggttgtggaacccatctctgatgaagactggtatctgttctgtggggacacggtggagatcctagaaggcaaggatgccgggaagcagggcaaagtggttcaagttatccggcagcgaaactgggtggtcgtgggagggctgaacacacattaccgctacattggcaagaccatggattaccggggaaccatgatccctagtgaagcccccttgctccaccgccaggtcaaacttgtggatcctatggacaggaaacccactgagatcgagtggagatttactgaagcaggagagcgggtacgagtctccacacgatcagggagaattatccctaaacccgaatttcccagagctgatggcatcgtccctgaaacgtggattgatggccccaaagacacatcagtggaagatgctttagaaagaacctatgtgccctgtctaaagacactgcaggaggaggtgatggaggccatggggatcaaggagacccggaaatacaagaaggtctattggtattgagcctggggcagagcagctcctccccaacttctgtcccagccttgaaggctgaggcacttctttttcagatgccaataaagagcactttatgagtc

SEQ ID NO: 18261 - DNA, 883 bp, Homo sapiens
  source 1..883: mol_type = unassigned DNA
agaaagtcgacgggcgtggcgggggaggggacgctgagggcccatgtgctgaaaatccgaagtgccgcggaaagtggagagctgacaaggaaggtttcgagcgttttgctggcaaagggatttcttacaacctccaggcatgcgtctttctgccctgctggccttggcatccaaggtcactctgcccccccattaccgctatgggatgagccccccaggctctgttgcagacaagaggaagaaccccccatggatcaggcggcgcccagtggttgtggaacccatctctgatgaagactggtatctgttctgtggggacacggtggagatcctagaaggcaaggatgccgggaagcagggcaaagtggttcaagttatccggcagcgaaactgggtggtcgtgggagggctgaacacacattaccgctacattggcaagaccatggattaccggggaaccatgatccctagtgaagcccccttgctccaccgccaggtcaaacttgtggatcctatggacaggaaacccactgagatcgagtggagatttactgaagcaggagagcgggtacgagtctccacacgatcagggagaattatccctaaacccgaatttcccagagctgatggcatcgtccctgaaacgtggattgatggccccaaagacacatcagtggaagatgctttagaaagaacctatgtgccctgtctaaagacactgcaggaggaggtgatggaggccatggggatcaaggagacccggaaatacaagaaggtctattggtattgagcctggggcagagcagctcctccccaacttctgtcccagccttgaaggctgaggcacttctttttcagatgccaataaagagcactttatgag

SEQ ID NO: 18262 - DNA, 514 bp, Homo sapiens
  source 1..514: mol_type = unassigned DNA
atgtgctgaaaatccgaagtgccgcggaaagtggaggtgagggccgcccgccctagaggtgcccgtccgagaggcaggtgcgggaagagcctatccttttccctggccatggctcagtcgcctccccagggtttatttgcaccggaagtttggagcggagctgacaaggaaggtttcgagcgttttgctggcaaagggatttcttacaacctccaggcatgcgtctttctgccctgctggccttggcatccaaggtcactctgcccccccattaccgctatgggatgagccccccaggctctgttgcagacaagaggaagaaccccccatggatcaggcggcgcccagtggttgtggaacccatctctgatgaagactggtatctgttctgtggggacacggtggagatcctagaaggcaaggatgccgggaagcagggcaaagtggttcaagttatccggcagcgaaactgggtggtcgtgggagggctgaacacacattaccgctacattgg

SEQ ID NO: 18263 - DNA, 448 bp, Homo sapiens
  source 1..448: mol_type = unassigned DNA
cttgtctgtaaaagggactttacgatgcatctggcaacctcaccttcctcactgggcaatgtgaagaccaaatgccggcaatgaaattcccagcattaggtttgtcatatagtagtcctctctaagcatttgttgaatactcacaggaacacttaggccagtcagcattaattgaaaataacagagctgacaaggaaggtttcgagcgttttgctggcaaagggatttcttacaacctccaggcatgcgtctttctgccctgctggccttggcatccaaggtcactctgcccccccattaccgctatgggatgagccccccaggctctgttgcagacaagaggaagaaccccccatggatcaggcggcgcccagtggttgtggaacccatctctgatgaagactggtatctgttctgtggggacacggtggagatcctagaaggcaag

SEQ ID NO: 18264 - DNA, 990 bp, Homo sapiens
  source 1..990: mol_type = unassigned DNA
agatctgacattttgtaactagatcggctactagcattggaagggcccacgtttcatcccttcctctagaaagcctaccggcagtttttgaatctgccctgcccccactccagcagagaaggacagggagagcattggcggtagccctgtctggaaagggcggccctttgccttgaacaggaagccacaaccacctagaaaatggagccttcttctctagaaactacaattcccagcggcctccacgcagagcatgcgcgggaatgtgccaggcgggccagccgaaccagcttgcctttcgattcccgacatgcttcatggtgtgttccggtttccttgatttcctacccccgccaaacttcctgtttccagctttctagcggcggactacaactcccagcatgctgagagagctgacaaggaaggtttcgagcgttttgctggcaaagggatttcttacaacctccaggcatgcgtctttctgccctgctggccttggcatccaaggtcactctgcccccccattaccgctatgggatgagccccccaggctctgttgcagacaagaggaagaaccccccatggatcaggcggcgcccagtggttgtggaacccatctctgatgaagactggtatctgttctgtggggacacggtggagatcctagaaggcaaggatgccgggaagcagggcaaagtggttcaagttatccggcagcgaaactgggtggtcgtgggagggctgaacacacattaccgctacattggcaagaccatggattaccggggaaccatgatccctagtgaagcccccttgctccaccgccaggtcaaacttgtggatcctatggacaggaaacccactgagatcgagtggagatttactgaagcaggagagcgggtacgagtctccacacgatcagggagaattatccctaaacccgaatttcccagagctgatggcatcgtccctgaaacgtggattgatggc

SEQ ID NO: 18265 - DNA, 716 bp, Homo sapiens
  source 1..716: mol_type = unassigned DNA
cggaagtagaaacttttcgagaccggaagtgagtgatcgaaagcatggcgtcggtggtgttggcgctgaggacccggacagccgttacatccttgctaagccccactccggctacagctcttgctgtcagatacgcatccaagaagtcgggtggtagctccaaaaacctcggtggaaagtcatcaggcagacgccaaggcattaagaaaatggaaggtcactatgttcatgctgggaacatcattgcaacacagcgccatttccgctggcacccaggtgcccatgtgggtgttgggaagaataaatgtctgtatgccctggaagaggggatagtccgctacactaaggaggtctacgtgcctcatcccagaaacacggaggctgtggatctgatcaccaggctgcccaagggtgctgtgctctacaagacttttgtccacgtggttcctgccaagcctgagggcaccttcaaactggtagctatgctttgatgtcctgttgaggccatcggacagagactggagcccaggtgacaggagatggtgataccagaagtcaagggttggggtggcgacacggcctcccgaggaagaggtctgcttgatggtgactctgcaggagactctgaagtgactgctgggaaaccctttgggagacctgacctggggccaaaaataaagtgagccagcgtcatgaacgcatgctatttagggaca

SEQ ID NO: 18266 - DNA, 2435 bp, Homo sapiens
  source 1..2435: mol_type = unassigned DNA
ttttcgagaccggaagtgagtgatcgaaagcatggcgtcggtggtgttggcgctgaggacccggacagccgttacatccttgctaagccccactccggctacagctcttgctgtcagatacgcatccaagaagtcgggtggtagctccaaaaacctcggtggaaagtcatcaggcagacgccaaggcattaagaaaatggaaggtcactatgttcatgctgggaacatcattgcaacacagcgccatttccgctggcacccaggtgcccatgtgagttgctccgttgctgcccccctttttccttttctaggttgacctctccttgcccctaagcatggtaataacagttgcatgtattgagtgcttaccaaatggcaagcattgtgctgattcccatgcctacacgatctcatttcttccttaccacatccctgtaagtaaggtgaaatgccagagacctagacggggtggaaggagcaagtgactgctgggatttgcaccaggtctgcctaactcccagatcactatgatttgccctggtgttgcattggcctggtattcttggttctcctttctaaccctcagttcttggaggacaagatacctggtgatttaaaatattattttagtcttgggaaactaatttcaatttattagtttttcattattctaagacttcttcctttgtataaacttacttgcagatggttgaaagatagcttgaatttaatgaaatagaattcagtgtgccaggagttaggttcataccaggtggggatttcagtttcagcaagttggcatcatttttatagggtaggacagttctttgttacagagacataacgatactgtactctccacattattttaaatattagttgcctttgtaaacagtttcccctcccccacccctttttcgataattttagtaggtacaaaaaggttgatagtaacctgtatttatttcaaagatgctaatttgtatgtgaattgattatgtatgtagtagctttttaccttttagaacttaagacattagatgtgtggctatgtcaacaataataatcaaagctaacacattttgagctagacagtattctaggccctttatgattgttgagcattaatcctcaaaatgaccctgtaaaatagttaatattatccccatttgacagacgaaaaaatagaggcacagtgaagtaacttgcctaagaccacacaggagtaagtagcagtgctggtatttgaaccaggcatcctggctccagagcccattcttttaatcagagagacagagaataatgctggactacctgggtaaaatttgccacacacccagcctgaagttctaaaagaaaaagctaaaaaatatggttaaaaactgtatatacaacacagtttaatctctctgcttcatatttcacatctgaaaagtggcgttggaaataatacctctttcactaggtgagaattaaatgacttaatgtgtattaaagggcttacatgggtattagctaatgcagtagtatgattgttttattagcatatgcattatccatatagctttggtttatattttccatagagcctaaactttatagatcactatctaaatgaaaatttacatcaaactagtgttttaatatgacagttctagtgttgtttaagtctaagtgaagatttagggcatcttcctgggttttgggatttgtgcagtgtggcttctgaccagctgcatagacatggctccaggtaacagtccctgggactgagcagtggcccatgttggctgttggagctttcttttccctcatttgttatgagtcaataaagaagcagaaggtttggacgtgctagccagtgggaaagggaacctgagatggagctctctgatcaccctttcagccccagggcccggctctgtgtgagaagtctgtcccaaaattctgggacggaccacctcgctgaccagctgaccagctgaccaggtctgtgtgttgcaggtgggtgttgggaagaataaatgtctgtatgccctggaagaggggatagtccgctacactaaggaggtctacgtgcctcatcccagaaacacggaggctgtggatctgatcaccaggctgcccaagggtgctgtgctctacaagacttttgtccacgtggttcctgccaagcctgagggcaccttcaaactggtagctatgctttgatgtcctgttgaggccatcggacagagactggagcccaggtgacaggagatggtgataccagaagtcaagggttggggtggcgacacggcctcccgaggaagaggtctgcttgatggtgactctgcaggagactctgaagtgactgctgggaaaccctttgggagacctgacctggggccaaaaataaagtgagccagcgtcatgaacgcatgctatttagggac

SEQ ID NO: 18267 - DNA, 732 bp, Homo sapiens
  source 1..732: mol_type = unassigned DNA
ggtggagccgtgagtgagggcgtttgaagagcacttgtctttctcctgcctcagcagcacggacgggttccttggcggttggggatttggttacatccttgctaagccccactccggctacagctcttgctgtcagatacgcatccaagaagtcgggtggtagctccaaaaacctcggtggaaagtcatcaggcagacgccaaggcattaagaaaatggaaggtcactatgttcatgctgggaacatcattgcaacacagcgccatttccgctggcacccaggtgcccatgtgggtgttgggaagaataaatgtctgtatgccctggaagaggggatagtccgctacactaaggaggtctacgtgcctcatcccagaaacacggaggctgtggatctgatcaccaggctgcccaagggtgctgtgctctacaagacttttgtccacgtggttcctgccaagcctgagggcaccttcaaactggtagctatgctttgatgtcctgttgaggccatcggacagagactggagcccaggtgacaggagatggtgataccagaagtcaagggttggggtggcgacacggcctcccgaggaagaggtctgcttgatggtgactctgcaggagactctgaagtgactgctgggaaaccctttgggagacctgacctggggccaaaaataaagtgagccagcgtcatgaacgcatgctatttagggacacacctggatg

SEQ ID NO: 18268 - DNA, 869 bp, Homo sapiens
  source 1..869: mol_type = unassigned DNA
aaaattagctgggcgtggtggcgtacacctgtaatcccagctacttgggaggctgaggcaggagaatcgcttgaatccgggacgcggaggttgcagggagccaggactatgccattgcactccagcttgggcaacaagagtgaagctccgtctttaaaaaaaaaaaagaaagaaagtcgtgggtgagcctgaaaccgaagcctttctggatgtactgggctccccaagtctgttctggcccctccgtggtgcatgaggttacatccttgctaagccccactccggctacagctcttgctgtcagatacgcatccaagaagtcgggtggtagctccaaaaacctcggtggaaagtcatcaggcagacgccaaggcattaagaaaatggaaggtcactatgttcatgctgggaacatcattgcaacacagcgccatttccgctggcacccaggtgcccatgtgggtgttgggaagaataaatgtctgtatgccctggaagaggggatagtccgctacactaaggaggtctacgtgcctcatcccagaaacacggaggctgtggatctgatcaccaggctgcccaagggtgctgtgctctacaagacttttgtccacgtggttcctgccaagcctgagggcaccttcaaactggtagctatgctttgatgtcctgttgaggccatcggacagagactggagcccaggtgacaggagatggtgataccagaagtcaagggttggggtggcgacacggcctcccgaggaagaggtctgcttgatggtgactctgcaggagactctgaagtgactgctgggaaaccctttgggagacctgacctggggccaaaaataaagtgagccagcgtcatg

SEQ ID NO: 18269 - DNA, 1086 bp, Homo sapiens
  source 1..1086: mol_type = unassigned DNA
cggttccggtgggctctgaaccctgaaaggctcgcgatgcctctacacaagtatcccgtgtggctctggaagcggctgcagctgcgggagggcatctgttcccgcctgcccggccactacctgcgctccctggaggaggagcggacgcccactcccgtgcactataggcctcatggggccaagttcaagatcaaccccaagaacgggcagcgggagcgtgtggaggacgtgcccattcccatctactttccccccgaatcccagcgggggttgtggggcggcgagggctggatcctgggccaaatatatgccaacaacgacaagctctccaagaggctgaagaaagtgtggaagccacagctgtttgagcgagagttctacagtgagatcctggacaagaagttcacagtgactgtgaccatgcggaccctggacctcatcgatgaggcttatgggctcgacttttacatcctcaagaccccgaaggaggacctgtgctccaagtttgggatggacctgaagcgagggatgctgctgcggcttgcccggcaggacccccagctgcaccccgaggaccccgagcggcgggcagccatctacgacaagtacaaggaatttgccatcccagaggaggaggcagagtgggtgggcctcacgctggaggaggccattgagaagcagagacttttggaggagaaggaccctgtacccctgttcaagatctatgtggcggagctgatccagcagctgcagcagcaggcactgtcagagccggcggtggtgcagaagagagccagtggccagtgaccacacagctcctccatgcctgaccaacaggcccagctttccctgccaggccctttgcactgaggacacagatcccggggagctgtgagggccaccggtgggcagtgggtggatcctggtttcgtgtgctgcccatgcaccttccagcccggggccagcttggcagggatccccaggaggcctgggccgcccagaggctcctctcaggctgggccccgacgtttgcggcagtgttccttgtgcccgtggggccgggagcgagtaaagtctgggccaggc

SEQ ID NO: 18270 - DNA, 865 bp, Homo sapiens
  source 1..865: mol_type = unassigned DNA
aaccctgaaaggtgggcgcgggcaggctcgcgatgcctctacacaagtatcccgtgtggctctggaagcggctgcagctgcgggagggcatctgttcccgcctgcccggccactacctgcgctccctggaggaggagcggacgcccactcccgtgcactataggcctcatggggccaagttcaagatcaaccccaagaacgggcagcgggagcgtgtggaggacgtgcccattcccatctactttccccccgaatcccagcgggggttgtggggcggcgagggctggatcctgggccaaatatatgccaacaacgacaagctctccaagaggctgaagaaagtgtggaagccacagctgtttgagcgagagttctacagtgagatcctggacaagaagttcacagtgactgtgaccatgcggaccctggacctcatcgatgaggcttatgggctcgacttttacatcctcaagaccccgaaggaggacctgtgctccaagtttgggatggacctgaagcgagggatgctgctgcggcttgcccggcaggacccccagctgcaccccgaggaccccgagcggcgggcagccatctacgacaagtacaaggaatttgccatcccagaggaggaggcagagtgggtgggcctcacgctggaggaggccattgagaagcagagacttttggaggagaaggaccctgtacccctgttcaagatctatgtggcggagctgatccagcagctgcagcagcaggcactgtcagagccggcggtggtgcagaagagagccagtggccagtgaccacacagctcctccatgcctgaccaacaggcccagctttccctgccaggccctttgcactg

SEQ ID NO: 18271 - DNA, 1053 bp, Homo sapiens
  source 1..1053: mol_type = unassigned DNA
tcccgccaggctcgcgatgcctctacacaagtatcccgtgtggctctggaagcggctgcagctgcgggagggcatctgttcccgcctgcccggccactacctgcgctccctggaggaggagcggacgcccactcccgtgcactataggcctcatggggccaagttcaagatcaaccccaagaacgggcagcgggagcgtgtggaggacgtgcccattcccatctactttccccccgaatcccagcgggggttgtggggcggcgagggctggatcctgggccaaatatatgccaacaacgacaagctctccaagaggctgaagaaagtgtggaagccacagctgtttgagcgagagttctacagtgagatcctggacaagaagttcacagtgactgtgaccatgcggaccctggacctcatcgatgaggcttatgggctcgacttttacatcctcaaggcaagcggggaggacctgtgctccaagtttgggatggacctgaagcgagggatgctgctgcggcttgcccggcaggacccccagctgcaccccgaggaccccgagcggcgggcagccatctacgacaagtacaaggaatttgccatcccagaggaggaggcagagtgggtgggcctcacgctggaggaggccattgagaagcagagacttttggaggagaaggaccctgtacccctgttcaagatctatgtggcggagctgatccagcagctgcagcagcaggcactgtcagagccggcggtggtgcagaagagagccagtggccagtgaccacacagctcctccatgcctgaccaacaggcccagctttccctgccaggccctttgcactgaggacacagatcccggggagctgtgagggccaccggtgggcagtgggtggatcctggtttcgtgtgctgcccatgcaccttccagcccggggccagcttggcagggatccccaggaggcctgggccgcccagaggctcctctcaggctgggccccgacgtttgcggcagtgttccttgtgcccgtggggccgggagcgagtaaa

SEQ ID NO: 18272 - DNA, 1596 bp, Homo sapiens
  source 1..1596: mol_type = unassigned DNA
gtcagcggtgggaggagggccaggcgcggcagatcggcttccggttccggtgggctctgaaccctgaaaggctcgcgatgcctctacacaagtatcccgtgtggctctggaagcggctgcagctgcgggagggcatctgttcccgcctgcccggccactacctgcgctccctggaggaggagcggacgcccactcccgtgcactataggcctcatggggccaagttcaagatcaaccccaagaacgggcagcgggagcgtgtggaggacgtgcccattcccatctactttccccccgaatcccagcgggggttgtggggcggcgagggctggatcctgggccaaatatatgccaacaacgacaagctctccaagaggctgaagaaagtgtggaagccacagctgtttgagcgagagttctacagtgagatcctggacaagaagttcacagtgactgtgaccatgcggaccctggacctcatcgatgaggcttatgggctcgacttttacatcctcaaggcaagcggggaggacctgtgctccaagtttgggatggacctgaagcgagggatgctgctgcggcttgcccggcaggacccccagctgcaccccgaggaccccgagcggcgggcagccatctacgacaagtacaaggaatttgccatcccagaggaggaggcagagtgggtgggcctcacgctggaggaggccattgagaagcagagacttttggaggagaaggaccctgtacccctgttcaagatctatgtggcggagctgatccagcagctgcagcagcaggcactgtcagagccggcggtggtgcagaagagagccagtggccagtgaccacacagctcctccatgcctgaccaacaggcccagctttccctgccaggccctttgcactgaggacacagatcccggggagctgtgagggccaccggtgggcagtgggtggatcctggtttcgtgtgctgcccatgcaccttccagcccggggccagcttggcagggatccccaggaggcctgggccgcccagaggctcctctcaggctgggccccgacgtttgcggcagtgttccttgtgcccgtggggccgggagcgagtaaagtctgggccaggctgtgtgtgtgtatctttgctttgaggactggtgttctctttggggatcctgatcctgtcacccctgcccttgctgcccctgagacctcggatgagccgtgggcattgactctggctgtgcccgtcccccggtgagctgcagagagcgaggttcaattctgtgttttgtgtttttttttcttttctttttttgagacggagtcttgctcagtcacccaggctggagtgcagtggcacgatctggactcactacaacctccacctccagagttcaagtgattgtcctgtctcagcctcctgagtagctgggattacaggcaccccgctatcatgtatggctaattgtattttagtagagaaggggtttcaccatgttggccaggctgggcttgaactcctgacctcaggtgacccacctgcctcaacctgccaaagtgttgggattacaggcgtgagccacctcccctggc

SEQ ID NO: 18273 - DNA, 310 bp, Homo sapiens
  source 1..310: mol_type = unassigned DNA
tccggcaaaggagcacgctgagtgaagaaccgcagttctggcaaacaggactgataaagtaggggtgaggtggggtgactcaggccgggggagcaaccagaggccgtggggagtcggggtaaagttaggatggggaggaggcctgtgtgatgagcagagcaggtgggagaggcgagcagagcaggtgggggaggcgagcagagcttcgaggcctgggccgcccagaggctcctctcaggctgggccccgacgtttgcggcagtgttccttgtgcccgtggggccgggagcgagtaaagtctgggccaggc

SEQ ID NO: 18274 - DNA, 800 bp, Homo sapiens
  source 1..800: mol_type = unassigned DNA
acaggggccggagtgagaaccgggggccggggtagggggtagcgggtgagagccgggggccggggtagcgggctcgcgatgcctctacacaagtatcccgtgtggctctggaagcggctgcagctgcgggagggcatctgttcccgcctgcccggccactacctgcgctccctggaggaggagcggacgcccactcccgtgcactataggcctcatggggccaagttcaagatcaaccccaagaacgggcagcgggagcgtgtggaggacgtgcccattcccatctactttccccccgaatcccagcgggggttgtggggcggcgagggctggatcctgggccaaatatatgccaacaacgacaagctctccaagaggctgaagaaagtgtggaagccacagctgtttgagcgagagttctacagtgagatcctggacaagaagttcacagtgactgtgaccatgcggaccctggacctcatcgatgaggcttatgggctcgacttttacatcctcaagaccccgaaggaggacctgtgctccaagtttgggatggacctgaagcgagggatgctgctgcggcttgcccggcaggacccccagctgcaccccgaggaccccgagcggcgggcagccatctacgacaagtacaaggaatttgccatcccagaggaggaggcagagtgggtgggcctcacgctggaggaggccattgagaagcagagacttttggaggagaaggaccctgtacccctgttcaagatctatgtggcggagctgatccagcagctgcagcagca

SEQ ID NO: 18275 - DNA, 722 bp, Homo sapiens
  source 1..722: mol_type = unassigned DNA
aaaggtgggcgcgggcaggtggggtgtgggggggcgccggggcagaaggggaggggcaggctcgcgatgcctctacacaagtatcccgtgtggctctggaagcggctgcagctgcgggagggcatctgttcccgcctgcccggccactacctgcgctccctggaggaggagcggacgcccactcccgtgcactataggcctcatggggccaagttcaagatcaaccccaagaacgggcagcgggagcgtgtggaggacgtgcccattcccatctactttccccccgaatcccagcgggggttgtggggcggcgagggctggatcctgggccaaatatatgccaacaacgacaagctctccaagaggctgaagaaagtgtggaagccacagctgtttgagcgagagttctacagtgagatcctggacaagaagttcacagtgactgtgaccatgcggaccctggacctcatcgatgaggcttatgggctcgacttttacatcctcaagaccccgaaggaggacctgtgctccaagtttgggatggacctgaagcgagggatgctgctgcggcttgcccggcaggacccccagctgcaccccgaggaccccgagcggcgggcagccatctacgacaagtacaaggaatttgccatcccagaggaggaggcagagtgggtgggcctcacgctggaggaggccattgagaagcagagacttttgga

SEQ ID NO: 18276 - DNA, 619 bp, Homo sapiens
  source 1..619: mol_type = unassigned DNA
cgggtgagagccgggggccggggtagcgggctcgcgatgcctctacacaagtatcccgtgtggctctggaagcggctgcagctgcgggagggcatctgttcccgcctgcccggccactacctgcgctccctggaggaggagcggacgcccactcccgtgcactataggcctcatggggccaagttcaagatcaaccccaagaacgggcagcgggagcgtgtggaggacgtgcccattcccatctactttccccccgaatcccagcgggggttgtggggcggcgagggctggatcctgggccaaatatatgccaacaacgacaagctctccaagaggctgaagaaagtgtggaagccacagctgtttgagcgagagttctacagtgagatcctggacaagaagttcacagtgactgtgaccatgcggaccctggacctcatcgatgaggcttatgggctcgacttttacatcctcaagaccccgaaggaggacctgtgctccaagtttgggatggacctgaagcgagggatgctgctgcggcttgcccggcaggacccccagctgcaccccgaggaccccgagcggcgggcagccatctacgacaagtacaaggaatttg

SEQ ID NO: 18277 - DNA, 1694 bp, Homo sapiens
  source 1..1694: mol_type = unassigned DNA
agagagcatcggccggcgaccgttccggcggccattgcgaaaacttccccacggctactgcgtccacgtggcggtggcgtggggactccctgaaagcagagcggcagggcgcccggaagtcgtgagtcgagtcttcccgggctaatccatgccgggttggaggctgctgacgcaggtcggcgcccaggtgctgggtcgactcggggacggcctgggtgctgccctgggcccggggaacagaacacacatctggctttttgttagaggtcttcatggaaagagtggtacatggtgggatgagcatctttctgaagaaaatgtcccattcattaagcagttggtctctgatgaagataaagcccaattagcaagtaaactgtgtcctctgaaagatgaaccatggcctatacatccttgggaaccaggttcctttagagttggtcttattgccttgaagctgggcatgatgcctttatggaccaaggatggtcaaaagcatgtggtcacattacttcaggtacaagactgtcatgtcttaaaatatacgtcaaaggaaaactgtaatggaaaaatggcaaccctgtctgtaggaggaaaaactgtatcacgttttcgtaaagctacatccatattggaattttaccgggaacttggattgccgccgaaacagacagttaaaatctttaatataacagataatgctgcaattaaaccaggcactcctctttatgctgctcactttcgtccaggacagtatgtggatgtcacagccaaaactattggtaaaggttttcaaggtgtcatgaaaagatggggatttaaaggccagcctgctacgcatggtcaaacgaaaacccacaggagacctggagctgttgcaactggtgatattggcagagtctggcctggaactaaaatgcctggaaaaatgggaaacatatacaggacagaatatggactgaaagtgtggagaataaacacaaagcacaacataatctatgtaaatggctctgtacctggacataaaaattgcttagtaaaggtcaaagattctaaactgcctgcatataaggatctcggtaaaaatctaccattccctacatattttcctgatggagatgaagaggaactgccagaagatttgtatgatgaaaacgtgtgtcagcccggtgcgccttctattacatttgcctaacatctttggacgtggcagaaccttacatattctgtgagcttcgatgagccagagtgatatcataaccaccagaaatcatactctcctttcttagtcacaacaaaatcacacatgtcatctttgtcaagggcataaatatatcattcatacccccattaaattttgttagaaaaattaccacattaaatatatgagttaagtagattggatttgctgaaattggtgttgggcatattagcaaaatattcttaatttgtggactcgattcttttttactacatatttcccaagttatcttaagatgtctgtaaatttaacttttattaaagttttgtcaatctttgtgaaatagtggttgtggaacagtagaaaaccatatggggactatagtgcaacctatttgggtaaagaaaccatttgctaaaatggagaaagtaaatagatttttatttaaattacagaaacatgttaaaggccggacaaaggaaagacaataaaa

SEQ ID NO: 18278 - DNA, 1457 bp, Homo sapiens
  source 1..1457: mol_type = unassigned DNA
tttctttccgtcgcagagagcatcggccggcgaccgttccggcggccattgcgaaaacttccccacggctactgcgtccacgtggcggtggcgtggggactccctgaaagcagagcggcagggcgcccggaagtcgtgagtcgagtcttcccgggctaatccatgccgggttggaggctgctgacgcaggtcggcgcccaggtgctgggtcgactcggggacggcctgggtgctgccctgggcccggggaacagggtaacgactaacagtttaaatgtgagccttatccgaaggaatgtggggagtgaggaaaaggttggagacctgaaaaaaagaacacacatctggctttttgttagaggtcttcatggaaagagtggtacatggtgggatgagcatctttctgaagaaaatgtcccattcattaagcagttggtctctgatgaagataaagcccaattagcaagtaaactgtgtcctctgaaagatgaaccatggcctatacatccttgggaaccaggttcctttagagttggtcttattgccttgaagctgggcatgatgcctttatggaccaaggatggtcaaaagcatgtggtcacattacttcaggtacaagactgtcatgtcttaaaatatacgtcaaaggaaaactgtaatggaaaaatggcaaccctgtctgtaggaggaaaaactgtatcacgttttcgtaaagctacatccatattggaattttaccgggaacttggattgccgccgaaacagacagttaaaatctttaatataacagataatgctgcaattaaaccaggcactcctctttatgctgctcactttcgtccaggacagtatgtggatgtcacagccaaaactattggtaaaggttttcaaggtgtcatgaaaagatggggatttaaaggccagcctgctacgcatggtcaaacgaaaacccacaggagacctggagctgttgcaactggtgatattggcagagtctggcctggaactaaaatgcctggaaaaatgggaaacatatacaggacagaatatggactgaaagtgtggagaataaacacaaagcacaacataatctatgtaaatggctctgtacctggacataaaaattgcttagtaaaggtcaaagattctaaactgcctgcatataaggatctcggtaaaaatctaccattccctacatattttcctgatggagatgaagaggaactgccagaagatttgtatgatgaaaacgtgtgtcagcccggtgcgccttctattacatttgcctaacatctttggacgtggcagaaccttacatattctgtgagcttcgatgagccagagtgatatcataaccaccagaaatcatactctcctttcttagtcacaacaaaatcacacatgtcatctttgtcaagggcataaatatatcattcatacccccattaaattttgtt

SEQ ID NO: 18279 - DNA, 1377 bp, Homo sapiens
  source 1..1377: mol_type = unassigned DNA
tttctttccgtcgcagagagcatcggccggcgaccgttccggcggccattgcgaaaacttccccacggctactgcgtccacgtggcggtggcgtggggactccctgaaagcagagcggcagggcgcccggaagtcaacacacatctggctttttgttagaggtcttcatggaaagagtggtacatggtgggatgagcatctttctgaagaaaatgtcccattcattaagcagttggtctctgatgaagataaagcccaattagcaagtaaactgtgtcctctgaaagatgaaccatggcctatacatccttgggaaccaggttcctttagagttggtcttattgccttgaagctgggcatgatgcctttatggaccaaggatggtcaaaagcatgtggtcacattacttcaggtacaagactgtcatgtcttaaaatatacgtcaaaggaaaactgtaatggaaaaatggcaaccctgtctgtaggaggaaaaactgtatcacgttttcgtaaagctacatccatattggaattttaccgggaacttggattgccgccgaaacagacagttaaaatctttaatataacagataatgctgcaattaaaccaggcactcctctttatgctgctcactttcgtccaggacagtatgtggatgtcacagccaaaactattggtaaaggttttcaaggtgtcatgaaaagatggggatttaaaggccagcctgctacgcatggtcaaacgaaaacccacaggagacctggagctgttgcaactggtgatattggcagagtctggcctggaactaaaatgcctggaaaaatgggaaacatatacaggacagaatatggactgaaagtgtggagaataaacacaaagcacaacataatctatgtaaatggctctgtacctggacataaaaattgcttagtaaaggtcaaagattctaaactgcctgcatataaggatctcggtaaaaatctaccattccctacatattttcctgatggagatgaagaggaactgccagaagatttgtatgatgaaaacgtgtgtcagcccggtgcgccttctattacatttgcctaacatctttggacgtggcagaaccttacatattctgtgagcttcgatgagccagagtgatatcataaccaccagaaatcatactctcctttcttagtcacaacaaaatcacacatgtcatctttgtcaagggcataaatatatcattcatacccccattaaattttgttagaaaaattaccacattaaatatatgagttaagtagattggatttgctgaaattggtgttgggcatattagcaaaatattcttaatttgtggactcgattcttttttactacatatttcc

SEQ ID NO: 18280 - DNA, 2605 bp, Homo sapiens
  source 1..2605: mol_type = unassigned DNA
ctctttctagggactttcctgagtgggagggatttcgccggaacaaaaatgcctcagtttggaggtcgcgctcactgcgacggcaggctttgagtgtagcacttggtagttcttcctctgctctgcttcccttcggaggaaaatttcaggctgaaggtttagcgggtgccgcctctaaagagagcaatcactacacttatggctgggattttgcgcttagtagttcaatggcccccaggcagactacagactgtgacaaaaggtgtggagtctcttatttgtacagattggattcgtcacaaattcaccagatcaagaattccagaaaaagtgtttcaggcctcacctgaagatcatgaaaaatacggtggggatccacagaaccctcataaactgcatattgttaccagaataaaaagtacaagaagacgtccatattgggaaaaagatataataaagatgcttggattagaaaaagcacatacccctcaagttcacaagaatatcccttcagtgaatgcaaaattgaaagtagttaagcatttgataagaatcaagcccttgaagttgccacaaggacttccagcagaggagaacatgtctaacacgtgcctcaaaagcactggggagttagtagtgcagtggcatctgaaacctgtggagcagaaagcacatgagtcctaatgccccagcagcttccgattggaaaatgcaaattgtttttatttaaagatggtgagaaagtgttttcattaaaatatgttttcaaaaccattttcaggccgggcacggtggctcacctgtaatcccagcactttgggaggccaaggcgggcagatcacctgaggtcaagagttcgagaccagcctgaccaacatggagaaacccccatctctactgaaaatacagaattagccaggcatggtggcacatgcctgtaacccagctactcgggaggctgaagcaggagaatcacttgaacccgggaggcagaggttgcagtgagctgagatggtgccactgtactccagcctgggtgataggatgagactccatctcaggggaaaaaaaaaaatttttttttcactgactaaacctgctgcagctctcttttactacagacttggagattttagtttaatttggtttaattctctgtcctttccctttcactgtttcactccaaaacatgtaagaatggcaatgtttgaacatctgcgtttgggtctactgccaccttagcaagcctcattaaccattttataaaaattgcgttagtattgttgttgttgtttttgagacagggtcttgctctgtcacccaagctggaatacagtggcatgatttcagttcactgcagcctcgacctcccaggctcaagtgatcctcccacctcagcctccagagtagctaggactacaggcagtgtgccaccacatccagctaattttttaaagttttttcatagagacagggactcactatgttgtccaagctggtctcaaactcctgggttcaagccatcctcccacctcagcctcccaaaatgctgggattacaggcatgagccactgtacccagccaaaattgttttcttttttaagtgaattcaacaatttctgtgagtggctctttgcatgaacactgtgcaaggtgttggagaaatccaaagctgaccaaaacatggtccccaccttttggagcttacagtctgttctggggaacagagattcagccaaagtcaagaaacactggatgccagctagattatctgttctgtgctttggtgtctataagtacatatgtggatatgggttcattttatccctaaacttagtaccaaaccagcatttaatatctaattataaatctaatttggcctaaactttattattgcacactgcctgaacaaaacctatttgtctctatgtaaattttttcctcatggaacaagggtgtgaaatgaaaatattttaggatttattcaaaaacagactattctgttttcagcttcagaattgttctttgaatcctaaggaacctctgtcaacagttgaggttgctgttgaaaagaaagaagaaggaggcggaaatctctcagggagaattatttcctttcttttctattttagatacctggaggggtggggagaagtaagaattgtaagggaggttcagtagtggggaattctgtgacagctgattgaagatgatgatgaagaacctctgcattctagttaccctttgcttcccttcacctcttgtaaaatttggcttggcaacaatgacattgtcatgcttattgtcccaatatccatcctgtcgtagatcttaatgtttttgatcgttgcgttaaagtggaagtgccacccacagtgaaaccagatcccattaataaataagcttaaaggcaactgcagttttaattccatagttattgaatatccagtgtgtgtaaggcctggaggggagccaaaggacactaacttctaagagctccgtctagttggagagaaacctgtgtgccacaacatacagtgtccttgcttatgtggggtcgaagacatctgtgaaaataaaagcagcctctgctaatttagcgcca

SEQ ID NO: 18281 - DNA, 1497 bp, Homo sapiens
  source 1..1497: mol_type = unassigned DNA
gcctctaaagagagcaatcactacacttatggctgggattttgcgcttagtagttcaatggcccccaggcagactacagactgtgacaaaaggtgtggagtctcttatttgtacagattggattcgtcacaaattcaccagatcaagaattccagaaaaagtgtttcaggcctcacctgaagatcatgaaaaatacggtggggatccacagaaccctcataaactgcatattgttaccagaataaaaagtacaagaagacgtccatattgggaaaaagatataataaagatgcttggattagaaaaagcacatacccctcaagttcacaagaatatcccttcagtgaatgcaaaattgaaagtagttaagcatttgataagaatcaagcccttgaagttgccacaaggacttccagcagaggagaacatgtctaacacgtgcctcaaaagcactggggagttagtagtgcagtggcatctgaaacctgtggagcagaaagcacatgagtcctaatgccccagcagcttccgattggaaaatgcaaattgtttttatttaaagatggtgagaaagtgttttcattaaaatatgttttcaaaaccattttcaggccgggcacggtggctcacctcctcccaaaatgctgggattacaggcatgagccactgtacccagccaaaattgttttcttttttaagtgaattcaacaatttctgtgagtggctctttgcatgaacactgtgcaaggtgttggagaaatccaaagctgaccaaaacatggtccccaccttttggagcttacagtctgttctggggaacagagattcagccaaagtcaagaaacactggatgccagctagattatctgttctgtgctttggtgtctataagtacatatgtggatatgggttcattttatccctaaacttagtaccaaaccagcatttaatatctaattataaatctaatttggcctaaactttattattgcacactgcctgaacaaaacctatttgtctctatgtaaattttttcctcatggaacaagggtgtgaaatgaaaatattttaggatttattcaaaaacagactattctgttttcagcttcagaattgttctttgaatcctaaggaacctctgtcaacagttgaggttgctgttgaaaagaaagaagaaggaggcggaaatctctcagggagaattatttcctttcttttctattttagatacctggaggggtggggagaagtaagaattgtaagggaggttcagtagtggggaattctgtgacagctgattgaagatgatgatgaagaacctctgcattctagttaccctttgcttcccttcacctcttgtaaaatttggcttggcaacaatgacattgtcatgcttattgtcccaatatccatcctgtcgtagatcttaatgtttttgatcgttgcgttaaagtggaagtgccacccacagtgaaaccagatcccattaataaataa

SEQ ID NO: 18282 - DNA, 1035 bp, Homo sapiens
  source 1..1035: mol_type = unassigned DNA
tgtggccgatttcctttcatttccccgcccctcacctttcctttactctctatgattggaggagagtcagagctgctccaagagcatgcggggtgttgtagttctaagaagcgaggcttgcccgattctgtgcctgtgcgcatgctgaaagcaggggcgggaccggggcggtcttccagcagggaaaatggcgctggccatgctggtcttggtggtttcgccgtggtctgcggcccggggagtgcttcgaaactactgggagcgactgctacggaagcttccgcagagccggccgggctttcccagtcctccgtggggaccagcattagcagtacagggcccagccatgtttacagagccagcaaatgataccagtggaagtaaagagaattccagccttttggacagtatcttttggatggcagctcccaaaaatagacgcaccattgaagttaaccggtgtaggagaagaaatccgcagaagcttattaaagttaagaacaacatagacgtttgtcctgaatgtggtcacctgaaacagaaacatgtcctttgtgcctactgctatgaaaaggtgtgcaaggagactgcagaaatcagacgacagatagggaagcaagaagggggcccttttaaggctcccaccatagagactgtggtgctgtacacgggagagacaccgtctgaacaagatcagggcaagaggatcattgaacgagacagaaagcgaccatcctggttcacccagaattgacaccaaagatgttaaaagggtaacttcacagtaaatcatttctcctgaaatagaggaagattctttatgttgttgtgcttgtttttaaatcatcagtatagtttaacacattctttctaagcagttttgtgtgggataatttgaagaatatattatgagtaaactccgaaaattttgtttatccaaaggctcaatggattatgtttctattatatacaaggttttaagtaaacataaaatttccagaacaaaaataaaaaatttaaaattcatagcaaaaa

SEQ ID NO: 18283 - DNA, 2734 bp, Homo sapiens
  source 1..2734: mol_type = unassigned DNA
cagcagggaaaatggcgctggccatgctggtcttggtggtttcgccgtggtctgcggcccggggagtgcttcgaaactactgggagcgactgctacggaagcttccgcagagccggccgggctttcccagtcctccgtggggaccagcattagcagtacagggcccagccatgtttacagagccagcaaatgataccagtggaagtaaagagaattccagccttttggacagtatcttttggatggcagctcccaaaaatagacgcaccattgaagttaaccggtgtaggagaagaaatccgcagaagcttattaaagttaaggtaatgcattgatttttgtgggtgtgcttttcctcaagtcctccattgaataagctcatggtagattcctatagcctaggaataaattattatcagattatatgtgtctactttcctctggcctaaatgaaatacagtattctcattatatacataatgagaaggctagagcctgctgtcctctagcctgagtattagaaacacagtcaaggaaggagtgagtttggagactgggcaaggaacgaggctgtgaggtgcctacatgacttctgaattgtgagctgtgtcagtcttgagctgtgtgagttttgaactacagatgagtaaacatcctaactatggcagagcctagaattaaagctagaagcagtaggtatactgaatcttgggttttacaagcccttacatatttgttttatttttttatcatttccaacaaaataccatgaaggaaaaccctaagataagtaatataatagctaacaacaattaagtgtctatgatgtatctcagtgccttatgtttattatatctcatcatgtcttatagccctccaaagcaaataagatattcttcattattaggatgaaaaaactgaggcaaaaagaatttgcctgtggtcacacagctatgaagcagtagattttcgagctctgatttttgacctcatgttcttttaaagattttctttgtgttctcctatcctcagacaatttcagattctcctcgctgacaacatggatgtactgtcttcattgatctagtaaagaaaaattacagtgtgtattacctctgatctgttcatgtatggttttaacagttaggatttcagttactgtttacttcatggcgttccacaacagcagcaccatacagatgaaactcgagaacagaaagctgactttcataagcatccacattctgttaagcaaaaccttagaacttaagccagaaagtattattgagtgatggttggggctgaacttaaatgtagaactgaaaaacactttattacttaagacttacagtaattcataaatttgctcaagaggacgtaagattttaggaatgagatcttgcactgatctattatgtgacttccctgatcgcatttattctgaaggaatagttcttatcctgtgcatttattttcttccttgaattattttctgttacatacggtatatagtgtgttatgttgggtactttgatcacgaaaggaagaccagctgactgtgggtgtcttcataccttcagttgtgcatgcaatccagtttccagtagtggagcaaaatgagaatatggttaggcaagtaatatacaagcctctttcttcctttcagaaaaggaaattcttttgttatctgcctcacaaatgttagtatattaatcttatcaagtgtttaaagcttctttaatgatcctgtttagtatttttctttgtattttctttcaaacctacatctagaataagttgataaatcttttagaggttataatgtttctattttatatttaaagttggagatatatatatatctatatctatctctatatatatatatatacacacacatatatatatcattaaaataccctaagaatgtaacatagaaaataattttacattaaggaataatcagtgttcatttttaaaaagaaaaattataccatatacgaaacctgtattctgtacaggaatttgaattacactgtgataaaaagaggaagccaaggaagtcaacttgtaatgttcttatcttgttttccctaagatagattgaaagacaaagggaattcacttttccttggtgtcttatttaagatgctgattgtttgggtcacttcattatgttgacaaattccttatttgatatttagtatttggagttaggggaaatgagtatttcttttttcttttttacataactacaactgctgtgtttaagtaaagataccagattcaggttggctgaattctagttctagtttttctctaattcaaactcagtgttgcttgtcttcagtcttcctgttaaagtgaggtggaactagatggtgtatgatgacctcatgtagcctgaacatcctaagaaagttaaaataacaacatagacgtttgtcctgaatgtggtcacctgaaacagaaacatgtcctttgtgcctactgctatgaaaaggtgtgcaaggagactgcagaaatcagacgacagatagggaagcaagaagggggcccttttaaggctcccaccatagagactgtggtgctgtacacgggagagacaccgtctgaacaagatcagggcaagaggatcattgaacgagacagaaagcgaccatcctggttcacccagaattgacaccaaagatgttaaaagggtaacttcacagtaaatcatttctcctgaaat

SEQ ID NO: 18284 - DNA, 968 bp, Homo sapiens
  source 1..968: mol_type = unassigned DNA
ccggctacctgttggtgtgtatgcagagcatccctgtgccccgcggatatagactggcgcgcctctgttgcgcaggcgcagaactacaacttcagggttttccccaacggcctcttttttgcacgttaggagaaactacatttcccataatcctttgttccagggctggagcggctctgggctccggaatcgcccgcagccggtactgcgggacccactgcggatatggctgtcttggctggatccctgttgggccccacgagtaggtcggcagcgttgctgggtggcaggtggctccagccccgggcctggctggggttcccagacgcctggggcctccccaccccgcagcaggcccggggcaaggctcgcgggaatgagtatcagccgagcaacatcaaacgcaagaacaagcacggctgggtccggcgcctgagcacgccggccggcgtgcaggtcatccttcgccgaatgctcaagggccgcaagtcgctgagccattgaggatcgcgacgcagtcggcgggaccctcatggaagcatcgccctcgcctcggaccttgcctggcgctatttttgcagggagctggggagcaggaacgcctcggacctgagtgctctccatattgtggggttgaagtctggatgggagcttgccaagtccctttttaggctttttaattaggaagcatttcgaacctgcgcaacagaccaaagaacagtacaaagaacatccgtgtacccagtaccctgactaccgactacctacaacccgtccctgccccatcctgagttcttttgaagctgatctcaggcatcggattatttcttctgtaaatatttcagaatgtatctctccaagatgagagctcattaaaagacaattacaaagcttatcacatccaaaagaattatcaataattttgaaatattattaaacgtgtaataaatgttcaaagttccacttgc

SEQ ID NO: 18285 - DNA, 959 bp, Homo sapiens
  source 1..959: mol_type = unassigned DNA
aaacccaaagcggccgccgtaggcgaaggtgaagatggctgcctctgcctttgctggtgcagtgagagcagcttcaggaatcctacggcccctgaatattttggcatcttcaacctaccgcaactgtgtcaagaatgcctctcttatttctgcattgtccactggacgttttagtcatattcagacaccagttgtttcctccactcccagacttaccacatctgagagaaacctgacatgtgggcatacctcagtgatccttaatagaatggcccccgtgcttccaagtgtcctgaagctgccagtcagatctctaacatacttcagtgcaagaaaaggcaagagaaagaccgtgaaagctgtcatcgataggtttcttcgacttcattgtggcctttgggtgaggagaaaggctggctataagaaaaaattatggaaaaagacacctgcaaggaagaagcgattgagggaatttgtattctgcaataaaacccagagtaaactcttagataaaatgacgacgtccttctggaagaggcgaaactgacggcaaagccaaccacttagaagccttccacatctttgtcacctgcctggctcctgctctctgatgtacctctgggtagtgagatggaaatggtgcctgcagaagttggggagaaggatacttttgcacagcctccatgatgtctttattgcaaatatggatgacaagggtctctgttacaggggcctcagagcaccttcgtttctcctctagaccagggacaggtgtagagataaggactggcaaccagagcctcagcatccaaagatggactgaagtgggatggctgacaggcacataacttacgggaaagggaatttcatacatacgatttttgttttgtgggtaggagggcttatcatcaacactgattttataatctgacaataaatgtctttcattaaagagttta

SEQ ID NO: 18286 - DNA, 3727 bp, Homo sapiens
  source 1..3727: mol_type = unassigned DNA
aaacccaaagcggccgccgtaggcgaaggtgaagatggctgcctctgcctttgctggtgcagtgagagcagcttcaggaatcctacggcccctgaatattttggcatcttcaacctaccgcaactgtgtcaagaatgcctctcttatttctgcattgtccactggacgttttagtcatattcagacaccagttgtttcctccactcccagacttaccacatctgagagaaacctgacatgtgggcatacctcagtgatccttaatagaatggcccccgtgcttccaagtgtcctgaagctgccagtcagatctctaacatacttcagtgcaagaaaaggcaagagaaagaccgtgaaagctgtcatcgataggtttcttcgacttcattgtggcctttgggtgaggagaaaggctggctataagaaaaaattatggaaaaagacacctgcaaggaagaagcgattgagggaatttgtattctgcaataaaacccagagtaaactcttagataaaatgacgacgtccttctggaagaggcgaaactggtacgttgatgatccttatcagaagtatcatgatcgaacaaacctgaaagtatagatcagaagtttcacttgtttctcagttattggatatgtatctttgtgtacatatctttgcaaaaatggataagtacaaaacttgatgtaaattgtaccaatgaatacgtaaacatacagtgacaacattaaacttagaaaagttttaaaacttaatggatcagactttgccagatttggttagggaaacagaaatttagaatggtgcattatttttaacaaatggtattggcttaactagttgtttcagttatgctcttttagttgcaaggaatctcaagtgggacaaacataaaaagactcaaaagctacaagttagctcaagcaatgtgacattatttcaaggatatgtgccagggaattcaggaaccacctcaccaaccccatctcccactcagaaatcacctcccagcctcaggaagagtagaaattgggtggtgctcctcagcaggggaaggtggatgtttaggcttgggctctgcatgcatgtgacttgcttctttttgcattgttaactccattctctctattcaccaacttctctacacagcttttgcatacttacagtttctgttcctttgtaataactttaacttgcacctttgaggttcttttctacatgatgaccttcagctcctgctgctagtctccaattgccaagggaatttaactgggccagactacctttttatactaggtctggttgggtcattgtctagagtagggattggctgtccttaagtcaggagcccgctttgtattagcaggtttgcatgcagcaaaaaaacagttatgtgagcagtttcacttggaggttcacatggggtggcagcacacttaacatctaacacaccaggttcattgtgttcataacacttgtcatttactgtaacaacattttttcataggagagtaaatagcccttcagcatgctcattcatgaaacagaagaggctgtacaagtgaagacaagggctttttatgcaagttttgaaagataggtatttattttttctagagacaggagttttgctctgttgcccaggctggagtgcagtggtgcaatcatagctcattgaagcctcgcactcctgggctcaagtggtcctcctgcctcagcttactgagtaaggatatgtatttcttaaaagttagtttatccacttcagatttcatgttttcatttgtaaggataaacttttcccacaaattttcaacaatcattgtagaaactaagggggagaaagtaatctcagttgttttagaaacgaaaaagttaagcattgtttacttgaagtgggcagggaagcagcactgagtaaagttcaattgagtggttacagtctagggcagtggttcccaactctccgatcagaatcatctgggaagcattttcaaacagcaaagtactttgaaaaccattattaaatagaattatgcatgaattactgtttcagatcctttaatgtggtagttggtaataataagatgaaattcctctgttgttagtaaaattatgaaattgaagttctgcagcatgtcaggccaggattattagggagattcctcgaaactagtgtgtgtttattaaaaggagaaaggataacaatagaatgttctaaaaccagaagtccaagtgcgtgtctacttatgggaccaataaataaagaacagacatttgatttgaggtgaggtaaaagcctgaaacatggaatggcattctgttttgatggattttcatttcttcgcacttctgagacggcaaagccaaccacttagaagccttccacatctttgtcacctgcctggctcctgctctctgatgtacctctgggtagtgagatggaaatggtgcctgcagaagttggggagaaggatacttttgcacagcctccatgatgtctttattgcaaatatggatgacaagggtctctgttacaggggcctcagagcaccttcgtttctcctctagaccagggacaggtgtagagataaggactggcaaccagagcctcagcatccaaagatggactgaagtgggatggctgacaggcacataacttacgggaaagggaatttcatacatacgatttttgttttgtgggtaggagggcttatcatcaacactgattttataatctgacaataaatgtctttcattaaagagtttacctaaatgatgttcgattatatgtataatttataaaatatttatgtatagtttgtttattcaggtatatgtataatttattgaacacctactatgtcccagcatatctacaaaactgggtacatacatactgtctaactgctaatccacatttccagtcttacaaaggacataatgattagttaagccctaatttagatttgaggaaactgaagctgagagagggttaagtaaattacccaaagtacagctaataagacccagaatctcagtctcactccttgggatcctgtgtatttccctgagtcttctaacatatgaaaattcatatctaaatcaacaagtgactgtaatctggtactataaatactaaataaacacttcttcataacactgtaccaattcagcttttaaattttattactttgctttcctgtcctttgccaactcttaacctagttaatcctagttctgttgacattggaccaggctcagtaaataaacgaatggatttccagcctttttttcccatctgttcctgcttttagtcctctgaatctgcttcttttcttactgctgctttattttacagtgattttgtcaaacatagaatacaggactaaaaatgcaaagaaattgggtctgtgtttaattttgatgtttcaaattttgagcttccaagtctttgtggccacccaatgaagtttgagtctgcctgttcagatgtgaaaggtaagggctgcagcaggtttaagggtggcccttcaccaccctgttgtcacctgcacaggcactcccccatttgcagatgaagaaatgttcagagaagaaaaatgatggaccaaacgtctgtttgcacaattgaaactctaccagtggactattctattttcacagctacctagtttctgccgatgatttttttaaatgtgaaataaacagtgatactttcaggtt

SEQ ID NO: 18287 - DNA, 590 bp, Homo sapiens
  source 1..590: mol_type = unassigned DNA
cagtgcgcagacgcaggggtcggcgccggattcaccacaacatggcaaatctttttataaggaaaatggtgaaccctctgctctatctcagtcgtcacacggtgaagcctcgagccctctccacatttctatttggatccattcgaggtgcagcccccgtggctgtggaacccggggcagcagtgcgctcacttctctcacccggcctcctgccccatctgctgcctgcgctggggttcaaaaacaagactgtccttaagaagcgctgcaaggactgttacctggtgaagaggcggggtcggtggtacgtctactgtaaaacccatccgaggcacaagcagagacagatgtagaccctttccctccagagtcacgcacatactcgtcatcgcatcacttgggagaatggttgtatcttatggaaggaattatcacatcaaggagtcaggggaaagtgactggaagcaaacgccctaaaagttacccatcacgtttcagtgtaaatgagtaactatagaagacattgcgttatcttatttccaaaacgttccaactaaaaaacattttcctattaaaatagaccttccgaa

SEQ ID NO: 18288 - DNA, 665 bp, Homo sapiens
  source 1..665: mol_type = unassigned DNA
gccacgtgacccccccccccgccgccatcttccttcctggcagcagcgtccgcgtgccagtgcgcagacgcaggggtcggcgccgggtgagagcgtgcggccggattcaccacaacatggcaaatctttttataaggaaaatggtgaaccctctgctctatctcagtcgtcacacggtgaagcctcgagccctctccacatttctatttggatccattcgaggtgcagcccccgtggctgtggaacccggggcagcagtgcgctcacttctctcacccggcctcctgccccatctgctgcctgcgctggggttcaaaaacaagactgtccttaagaagcgctgcaaggactgttacctggtgaagaggcggggtcggtggtacgtctactgtaaaacccatccgaggcacaagcagagacagatgtagaccctttccctccagagtcacgcacatactcgtcatcgcatcacttgggagaatggttgtatcttatggaaggaattatcacatcaaggagtcaggggaaagtgactggaagcaaacgccctaaaagttacccatcacgtttcagtgtaaatgagtaactatagaagacattgcgttatcttatttccaaaacgttccaactaaaaaacattttcctattaaaatagaccttccgaa

SEQ ID NO: 18289 - DNA, 595 bp, Homo sapiens
  source 1..595: mol_type = unassigned DNA
atgcgcacggcttctggcggcgccaaacacccgattcaccacaacatggcaaatctttttataaggaaaatggtgaaccctctgctctatctcagtcgtcacacggtgaagcctcgagccctctccacatttctatttggatccattcgaggtgcagcccccgtggctgtggaacccggggcagcagtgcgctcacttctctcacccggcctcctgccccatctgctgcctgcgctggggttcaaaaacaagactgtccttaagaagcgctgcaaggactgttacctggtgaagaggcggggtcggtggtacgtctactgtaaaacccatccgaggcacaagcagagacagatgtagaccctttccctccagagtcacgcacatactcgtcatcgcatcacttgggagaatggttgtatcttatggaaggaattatcacatcaaggagtcaggggaaagtgactggaagcaaacgccctaaaagttacccatcacgtttcagtgtaaatgagtaactatagaagacattgcgttatcttatttccaaaacgttccaactaaaaaacattttcctattaaaatagaccttccgaat

SEQ ID NO: 18290 - DNA, 686 bp, Homo sapiens
  source 1..686: mol_type = unassigned DNA
gccacgtgacccccccccccgccgccatcttccttcctggcagcagcgtccgcgtgccagtgcgcagacgcaggggtcggcgccgggtgagagcgtgcggccgggtaagggagccgtcttctcagattcaccacaacatggcaaatctttttataaggaaaatggtgaaccctctgctctatctcagtcgtcacacggtgaagcctcgagccctctccacatttctatttggatccattcgaggtgcagcccccgtggctgtggaacccggggcagcagtgcgctcacttctctcacccggcctcctgccccatctgctgcctgcgctggggttcaaaaacaagactgtccttaagaagcgctgcaaggactgttacctggtgaagaggcggggtcggtggtacgtctactgtaaaacccatccgaggcacaagcagagacagatgtagaccctttccctccagagtcacgcacatactcgtcatcgcatcacttgggagaatggttgtatcttatggaaggaattatcacatcaaggagtcaggggaaagtgactggaagcaaacgccctaaaagttacccatcacgtttcagtgtaaatgagtaactatagaagacattgcgttatcttatttccaaaacgttccaactaaaaaacattttcctattaaaatagaccttccgaa

SEQ ID NO: 18291 - DNA, 1484 bp, Homo sapiens
  source 1..1484: mol_type = unassigned DNA
acatggcggggtccaggtggaggtcttgaggctatcagatcggtatggcattggcgtccgggcccgcaaggcgggcgctagctggctccgggcagctcggccttgggggcttcggggccccgagacgcggggcgtatgagtggggcgtgcgctccacgcggaagtcggagcctcctcccctggatagggtgtacgagatccctggactggagcccatcacctttgcggggaagatgcacttcgtgccctggctggcgcggccgatctttccgccctgggaccgcggctacaaggacccaaggttctaccgctcgccccctcttcacgagcatccgctgtacaaagaccaggcctgctatatctttcaccaccgttgccgccttctcgagggtgtaaagcaggccctctggctcaccaagaccaagttaatagaaggccttcccgagaaagtgcttagccttgttgatgatccaaggaaccacatagagaaccaagacgagtgcgttctgaatgtgatctctcacgcccgtctctggcagaccactgaggaaatccccaagagagagacctactgcccggtcatcgtggacaacctaatacagctgtgtaaatctcagattctcaagcatccttctctggccaggaggatctgtgtccaaaactccacgttttctgctacctggaaccgagagtctcttctccttcaagtccgtggttctggtggagcccgactgagcactaaggatcctctgcccaccatcgcctccagagaggagattgaagctactaagaatcatgttctagagaccttctaccccatatcacccatcatcgatcttcatgaatgcaatatttatgatgtgaaaaatgacacaggattccaggaaggctatccttacccctatccccataccctgtacttactggacaaagccaatttacgaccacaccgccttcaaccagatcagctgcgggccaagatgatcctgtttgcttttggcagtgccctggctcaggcccggctcctctatgggaatgatgccaaggtcttggagcagcccgtggtggtgcagagcgtgggcacggatggacgtgtcttccatttcctagtgtttcaactgaataccacagacctggactgtaacgagggtgtcaagaatttggcctgggtggactcagaccagctcctctatcagcatttttggtgtctcccagtgatcaaaaagagagtggttgtgacaggtccttgcttctccaaatcccaaatgtctaccagcttcgtcctcactccctcattcaacgcaggagaggaagtgatgcagcggaacttgagggcctcagccagcctcccgcccagtacaggctccccagccagtgagctggtgaaggagcaggagcacgctgcagggagagtgctgcgccgggtcatgctggatagcgaaaccccacgagaggaacttccagcagcagacttttggaaatga

SEQ ID NO: 18292 - DNA, 1122 bp, Homo sapiens
  source 1..1122: mol_type = unassigned DNA
gaggtcttgaggctatcagatcggtatggcattggcgtccgggcccgcaaggcgggcgctagctggctccgggcagctcggccttgggggcttcggggccccgagacgcggggcgtatgagtggggcgtgcgctccacgcggaagtcggagcctcctcccctggatagggtgtacgagatccctggactggagcccatcacctttgcggggaagatgcacttcgtgccctggctggcgcggccgatctttccgccctgggaccgcggctacaaggacccaaggttctaccgctcgccccctcttcacgagcatccgctgtacaaagaccaggcctgctatatctttcaccaccgttgccgccttctcgaggtctcttctccttcaagtccgtggttctggtggagcccgactgagcactaaggatcctctgcccaccatcgcctccagagaggagattgaagctactaagaatcatgttctagagaccttctaccccatatcacccatcatcgatcttcatgaatgcaatatttatgatgtgaaaaatgacacaggattccaggaaggctatccttacccctatccccataccctgtacttactggacaaagccaatttacgaccacaccgccttcaaccagatcagctgcgggccaagatgatcctgtttgcttttggcagtgccctggctcaggcccggctcctctatgggaatgatgccaaggtcttggagcagcccgtggtggtgcagagcgtgggcacggatggacgtgtcttccatttcctagtgtttcaactgaataccacagacctggactgtaacgagggtgtcaagaatttggcctgggtggactcagaccagctcctctatcagcatttttggtgtctcccagtgatcaaaaagagagtggttgtggaacctgttggcccagttggtttcaagccagagacattcagaaagtttttagctctatatttgcatggtgctgcgtgagcggaggacccctctgaatcctgaaacccctcttgcctctcttccacggaagagggcctgggccccgtggagcctcagtgcccgtttggcctgctgctctcgctgacaataaagagcccttgcgttg

SEQ ID NO: 18293 - DNA, 1478 bp, Homo sapiens
  source 1..1478: mol_type = unassigned DNA
ctcattcgttcccagcaggccctgcgcgcggcaacatggcggggtccaggtggaggtcttgaggctatcagatcggtatggcattggcgtccgggcccgcaaggcgggcgctagctggctccgggcagctcggccttgggggcttcggggccccgagacgcggggcgtatgagtggggcgtgcgctccacgcggaagtcggagcctcctcccctggatagggtgtacgagatccctggactggagcccatcacctttgcggggaagatgcacttcgtgccctggctggcgcggccgatctttccgccctgggaccgcggctacaaggacccaaggttctaccgctcgccccctcttcacgagcatccgctgtacaaagaccaggcctgctatatctttcaccaccgttgccgccttctcgagggtgtaaagcaggccctctggctcaccaagaccaagttaatagaaggccttcccgagaaagtgcttagccttgttgatgatccaaggaaccacatagagaaccaagacgagtgcgttctgaatgtgatctctcacgcccgtctctggcagaccactgaggaaatccccaagagagagacctactgcccggtcatcgtggacaacctaatacagctgtgtaaatctcagattctcaagcatccttctctggccaggaggatctgtgtccaaaactccacgttttctgctacctggaaccgagagtctcttctccttcaagtccgtggttctggtggagcccgactgagcactaaggatcctctgcccaccatcgcctccagagaggagattgaagctactaagaatcatgttctagagaccttctaccccatatcacccatcatcgatcttcatgaatgcaatatttatgatgtgaaaaatgacacaggattccaggaaggctatccttacccctatccccataccctgtacttactggacaaagccaatttacgaccacaccgccttcaaccagatcagctgcgggccaagatgatcctgtttgcttttggcagtgccctggctcaggcccggctcctctatgggaatgatgccaaggtcttggagcagcccgtggtggtgcagagcgtgggcacggatggacgtgtcttccatttcctagtgtttcaactgaataccacagacctggactgtaacgagggtgtcaagaatttggcctgggtggactcagaccagctcctctatcagcatttttggtgtctcccagtgatcaaaaagagagtggttgtggaacctgttggcccagttggtttcaagccagagacattcagaaagtttttagctctatatttgcatggtgctgcgtgagcggaggacccctctgaatcctgaaacccctcttgcctctcttccacggaagagggcctgggccccgtggagcctcagtgcccgtttggcctgctgctctcgctgacaataaagagcccttgcgttgca

SEQ ID NO: 18294 - DNA, 868 bp, Homo sapiens
  source 1..868: mol_type = unassigned DNA
agtctcttctccttcaagtccgtggttctggtggagcccgactgagcactaaggatcctctgcccaccatcgcctccagagaggagattgaagctactaagaatcatgttctagagaccttctaccccatatcacccatcatcgatcttcatgaatgcaatatttatgatgtgaaaaatgacacaggattccaggaaggctatccttacccctatccccataccctgtacttactggacaaagccaatttacgaccacaccgccttcaaccagatcagctgcgggccaagatgatcctgtttgcttttggcagtgccctggctcaggcccggctcctctatgggaatgatgccaaggtcttggagcagcccgtggtggtgcagagcgtgggcacggatggacgtgtcttccatttcctagtgtttcaactgaataccacagacctggactgtaacgagggtgtcaagaatttggcctgggtggactcagaccagctcctctatcagcatttttggtgtctcccagtgatcaaaaagagagtggttgtgacaggtccttgcttctccaaatcccaaatgtctaccagcttcgtcctcactccctcattcaacgcaggagaggaagtgatgcagcggaacttgagggcctcagccagcctcccgcccagtacaggctccccagccagtgagctggtgaaggagcaggagcacgctgcagggagagtgctgcgccgggtcatgctggatagcgaaaccccacgagaggaacttccagcagcagacttttggaaatgaaatggtgacattcccattgtgaacgtatttctcactgtctcatatatttaaattcctggttgttccattcaaaa

SEQ ID NO: 18295 - DNA, 1888 bp, Homo sapiens
  source 1..1888: mol_type = unassigned DNA
cgggttttcaccgtgttggccaggatggtctcgatctcctgacttcgtgatccacccgccttggcctcccaaagtgctgggattcccggcgtgagccaccgcgcccagccctcaatctgggttttaaacccaagcagagtccggaatcggagctcgcaccccttctcccaaccaggcctgcgtccctggggaaatcaggacgcagcgtccaggggttggaggagggccccggcggccgaccccggtctgtgccgccccctggtggccagccatgggcgagcatatgactgctctcggctccgccccgccgtccaacgggcacttccggagccgggcgtctacagaccgcggccaccttccacctgcgcccgaggcagacggtgcaggggcctccgggacaggcgtctgaggcctgctccgcagcgcgggcccgggggcgggcctaggggcggggcctgctgtggtgcgctcaggcaccgcgctggccacctgtgcccgggtcctagtggcggccgcagtgtcgcaggccggagggaagatggcggcgccctggtggcgagccgcgctgtgcgagtgtcggagatggcggggcttcagcacctcggccgtcctgggccgccggacacccccgctggggccgatgcccaacagtgacatcgacttgagcaacctggagcggctggagaagtaccggagcttcgaccgctaccggcgccgagcagagcaggaggcgcaggccccgcactggtggcggacctaccgagagtatttcggggagaagacagatcccaaagagaagattgatattgggctgcctccacccaaagtctcccggacccaacagctactggaacggaaacaggccatccaggagcttcgggccaatgtggaagaggagcgggctgcccgcctccgcacagccagtgtcccgctggatgccgtgcgggccgagtgggagaggacctgtggcccctaccacaagcagcgtctggctgagtattacggcctctaccgagacctgttccacggtgccacctttgtgccccgagtccccctgcacgtggcctacgctgtgggtgaggatgacctgatgcctgtgtactgtggcaatgaggtgactccaaccgaggctgcccaagcgccagaggtgacctatgaggcagaagagggctccttgtggacgttgctactcactagcttggatgggcacctgctggagccagatgctgagtacctccactggctgctaaccaacatcccgggtaaccgggtggctgaaggacaggtgacgtgtccctacctcccccccttccctgcccgaggctccggcatccaccgtcttgccttcctgctcttcaagcaggaccagccgattgacttctctgaggacgcacgcccctcaccctgctatcagctggcccagcggaccttccgcacttttgatttctacaagaaacaccaagaaaccatgactccagccggcttgtccttcttccagtgccgctgggatgactccgtcacctacatcttccaccagcttctggacatgcgggagccggtgtttgagttcgtgcggccgcccccttaccaccccaagcagaagcgcttcccccaccggcagcccctgcgctacctggaccggtacagggacagtcatgagcccacctatggcatctactaaggagccagagtgtgcgcatttcagagcatgggattgatcggcagcaagagtaaagacacagctccagaggcccacactgtggggtctgggccctgccttaggcagcccccctctttggccccctcccgtcaggcccagggcttggagtgaaagtgactctcaggtggtggggtggggaatgtgaataaacatgatttcttgccgggc

SEQ ID NO: 18296 - DNA, 1887 bp, Homo sapiens
  source 1..1887: mol_type = unassigned DNA
gaaaatgtttcctgttatttgctggacaagtcccaaagaacaggcagatgttcttattaaaagatcagcctataagattggtcaggaccaggcgcctctggccacgtgcctctcccctccagcacctgcggtctgcggtggcacctggcagctggaccacagccaggagaagggtactattagccctgcttcaaacatgcagaaactgaggcccggggagattaaataacctgcctgaaatgacagtgagtagctgcgcctggatttgagttctgctctggccaatccccaagctccacgctgtcagccaccccgctctcctacctcccagaggagcaggctacactcctgttccttttagagagagaaatattgcggccgggcgcggtggctcacgtctgtaatcccagcattttggcaggccaagggttttgccatgttcgtagggctggtctcaaactaattacctcagatgatccgcccacctcggcctcccaaagtgctgggattacagccgtcctgggccgccggacacccccgctggggccgatgcccaacagtgacatcgacttgagcaacctggagcggctggagaagtaccggagcttcgaccgctaccggcgccgagcagagcaggaggcgcaggccccgcactggtggcggacctaccgagagtatttcggggagaagacagagttccagctcctaaaatatttgctcctaaaatcttgaccacctgactttccggattgggatgccgttctgtgcgcctcaaatactctgtagatcccaaagagaagattgatattgggctgcctccacccaaagtctcccggacccaacagctactggaacggaaacaggccatccaggagcttcgggccaatgtggaagaggagcgggctgcccgcctccgcacagccagtgtcccgctggatgccgtgcgggccgagtgggagaggacctgtggcccctaccacaagcagcgtctggctgagtattacggcctctaccgagacctgttccacggtgccacctttgtgccccgagtccccctgcacgtggcctacgctgtgggtgaggatgacctgatgcctgtgtactgtggcaatgaggtgactccaaccgaggctgcccaagcgccagaggtgacctatgaggcagaagagggctccttgtggacgttgctactcactagcttggatgggcacctgctggagccagatgctgagtacctccactggctgctaaccaacatcccgggtaaccgggtggctgaaggacaggtgacgtgtccctacctcccccccttccctgcccgaggctccggcatccaccgtcttgccttcctgctcttcaagcaggaccagccgattgacttctctgaggacgcacgcccctcaccctgctatcagctggcccagcggaccttccgcacttttgatttctacaagaaacaccaagaaaccatgactccagccggcttgtccttcttccagtgccgctgggatgactccgtcacctacatcttccaccagcttctggacatgcgggagccggtgtttgagttcgtgcggccgcccccttaccaccccaagcagaagcgcttcccccaccggcagcccctgcgctacctggaccggtacagggacagtcatgagcccacctatggcatctactaaggagccagagtgtgcgcatttcagagcatgggattgatcggcagcaagagtaaagacacagctccagaggcccacactgtggggtctgggccctgccttaggcagcccccctctttggccccctcccgtcaggcccagggcttggagtgaaagtgactctcaggtggtggggtggggaatgtgaataaacatgatttcttgccgg

SEQ ID NO: 18297 - DNA, 1199 bp, Homo sapiens
  source 1..1199: mol_type = unassigned DNA
agggcggagaaggacttgcgcgcgacggttctcaccgctgctatggaggcgctggccatgggttcccgggcgctgcggctctggctggtcgcacccggtggcgggatcaaatggagatttatagcaacatcgtcagcttctcagctgtcaccgacagaattgacagaaatgcggaatgatctctttaataaagagaaagccaggcagttatcattaactccccgaactgagaagatagaagttaagcatgttgggaaaactgaccccggtactgtcttcgtgatgaataaaaacatttcaactccctacagttgtgccatgcatttaagcgagtggtattgcaggaagtccattctggctctggtggatggacagccttgggacatgtataagcctttaacaaagtcctgtgaaattaaatttcttactttcaaagattgtgatccaggagaagtgaataaggcatattggcgttcctgtgctatgatgatgggctgtgtgatagagagggcattcaaagatgaatatatggtcaatttggtcagagctccagaagttcctgtaatttctggtgccttctgttatgacgtagttttggatagcaaacttgatgagtggatgccaacaaaagagaacttacgttccttcacaaaagatgctcatgctttaatttataaagatcttccatttgaaactctggaagttgaagcaaaagtggcattggaaatatttcaacacagcaagtacaaagtagatttcatagaagagaaggcatctcagaaccctgagagaatagtcaagctacacagaataggtgacttcattgatgtgagtgagggccctcttattccaagaacaagtatttgtttccagtatgaagtatcagcagttcacaatcttcaacccacccagccaagtctcatacgaagattccagggcgtgtctttacctgttcacttaagagcacattttacaatatgggataagctattggaaagatctcggaaaatgactccatttcccattctccttctatttactacgcagtcattcttcactacctcgcctgagtcgtacctcctccatggaacagtctcagagtaactgaagatcaaagtaaagcaacagaggaatgtacatctacctaataactttctaaaatttaaatatgtataataaaataaatgttttaaatataa

SEQ ID NO: 18298 - DNA, 1110 bp, Homo sapiens
  source 1..1110: mol_type = unassigned DNA
agggcggagaaggacttgcgcgcgacggttctcaccgctgctatggaggcgctggccatgggttcccgggcgctgcggctctggctggtcgcacccggtggcgggatcaaatggagatttatagcaacatcgtcagcttctcagctgtcaccgacagaattgacagaaatgcggaatgatctctttaataaagagaaagccaggcagttatcattaactccccgaactgagaagatagaagttaagcatgttgggaaaactgaccccggtactgtcttcgtgatgaataaaaacatttcaactccctacagttgtgccatgcatttaagcgagtggtattgcaggaagtccattctggctctggtggatggacagccttgggacatgtataagcctttaacaaagtcctgtgaaattaaatttcttactttcaaagattgtgatccaggagaagtgaataaggcatattggcgttcctgtgctatgatgatgggctgtgtgatagagagggcattcaaagatgaatatatggtcaatttggtcagagctccagaagttcctgtaatttctggtgccttctgttatgacgtagttttggatagcaaacttgatgagtggatgccaacaaaagagaacttacgttccttcacaaaagatgctcatgctttaatttataaagatcttccatttgaaactctggaagttgaagcaaaagtggcattggaaatatttcaacacagcaagtacaaagtagatttcatagaagagaaggcatctcagaaccctgagagaatagtcaagctacacagaataggtgacttcattgatgtgagtgagggccctcttattccaagaacaagtatttgtttccagtatgaagtatcagcagttcacaatcttcaacccacccagccaagtctcatacgaagattccagggcgtgtctttacctgttcacttaagagcacattttacaatatgggataagctattggaaagatctcggaaaatggtaactgaagatcaaagtaaagcaacagaggaatgtacatctacctaataactttctaaaatttaaatatgtataataaaataaatgttttaaatataa

SEQ ID NO: 18299 - DNA, 1456 bp, Homo sapiens
  source 1..1456: mol_type = unassigned DNA
cccaaagtaggctaggcctacggaagctgggtcttcttgctgtgaggtcgcgttccccagtgttacggagggtccttgaggcaggagtgaaaattgggtctgggggttagtcctggggtggaggtctgggcacgccgggtcggaccccctccatcttcggttttgcacaccccgctttccagcgcggagtcgcggcgggtagggcggcgtcgcgtgcgtgacgtcatccagcggcgcctcgcgaggctccagtggccttgacctcccgcggcgtgggaggctgcgcggcgatgctgcagttcgtccgggccggggcgcgggcctggcttcggcctaccggcagccagggcctgagttccctggcggaagaggcagcgcgtgcgaccgagaacccggagcaggtggcgagcgagggtctcccggagcccgtgctgcgcaaagtcgagctcccggtacccactcatcgacgcccagtgcaggcctgggtcgagtccttgcggggcttcgagcaggagcgcgtgggcctggccgacctgcaccccgatgttttcgccaccgcgcccaggctggacatactgcaccaggttgctatgtggcagaagaacttcaagagaattagctatgccaagaccaagacgagagccgaggtgcggggcggtggccggaagccttggccgcagaaaggcactgggcgggcccggcatggcagcatccgctctccgctctggcgaggaggaggtgttgcccatggcccccggggccccacaagttactactacatgctgcccatgaaggtgcgggcgctgggtctcaaagtggcactgaccgtcaagctggcccaggacgacctgcacatcatggactccctagagctgcccaccggagacccacagtacctgacagagctggcgcactaccgccgctggggggactccgtactcctcgtggacttaacacacgaggagatgccacagagcatcgtggaggccacctctaggcttaagaccttcaacttgatcccggctgttggcctaaatgtgcacagcatgctcaagcaccagacgctggtcctgacgctgcccaccgtcgccttcctggaggacaagctgctctggcaggactcacgttacagacccctctaccccttcagcctgccctacagcgacttcccccgacccctaccccacgctacccagggcccagcggccaccccgtaccactgttgatgtgaagcacctcttctgagccaggccgagcccctggccgacttgggagcctcaggcccacgcccacccttcgaggaaggtgtcacctggaccccttcattccacggaggaagctgaggccacagggagcggccatcgccattgggaaggggcgactccacggaaagcccagacgggcttctgcatccattccctctttttgtttttaaaataaattgtatttttgaatc

SEQ ID NO: 18300 - DNA, 1320 bp, Homo sapiens
  source 1..1320: mol_type = unassigned DNA
cccaaagtaggctaggcctacggaagctgggtcttcttgctgtgagcgcggagtcgcggcgggtagggcggcgtcgcgtgcgtgacgtcatccagcggcgcctcgcgaggctccagtggccttgacctcccgcggcgtgggaggctgcgcggcgatgctgcagttcgtccgggccggggcgcgggcctggcttcggcctaccggcagccagggcctgagttccctggcggaagaggcagcgcgtgcgaccgagaacccggagcaggtggcgagcgagggtctcccggagcccgtgctgcgcaaagtcgagctcccggtacccactcatcgacgcccagtgcaggcctgggtcgagtccttgcggggcttcgagcaggagcgcgtgggcctggccgacctgcaccccgatgttttcgccaccgcgcccaggctggacatactgcaccaggttgctatgtggcagaagaacttcaagagaattagctatgccaagaccaagacgagagccgaggtgcggggcggtggccggaagccttggccgcagaaaggcactgggcgggcccggcatggcagcatccgctctccgctctggcgaggaggaggtgttgcccatggcccccggggccccacaagttactactacatgctgcccatgaaggtgcgggcgctgggtctcaaagtggcactgaccgtcaagctggcccaggacgacctgcacatcatggactccctagagctgcccaccggagacccacagtacctgacagagctggcgcactaccgccgctggggggactccgtactcctcgtggacttaacacacgaggagatgccacagagcatcgtggaggccacctctaggcttaagaccttcaacttgatcccggctgttggcctaaatgtgcacagcatgctcaagcaccagacgctggtcctgacgctgcccaccgtcgccttcctggaggacaagctgctctggcaggactcacgttacagacccctctaccccttcagcctgccctacagcgacttcccccgacccctaccccacgctacccagggcccagcggccaccccgtaccactgttgatgtgaagcacctcttctgagccaggccgagcccctggccgacttgggagcctcaggcccacgcccacccttcgaggaaggtgtcacctggaccccttcattccacggaggaagctgaggccacagggagcggccatcgccattgggaaggggcgactccacggaaagcccagacgggcttctgcatccattccctctttttgtttttaaaataaattgtatttttgaatc

SEQ ID NO: 18301 - DNA, 2404 bp, Homo sapiens
  source 1..2404: mol_type = unassigned DNA
cccaaagtaggctaggcctacggaagctgggtcttcttgctgtgaggtcgcgttccccagtgttacggagggtccttgaggcaggagtgaaaattgggtctgggggttagtcctggggtggaggtctgggcacgccgggtcggaccccctccatcttcggttttgcacaccccgctttccagcgcggagtcgcggcgggtagggcggcgtcgcgtgcgtgacgtcatccagcggcgcctcgcgaggctccagtggccttgacctcccgcggcgtgggaggctgcgcggcgatgctgcagttcgtccgggccggggcgcgggcctggcttcggcctaccggcagccagggcctgagttccctggcggaagaggcagcgcgtgcgaccgagaacccggagcaggtggcgagcgagggtctcccggagcccgtgctgcgcaaagtcgagctcccggtacccactcatcgacgcccagtgcaggcctgggtcgagtccttgcggggcttcgagcaggagcgcgtgggcctggccgacctgcaccccgatgttttcgccaccgcgcccaggctggacatactgcaccaggttgctatgtggcagaagaacttcaagagaattagctatgccaagaccaagacgagagccgaggtgcggggcggtggccggaagccttggccgcagaaaggcactgggcgggcccggcatggcagcatccgctctccgctctggcgaggaggaggtgttgcccatggcccccggggccccacaagttactactacatgctgcccatgaaggtgcgggcgctgggtctcaaagtggcactgaccgtcaagctggcccaggacgacctgcacatcatggactccctagagctgcccaccggagacccacagtacctgacagagctggcgcactaccgccgctggggggactccgtactcctcgtggacttaacacacgaggagatgccacagagcatcgtggaggccacctctaggcttaagaccttcaacttgatcccggctgttggtgagcaaagagcccaggcccctagagtgcgcatgtgcaggctccgctgttagaatcacagcggttcaaatccggcatctggtcgctgagtggcctcaggcagtgaccacgctcccggacccaaccttcagcttgcccaaagcaataatctttcctaaagaagtgcttggctggggatggtggctcacgcttgtaatcccagtactttgggaggccaaggcagtctgggcaatatagtgaggctcccatctgtactaaaaataaaaaagttaggcgtggcgatgtgcacctgtagtcccagctactcgggggctgagccaggcggatagcttgagctcagggggccaaggctgcagtgagtcatgatcgcaccactgcacccaaacctggggagagagctagactcttgtctcaaaaaaaaaaaaaaaaaaaaaaaaaaagctccaaagtcacctctgtcaaagccacagtctgttccttccacagccacaagatggcgacatgagcctaagtcaagtcctgtccctcaacccacgcccctcgctggcttccccacctctctcaggatgaaagcccaagtcatcagggtggcacgtcaggccctgcacgatgtgccccgtcacctccctgccctcccgtcatttgccctgggtctcccccaccagaatgggagccaggagtcccagccaggcacaggaccgagcctggctctcggtcagcaggtgatgagctgggagcagctccttggccagaggcttacaggcaacaagcggccaggcagggtctggccccgggctgctgggctcacaaagtcacactagaccacagtgacgatctctgtaagcacaaagggactccgatgtgggtggggtgaggagagaggcagccccggcctgaccggccccccgccccgcccccaccccgcccccaggcctaaatgtgcacagcatgctcaagcaccagacgctggtcctgacgctgcccaccgtcgccttcctggaggacaagctgctctggcaggactcacgttacagacccctctaccccttcagcctgccctacagcgacttcccccgacccctaccccacgctacccagggcccagcggccaccccgtaccactgttgatgtgaagcacctcttctgagccaggccgagcccctggccgacttgggagcctcaggcccacgcccacccttcgaggaaggtgtcacctggaccccttcattccacggaggaagctgaggccacagggagcggccatcgccattgggaaggggcgactccacggaaagcccagacgggcttctgcatccattccctctttttgtttttaaaataaattgtatttttgaatcaaggaggataaagataa

SEQ ID NO: 18302 - DNA, 1423 bp, Homo sapiens
  source 1..1423: mol_type = unassigned DNA
gtcgcgttccccagtgttacggagggtccttgaggcaggagtgaaaattgggtctgggggttagtcctggggtggaggtctgggcacgccgggtcggaccccctccatcttcggttttgcacaccccgctttccagcgcggagtcgcggcgggtagggcggcgtcgcgtgcgtgacgtcatccagcggcgcctcgcgaggctccagtggccttgacctcccgcggcgtgggaggctgcgcggcgatgctgcagttcgtccgggccggggcgcgggcctggcttcggcctaccggcagccagggcctgagttccctggcggaagaggcagcgcgtgcgaccgagaacccggagcaggtggcgagcgagggtctcccggagcccgtgctgcgcaaagtcgagctcccggtacccactcatcgacgcccagtgcaggcctgggtcgagtccttgcggggcttcgagcaggagcgcgtgggcctggccgacctgcaccccgatgttttcgccaccgcgcccaggctggacatactgcaccaggttgctatgtggcagaagaacttcaagagaattagctatgccaagaccaagacgagagccgaggtgcggggcggtggccggaagccttggccgcagaaaggcactgggcgggcccggcatggcagcatccgctctccgctctggcgaggaggaggtgttgcccatggcccccggggccccacaagttactactacatgctgcccatgaaggtgcgggcgctgggtctcaaagtggcactgaccgtcaagctggcccaggacgacctgcacatcatggactccctagagctgcccaccggagacccacagtacctgacagagctggcgcactaccgccgctggggggactccgtactcctcgtggacttaacacacgaggagatgccacagagcatcgtggaggccacctctaggcttaagaccttcaacttgatcccggctgttggtgagcaaagagcccaggcccctagagtgcgcatgtgcaggctccgctgttagaatcacagcggttcaaatccggcatctggtcgctgagtggcctcaggcagtgaccacgctcccggacccaaccttcagcttgcccaaagcaataatctttcctaaagaagtgcttggctggggatggtggctcacgcttgtaatcccagtactttgggaggccaaggcagtctgggcaatatagtgaggctcccatctgtactaaaaataaaaaagttaggcgtggcgatgtgcacctgtagtcccagctactcgggggctgagccaggcggatagcttgagctcagggggccaaggctgcagtgagtcatgatcgcaccactgcacccaaacctggggagagagctagactcttgtctcaaaaaaaaaaaaaaaaaaaaaaaaaaa

SEQ ID NO: 18303 - DNA, 1262 bp, Homo sapiens
  source 1..1262: mol_type = unassigned DNA
gggcgacttccgcgtggggtgagaggtcgcctgcgagggtgaccgggcaggagggctcagtgcgcaagccggacgtgctgggtccaagattattgattaatttgggcaccgcgagggctcgagtccccccacaccactgcccggcctgcgggggagcacagacagcccgggccctcccggctgcaggtcccgggctttccccgcgcggttgccggctccgcccagaggagccgcgcccggcggaggggtaagaaaggcagggtcgcggcgtcaacgcggcggccgtctcgagtccagggcccgcgtcctccccgacctcccgacgccacctcacggcctcagggggactgggctcccgggaaaccgccggccacctggcggacgaacacaggcagtggcgggcagtggagacgccagggaccaccgcgctgagagcgatcactcatccgccagccccgccccgcgagccccgccccgcgagccccgccccgcgagccccgccccgcgagccccgccccgcgagccccgccccgcgagccccgcaccgccggccccgcaccgccagccccgcgagccccgccccgccccgcgcgctcctcgcattggccgagtccccgcggccacaccccctaccagattggggccgctattggacgcggcggccgcggccaatcggagccgctcttgctgcgacgcagcggtcggaagcggagcaaggtcgaggccgggttggcgccggagccggggccgcttggagctcgtgtggggtctccggtccagggcgcggcatgggcgtcctggccgcagcggcgcgctgcctggtccggggtgcggaccgaatgagcaagtggacgagcaagcggggcccgcgcagcttcaggggccgcaagggccggggcgccaagggcatcggcttcctcacctcgggctggaggttcgtgcagatcaaggagatggtcccggagttcgtcgtcccggatctgaccggcttcaagctcaagccctacgtgagctacctcgcccctgagagcgaggagacgcccctgacggccgcgcagctcttcagcgaagccgtggcgcctgccatcgaaaaggacttcaaggacggtaccttcgaccctgacaacctggaaaagtacggcttcgagcccacacaggagggaaagctcttccagctctaccccaggaacttcctgcgctagctgggcgggggaggggcggcctgccctcatctcatttctattaaacgcctttgccagcta

SEQ ID NO: 18304 - DNA, 2042 bp, Homo sapiens
  source 1..2042: mol_type = unassigned DNA
cgctgtttcgtgggaccaggattgaaacaagatggcgggttcgtggtgagaagccgtcaagcaggagtagaaattggtatgcttagaagcagattctaaaagcagtttctcttcagaacatcttttttcataccacttgataagcatcttgaaacaccatggctgtagctgcagtaaaatgggtgatgtcaaagagaactatcttgaaacatttatttccagtccaaaattcgggcgtacatgtgcagatggagctttatattgtgtttgtcataaatctacgtattctcctctaccagatgactataattgcaacgtagagcttgctctgacttctgatggcaggacaatagtatgctaccacccttctgtggacattccatatgaacacacaaaacctatccctcggccagatcctgtgcataataatgaagaaacacatgatcaagtgctgaaaaccagattggaagaaaaagttgaacaccttgaggaaggacctatgatagaacaacttagcaaaatgttctttactactaagcaccgttggtatcctcatggacggtatcacagatgtcgtaagaatctgaatcctccaaaagacagatgatgcggaggttcctgggggaatcaaagagaaatgtgcctcatttgccatttgagaaaatgcagtctggtgtattcagtaatatatagtaaagtaataatgataaaatatcttttcatatattagaatgtgtacttttatataaagtaattctggatttgacattctcatttagagaaacctattttcttttttctttttctattttagtgtttcatttatgtgcggtctccaatttaggacttttccatagtgccaaagccatacatattcagtagaacatcaataaattacatcagaaattcaacactttattataaaacgggcttcgtgttagataattttgctaaacagtaggctactgtaagtgttctgagcatatttaagacaggctagcattttcaatttacaatattttcaactgatagtaggtttattgggatgtaaccctatgataagttgagaaacatctctttttgtgtgtctactgtgatttaagtatttttaatcatcagccaagcattgttagtagtataaatatgattaataaaaatgtgcatggctttcctgaaggagattttttaattgcctttgagaataaactcataaggtctaccaagaaaataaatgttatgatgtttcagttggcttctaggaaataattaaattagtgatattttaatcaggttttactatctgctaggccccttccatcaattcttattaaattctcaaaataatcctttgaaaagggagtataattacattttacagtgactcgaaccttacccaaacaagtgggagagccaggagccaaactatcaggctccaaagcttttttttagtgcatcacaatgacaaaggggtggttttctttcacccaagaatgtgctttcctggaaatttttctagatagaatattatgtaatttgttttgaaggttttttttcctgactgtcttaaagattatgctagctttagaacacatgcaaacagctgcagctctgtgattaaaatgttaaggtcactagaatagtgttaggaaaatgttaatagataattctgctgcctctattagcttatgtatgatccttaatagcattgcttccccttcagtttctatttaggaggtgaagaatcttttaataaggtagaaagttgctttatttaaatttgtactgtagaatgtttgtgatacagtatttgtaaaattgatatgaaaaataatttctcaaagtctattgtttgatctagttattttaataaaggaactctagaagtttcaagtggccagtgaagtgtgaggaatagagagtaaaggaaataattaataatggtgaccctctgttaagtggtttactttttccattaatataaatttcatttggaaagattaaaaaaacaagtttgattgaacttgataaatcagaaatattta

SEQ ID NO: 18305 - DNA, 777 bp, Homo sapiens
  source 1..777: mol_type = unassigned DNA
agcaggagtagaaattggtatgcttagaagcagattctaaaagcagtttctcttcagaacatcttttttcataccacttgataagcatcttgaaacaccatggctgtagctgcagtaaaatgggtgatgtcaaagagaactatcttgaaacatttatttccagtccaaaatggagctttatattgtgtttgtcataaatctacgtattctcctctaccagatgactataattgcaacgtagagcttgctctgacttctgatggcaggacaatagtatgctaccacccttctgtggacattccatatgaacacacaaaacctatccctcggccagatcctgtgcataataatgaagaaacacatgatcaagtgctgaaaaccagattggaagaaaaagttgaacaccttgaggaaggacctatgatagaacaacttagcaaaatgttctttactactaagcaccgttggtatcctcatggacggtatcacagatgtcgtaagaatctgaatcctccaaaagacagatgatgcggaggttcctgggggaatcaaagagaaatgtgcctcatttgccatttgagaaaatgcagtctggtgtattcagtaatatatagtaaagttgacttatatccaaaattctacaaattcttagctatgttataaatgtagaaagaagtgaaaaatcaaaatatgattatgaagattttcttctcttccgagtacaaagctctgctaaataaggatttacccaagatgcccacatccacatacttatgt

SEQ ID NO: 18306 - DNA, 3138 bp, Homo sapiens
  source 1..3138: mol_type = unassigned DNA
gcgcagcgctgtttcgtgggaccaggattgaaacaagatggcgggttcgtggtgagaagccgtcaaggagtagaaattggtatgcttagaagcagattctaaaagcagtttctcttcagaacatcttttttcataccacttgataagcatcttgaaacaccatggctgtagctgcagtaaaatgggtgatgtcaaagagaactatcttgaaacatttatttccagtccaaaatggagctttatattgtgtttgtcataaatctacgtattctcctctaccagatgactataattgcaacgtagagcttgctctgacttctgatggcaggacaatagtatgctaccacccttctgtggacattccatatgaacacacaaaacctatccctcggccagatcctgtgcataataatgaagaaacacatgatcaagtgctgaaaaccagattggaagaaaaagttgaacaccttgaggaaggacctatgatagaacaacttagcaaaatgttctttactactaagcaccgttggtatcctcatggacggtatcacagatgtcgtaagaatctgaatcctccaaaagacagatgatgcggaggttcctgggggaatcaaagagaaatgtgcctcatttgccatttgagaaaatgcagtctggtgtattcagtaatatatagtaaagtaataatgataaaatatcttttcatatattagaatgtgtacttttatataaagtaattctggatttgacattctcatttagagaaacctattttcttttttctttttctattttagtgtttcatttatgtgcggtctccaatttaggacttttccatagtgccaaagccatacatattcagtagaacatcaataaattacatcagaaattcaacactttattataaaacgggcttcgtgttagataattttgctaaacagtaggctactgtaagtgttctgagcatatttaagacaggctagcattttcaatttacaatattttcaactgatagtaggtttattgggatgtaaccctatgataagttgagaaacatctctttttgtgtgtctactgtgatttaagtatttttaatcatcagccaagcattgttagtagtataaatatgattaataaaaatgtgcatggctttcctgaaggagattttttaattgcctttgagaataaactcataaggtctaccaagaaaataaatgttatgatgtttcagttggcttctaggaaataattaaattagtgatattttaatcaggttttactatctgctaggccccttccatcaattcttattaaattctcaaaataatcctttgaaaagggagtataattacattttacagtgactcgaaccttacccaaacaagtgggagagccaggagccaaactatcaggctccaaagcttttttttagtgcatcacaatgacaaaggggtggttttctttcacccaagaatgtgctttcctggaaatttttctagatagaatattatgtaatttgttttgaaggttttttttcctgactgtcttaaagattatgctagctttagaacacatgcaaacagctgcagctctgtgattaaaatgttaaggtcactagaatagtgttaggaaaatgttaatagataattctgctgcctctattagcttatgtatgatccttaatagcattgcttccccttcagtttctatttaggaggtgaagaatcttttaataaggtagaaagttgctttatttaaatttgtactgtagaatgtttgtgatacagtatttgtaaaattgatatgaaaaataatttctcaaagtctattgtttgatctagttattttaataaaggaactctagaagtttcaagtggccagtgaagtgtgaggaatagagagtaaaggaaataattaataatggtgaccctctgttaagtggtttactttttccattaatataaatttcatttggaaagattaaaaaaacaagtttgattgaacttgataaatcagaaatatttaccagctttgtcgatggtgtattcttgaaaaatgtttggttttctttcaggttgacttatatccaaaattctacaaattcttagctatgttataaatgtagaaagaagtgaaaaatcaaaatatgattatgaagattttcttctcttccgagtacaaagctctgctaaataaggatttacccaagatgcccacatccacatacttatgtgtcagtgctttggagaattaactttgactttattctactggaagtatagattaacactgtgctttctgggattttgcttttcatgggttgctgatttttaattttgctaaataagcacatagtccgtgatcaccagcatcacctgccctctgttcctcccccgtcccccagggataagaacctgttatccaccatcagtaacattttatgaaagatctacttatttgtctgttttgcagacattttaaaattcgtaaagtgggatgcttctttaatttaaatacatttagcttcatgaaaaactcactacacagttcttgttcaagcattattgggaaaccaccagagggcactctcacccagggcttaatttgaacatctcgcccaaaagtgacttttaaaagcacttaattagcagagaatttggatgttcattagttgagaatgactagtagaataaatggtaatagtgaaattaagtgctggaatattctgagtagaccaatagcaaaaactgatttttttttttttttaaagaaaaggtcttgctgtgtcgcccaggatggagtgcagtggcacaatcacattgcactgcaacctcaatatcctgggctcaagcaatcctcccaccgcagcctcccgaattgctgagactacacatgtgtgctaccatgcctggctaattgttttaattttttttatagagacggggtttcgccatgttgcccaggctggtcttgaactcctgggctcaaagcgatccacccaccttggcctccaaaagtatgggattacaggtgtgagccactgtgcccagccttattttttttttttaagataatattgttaacattttgtatttctctgcataaatatatttcaaaaataaaaatagagctcataat

SEQ ID NO: 18307 - DNA, 920 bp, Homo sapiens
  source 1..920: mol_type = unassigned DNA
tgaaacaagatggcgggttcgtggtgagaagccgtcaagcaggagtagaaattggtatgcttagaagcagattctaaaagcagtttctcttcagaacatcttttttcataccacttgataagcatcttgaaacaccatggctgtagctgcagtaaaatgggtgatgtcaaagagaactatcttgaaacatttatttccagtccaaaatggagctttatattgtgtttgtcataaatctacgtattctcctctaccagatgactataattgcaacgtagagcttgctctgacttctgatggcaggacaatagtatgctaccacccttctgtggacattccatatgaacacacaaaacctatccctcggccagatcctgtgcataataatgaagaaacacatgatcaagtgctgaaaaccagattggaagaaaaagttgaacaccttgaggaaggacctatgatagaacaacttagcaaaatgttctttactactaagcaccgttggtatcctcatggacggtatcacagatgtcgtaagaatctgaatcctccaaaagacagatgatgcggaggttcctgggggaatcaaagagaaatgtgcctcatttgccatttgagaaaatgcagtctggtgtattcagtaatatatagtaaagtaataatgataaaatatcttttcatatattagaatgtgtacttttatataaagtaattctggatttgacattctcatttagagaaacctattttcttttttctttttctattttagtgtttcatttatgtgcggtctccaatttaggacttttccatagtgccaaagccatacatattcagtagaacatcaataaattacatcagaaattcaacactttattataaaacgggcttcgtgttagataattttgctaaacagtagg

SEQ ID NO: 18308 - DNA, 747 bp, Homo sapiens
  source 1..747: mol_type = unassigned DNA
cccgcccccctctcctcgctgcttaggctccgcggcctccaagctgtagctatgacggcgcgcgggactccgagccgcttcttggccagcgttctccacaacggactgggtcgctatgtgcagcagctgcagcgtctgagcttcagcgtcagccgcgacggcgcctcgtctcgcggcgccagggagttcgtggagcgggaggtgatcgacttcgcccgacggaatccaggggtcgtaatatatgtaaactcgcgtccgtgctgcgtgcccagagtagtggccgaataccttaacggggctgtgcgcgaggagagcatccactgcaagtcggtcgaggagatctcgacgctggtgcagaagctggccgaccagtcgggcttggacgtgatccgcatccgcaagcccttccacaccgacaaccctagcatccagggccagtggcaccccttcaccaacaagccgaccacgttccgcgggctacgcccccgagaggttcaggatcctgccccagcccaggacactggcctgagactgtctgcagttgcaccgcagatcctcctgcccggctggcccgacccaatatcagttcagtcatccgatcttccttggggaaatacccattaccgtcctgaacccttgtcatccactacttggctataagctccagaagtgacaagacacttcacatcttaaatatgtttcctagtttataattcatttgggcagtaaatgtttgttgagcactta

SEQ ID NO: 18309 - DNA, 2134 bp, Homo sapiens
  source 1..2134: mol_type = unassigned DNA
agtcccgcccccctctcctcgctgcttaggctccgcggcctccaagctgtagctatgacggcgcgcgggactccgagccgcttcttggccagcgttctccacaacggactgggtcgctatgtgcagcagctgcagcgtctgagcttcagcgtcagccgcgacggcgcctcgtctcgcggcgccagggagttcgtggagcgggaggtgatcgacttcgcccgacggaatccaggggtcgtaatatatgtaaactcgcgtccgtgctgcgtgcccagagtagtggccgaataccttaacggggctgtgcgcgaggagagcatccactgcaagtcggtcgaggagatctcgacgctggtgcagaagctggccgaccagtcgggcttggacgtgatccgcatccgcaagcccttccacaccgacaaccctagcatccagggccagtggcaccccttcaccaacaagccgaccacgttccgcgggctacgcccccgagaggttcaggatcctgccccagcccaggacactggcctgagactgtctgcagttgcaccgcagatcctcctgcccggctggcccgacccaccagacctccccacagtggatcctatctcatcctcattgacctctgctccagcccctatgctgtccgcagtttcttgcctcccgattgtccctgcactgaccactgtgtgctcagcgtgaaggctgcatagaagtgtgtacggcttgaggtttcagcatccaggctgcagaccccacgcagtgtctcatacagtggaatgtggcagatgagacgggctttcaggaaggaagtccacttcttctgcaggatcttcttccctcccaggtctccctggggaggtagaggcacgggataaggggccagggtcagaggtccagcctctatacccgtgccccaacgtcagcccaatccaccttgcagacacgagccacacgggccacacggtgactgctgcggctctgagtgaagctgccagagccctcctcagtggcacgctccgtgaagaagtagtacaccttgtcatcatcacccactgcactggccttgctctcccgcacgaggacggagaacacaaactccgcatctgtgggtcaggcagtttgagaggcttttgagacaggctggggattcctttccctcactctgaggctgacccctcacttgacaacacacaggaatggaatggacaggctcacctggggatttgggggtggggtggtcagctggccaagggagtaaaaatgaagaaatagtcccctaccccccatcatcctgtgcctcatcctcctaaccattgagccaatgcattggtgtctcctcagttctcagggagtgtgggtggcggctccggcggatgtcaggaatgctccggaattcatacctagtggctgtgtagaggcctccatctggcgtggggatattccaggcatgagagacatgtcatattcaacagggcacatgacatatacatggtggcaggtcctagagatgagatccacatcctaaaaataccatgtctgtgatagggaagaaggcctgctcaccaatgatgaggcctgtgaagccacgggctgggtcataaggacacttctccttcccctcctcgaagctggttggcaaggtgaaggcctcagcatcctagggaacaaggaaccagcagtaagtggttccgaagacaggcagggacagtggctcaaagtcagatcagtctggggtcagggatcagcgatcagggataggggcaggttgtatggcagatgcacctgacagcaataacttaagcatcccctgagaatgaccttatggcctcaaaacaatgtatgtttggagttccaaatctgcaagtggccaacctagagattcactccttatctatgaagaacatctgagcccctagcccatcctgtggaacacatgctgtccaggggatcaaggccctttgttttgggttaaatgaagtttgccaggtggaggtgattagggggaggatgctaagtgaaaatgctataaaaactgcatggtttttacaaaggggaatggttctccagtgcagcccgccgccactggagtgccctgtatggaagtccccttaataaaccatccgtctccttc

SEQ ID NO: 18310 - DNA, 1010 bp, Homo sapiens
  source 1..1010: mol_type = unassigned DNA
ccggaagcctcgaggtttagtcccgcccccctctcctcgctgcttaggctccgcggcctccaagctgtagctatgacggcgcgcgggactccgagccgcttcttggccagcgttctccacaacggactgggtcgctatgtgcagcagctgcagcgtctgagcttcagcgtcagccgcgacggcgcctcgtctcgcggcgccagggagttcgtggagcgggaggtgatcgacttcgcccgacggaatccaggggtcgtaatatatgtaaactcgcgtccgtgctgcgtgcccagagtagtggccgaataccttaacggggctgtgcgcgaggagagcatccactgcaagtcggtcgaggagatctcgacgctggtgcagaagctggccgaccagtcgggcttggacgtgatccgcatccgcaagcccttccacaccgacaaccctagcatccagggccagtggcaccccttcaccaacaagccgaccacgttccgcgggctacgcccccgagaggttcaggatcctgccccagcccaggtgcaagcacagtgaagagttgccccaccaactgcagccccaggctttggactgttactccggtaaaggtggttcttcccctttgggattccaagcccaggcaaatggaacccatcaatgggcaagttgacagaggttctgcttgggataatgaagagctgcctgtttctttccagtgcctgcttctgggggcagtgaccttgtgaaccactcatttttatgcaagtggcatccctaaaacctgagatgaggaagacttcaagggttttacagggcccttgttttttaaatccaaattgataataatgatctcaaaacacagtgagaggtctgaaggctggcttctgaagaatccctgatgtcttattggaacaaccactgagctacggagagctctgctgtgatgggctaggcactttatatctgtgtgaatacagatttataaaacaggttaataaacttatccaaggtca

SEQ ID NO: 18311 - DNA, 894 bp, Homo sapiens
  source 1..894: mol_type = unassigned DNA
ccggaagcctcgaggtttagtcccgcccccctctcctcgctgcttaggctccgcggcctccaagctgtagctatgacggcgcgcgggactccgagccgcttcttggccagcgttctccacaacggactgggtcgctatgtgcagcagctgcagcgtctgagcttcagcgtcagccgcgacggcgcctcgtctcgcggcgccagggagttcgtggagcgggaggtgatcgacttcgcccgacggaatccaggggtcgtaatatatgtaaactcgcgtccgtgctgcgtgcccagagtagtggccgaataccttaacggggctgtgcgcgaggagagcatccactgcaagtcggtcgaggagatctcgacgctggtgcagaagctggccgaccagtcgggcttggacgtgatccgcatccgcaagcccttccacaccgacaaccctagcatccagggccagtggcaccccttcaccaacaagccgaccacgttccgcgggctacgcccccgagaggttcaggatcctgccccagcccaggatgcggctgagttcctcggcgaaggagcagggccctgctggtactccattgttgctctgcctcagaagcacatagctattgccattcatcctccgcagccggctgggcagtgccaccaagccattggacactggcctgagactgtctgcagttgcaccgcagatcctcctgcccggctggcccgacccaatatcagttcagtcatccgatcttccttggggaaatacccattaccgtcctgaacccttgtcatccactacttggctataagctccagaagtgacaagacacttcacatcttaaatatgtttcctagtttataattcatttgggcagtaaatgtttgttgagcactt

SEQ ID NO: 18312 - DNA, 798 bp, Homo sapiens
  source 1..798: mol_type = unassigned DNA
ctcctcgctgcttaggctccgcggcctccaagctgtagctatgacggcgcgcgggactccgagccgcttcttggccagcgttctccacaacggactgggtcgctatgtgcagcagctgcagcgtctgagcttcagcgtcagccgcgacggcgcctcgtctcgcggcgccagggagttcgtggagcgggaggtgatcgacttcgcccgacggaatccaggggtcgtaatatatgtaaactcgcgtccgtgctgcgtgcccagagtagtggccgaataccttaacggggctgtgcgcgaggagagcatccactgcaagtcggtcgaggagatctcgacgctggtgcagaagctggccgaccagtcgggcttggacgtgatccgcatccgcaagcccttccacaccgacaaccctagcatccagggccagtggcaccccttcaccaacaagccgaccacgttccgcgggctacgcccccgagaggttcaggatcctgccccagcccagtgcctgcttctgggggcagtgaccttgtgaaccactcatttttatgcaagtggcatccctaaaacctgagatgaggaagacttcaagggttttacagggcccttgttttttaaatccaaattgataataatgatctcaaaacacagtgagaggtctgaaggctggcttctgaagaatccctgatgtcttattggaacaaccactgagctacggagagctctgctgtgatgggctaggcactttatatctgtgtgaatacagatttataaaacaggttaataaacttatccaag

SEQ ID NO: 18313 - DNA, 866 bp, Homo sapiens
  source 1..866: mol_type = unassigned DNA
ctcctcgctgcttaggctccgcggcctccaagctgtagctatgacggcgcgcgggactccgagccgcttcttggccagcgttctccacaacggactgggtcgctatgtgcagcagctgcagcgtctgagcttcagcgtcagccgcgacggcgcctcgtctcgcggcgccagggagttcgtggagcgggaggtgatcgacttcgcccgacggaatccaggggtcgtaatatatgtaaactcgcgtccgtgctgcgtgcccagagtagtggccgaataccttaacggggctgtgcgcgaggagagcatccactgcaagtcggtcgaggagatctcgacgctggtgcagaagctggccgaccagtcgggcttggacgtgatccgcatccgcaagcccttccacaccgacaaccctagcatccagggccagtggcaccccttcaccaacaagccgaccacgttccgcgggctacgcccccgagaggttcaggatcctgccccagcccaggtgcaagcacagtgaagagttgccccaccaactgcagccccaggctttggactgttactccgtgcctgcttctgggggcagtgaccttgtgaaccactcatttttatgcaagtggcatccctaaaacctgagatgaggaagacttcaagggttttacagggcccttgttttttaaatccaaattgataataatgatctcaaaacacagtgagaggtctgaaggctggcttctgaagaatccctgatgtcttattggaacaaccactgagctacggagagctctgctgtgatgggctaggcactttatatctgtgtgaatacagatttataaaacaggttaataaacttatccaaggtcaca

SEQ ID NO: 18314 - DNA, 824 bp, Homo sapiens
  source 1..824: mol_type = unassigned DNA
ccaagctgtagctatgacggcgcgcgggactccgagccgcttcttggccagcgttctccacaacggactgggtcgctatgtgcagcagctgcagcgtctgagcttcagcgtcagccgcgacggcgcctcgtctcgcggcgccagggagttcgtggagcgggaggtgatcgacttcgcccgacggaatccaggggtcgtaatatatgtaaactcgcgtccgtgctgcgtgcccagagtagtggccgaataccttaacggggctgtgcgcgaggagagcatccactgcaagtcggtcgaggagatctcgacgctggtgcagaagctggccgaccagtcgggcttggacgtgatccgcatccgcaagcccttccacaccgacaaccctagcatccagggccagtggcaccccttcaccaacaagccgaccacgttccgcgggctacgcccccgagaggttcaggatcctgccccagcccaggacactggcctgagactgtctgcagttgcaccgcagatcctcctgcccggctggcccgacccaacacgagccacacgggccacacggtgactgctgcggctctgagtgaagctgccagagccctcctcagtggcacgctccgtgaagaagtagtacaccttgtcatcatcacccactgcactggccttgctctcccgcacgaggacggagaacacaaactccgcatctgtgggtcaggcagtttgagaggcttttgagacaggctggggattcctttccctcactctgaggctgacccctcacttgacaacacacaggaatggaatggacaggctcacctggggat

SEQ ID NO: 18315 - DNA, 884 bp, Homo sapiens
  source 1..884: mol_type = unassigned DNA
agtcccgcccccctctcctcgctgcttaggctccgcggcctccaagctgtagctatgacggcgcgcgggactccgagccgcttcttggccagcgttctccacaacggactgggtcgctatgtgcagcagctgcagcgtctgagcttcagcgtcagccgcgacggcgcctcgtctcgcggcgccagggagttcgtggagcgggaggtgatcgacttcgcccgacggaatccaggggtcgtaatatatgtaaactcgcgtccgtgctgcgtgcccagagtagtggccgaataccttaacggggctgtgcgcgaggagagcatccactgcaagtcggtcgaggagatctcgacgctggtgcagaagctggccgaccagtcgggcttggacgtgatccgcatccgcaagcccttccacaccgacaaccctagcatccagggccagtggcaccccttcaccaacaagccgaccacgttccgcgggctacgcccccgagaggttcaggatcctgccccagcccaggatgcggctgagttcctcggcgaaggagcagggccctgctggtactccattgttgctctgcctcagaagcacatagctattgccattcatcctccgcagccggctgggcagtgccaccaagccattggacactggcctgagactgtctgcagttgcaccgcagatcctcctgcccggctggcccgacccaccagacctccccacagtggatcctatctcatcctcattgacctctgctccagcccctatgctgtccgcagtttcttgcctcccgattgtccctgcactgaccactgtgtgctcagcgtgaaggctgcatagaagtgtgtacggcttgaggtttcagcatccaggctgcagacccc

SEQ ID NO: 18316 - DNA, 727 bp, Homo sapiens
  source 1..727: mol_type = unassigned DNA
gcgggactccgagccgcttcttggccagcgttctccacaacggactgggtcgctatgtgcagcagctgcagcgtctgagcttcagcgtcagccgcgacggcgcctcgtctcgcggcgccagggagttcgtggagcgggaggtgatcgacttcgcccgacggaatccaggggtcgtaatatatgtaaactcgcgtccgtgctgcgtgcccagagtagtggccgaataccttaacggggctgtgcgcgaggagagcatccactgcaagtcggtcgaggagatctcgacgctggtgcagaagctggccgaccagtcgggcttggacgtgatccgcatccgcaagcccttccacaccgacaaccctagcatccagggccagtggcaccccttcaccaacaagccgaccacgttccgcgggctacgcccccgagaggttcaggatcctgccccagcccaggatgcggctgagttcctcggcgaaggagcagggccctgctggacactggcctgagactgtctgcagttgcaccgcagatcctcctgcccggctggcccgacccaatatcagttcagtcatccgatcttccttggggaaatacccattaccgtcctgaacccttgtcatccactacttggctataagctccagaagtgacaagacacttcacatcttaaatatgtttcctagtttataattcatttgggcagtaaatgtttgttgagcactta

SEQ ID NO: 18317 - DNA, 1748 bp, Homo sapiens
  source 1..1748: mol_type = unassigned DNA
ggggaagtgtgttacggggacactggcccgactactttcgttccgtcttccatcgttttctctcgtgcaatggcgtccgggctggtaagattgctgcagcagggacatcgctgcctcctggctccagtcgcccccaagctggtccctccggttcggggagtgaagaagggattccgcgccgccttccgcttccagaaggagttagagcggcagcgccttctgcggtgcccgccgccgcccgtgcgccgttcagagaagccgaactgggattaccatgcagaaatacaagcttttggacatcggttacaggaaaacttttccttagatcttctcaaaactgcatttgttaatagctgctatattaaaagtgaggaggccaaacgccaacaacttgggatagagaaagaagctgttcttctgaatcttaaaagtaatcaagaactatccgaacaagggacatctttttcacagacttgccttacacagtttcttgaagacgagtacccagacatgcccactgaaggcataaaaaatcttgttgactttctcactggtgaggaagtcgtgtgtcacgtggctagaaacttggctgtggagcagttaacactgagtgaagaattcccagtgcccccagctgtgttacagcagactttctttgcagttattggagccctgttacagagcagtggacctgagaggactgcacttttcatcagggacttcttaattactcaaatgactggaaaagagctctttgagatgtggaagataataaatcccatggggctattggtagaagaactgaagaaaaggaatgtttcagctcctgaatcaagacttactaggcagtctggtggcaccacagctttgcctttgtattttgttggcttatactgtgataaaaagttgattgcagaaggacctggggaaacagtattggttgcagaagaagaggctgctcgagtggcccttagaaaactttatggattcacagaaaatagacggccgtggaactattccaagcccaaagaaaccttgagagcagaaaagagcatcactgccagctagccgccatggatgcagcagcctgaaacttgagagcgaaagtgagataaatgtcaaaggtgtttcaagccagacattttcacaattgtgaagaaatagatgttttgtttctgttttttactgtgttcccaaaattaaataagtgttaaccaagtcacagtgtttttggttttgtttttctgaaatcttggtttgatcaaatctttttttttttctcttgagatggagtcttactctgtcgcccaggctggactgcagtggtgcgatctcggctcactgcaacctccacctcacaggttcaagcgattctcgtggctcagcctccctagtagctgggattacaggcacacaccaccatacctggctaatttttgtatttttggtagacatggggtttcaccaagttggctaggctagtcttgaactcctgacctcaggtgatccacccgccttggcctcccaaagtgctgggattacaggtgtgagccactatacccgaccagatcaaatctttttttgacatttttgcaaaaaaattttcctaatgttcttgatttaattgtatagaatttgtataattaggtgtattttatttgcgtctagctttgaggtatcataatttatgtatcttatgtgaattttttgctgtaataccaataaagttttttttctccacatgttaa

SEQ ID NO: 18318 - DNA, 1704 bp, Homo sapiens
  source 1..1704: mol_type = unassigned DNA
actcccgcgagcacgtgcgcgtcctcgctgctcacatttcggcggagggcgcgctccctggaaaattccactcctgtgctagctccaccctatgcggcttttctcctacccgacgctcttcactctcagctcccttcccggcggcctttgcgggaacaagatggcagcccccatacctcaagggttctcttgtttatcgaggtttttgggctggtggtttcggcagccagttctggtgactcagtccgcagctatagttccagtaagaactaaaaaacgtttcacacctcctatttatcaacctaaatttaaaacagaaaaggagtttatgcaacatgcccggaaagcaggattggttattcctccagaaaaatcggaccgttccatacatctggcctgtacagctggtatatttgatgcctatgttcctcctgagggtgatgcacgcatatcatctctttcaaaggagggactgatagagagaactgaacgaatgaagaagactatggcatcacaagtgtcaatccggaggataaaagactatgatgccaactttaaaataaaggacttccctgaaaaagctaaggatatctttattgaagctcacctttgtctaaataactcagaccatgaccgacttcataccttggtaactgaacactgttttccagacatgacttgggacatcaaatataagaccgtccgctggagctttgtggaatctttagagccctctcatgttgttcaagttcgctgttcaagtatgatgaaccagggcaacgtgtacggccagatcaccgtacgcatgcacacccggcagactctggccatctatgaccggtttggccggttgatgtatggacaggaagatgtacccaaggatgtcctggagtatgttgtattcgaaaagcagttgacaaacccctatggaagctggagaatgcataccaagatcgttcccccatgggcaccccctaagcagcccatccttaagacggtgatgatccctggccctcagctgaaaccagaagaagaatatgaagaggcacaaggagaggcccagaagcctcagctagcctgatgacaaaaatgacttctagggtgaagcctgggtgatgaggctgctggaagctttgaagtctcccattcccctcatgctataaaaagaactacctttgttctctcccatcctgctcaggtcttttcagcagtctcatcatcagcaaccatgactgatgactgggccctagcaggtggcaggtataacatggccatggacactcttcttttttaaattttatgtctagcttctgagtctagatgaaagacagtatgtttcagagaacattggatatcagtttttcccacagcagggactgtgagagacaaccagcagcatcctctttgtaatcacagggcagggatcagagtttgaaatgaaatgttgtcagggtgttggaaaaattttggtgagttctgcacatttcccctggttcaggctgggcatggaccagccttcagatggcagaagtggaagatgagcctacttgtgagcgatgtgactttaaggaaatgaagactggggaagaataattagtgtttataagacatttaagaggccctttttcatatactgactcactgatgaatcagcatttgcattttatggaaaaatataaatccaaagaaataatttatccctta

SEQ ID NO: 18319 - DNA, 1126 bp, Homo sapiens
  source 1..1126: mol_type = unassigned DNA
ccagttatgcgaaaacatggctgcggccggtttggcccttctttgtaggagagtttcatccgccctgaaatcttcccgatcgttaataactcctcaggtccctgcctgcacaggattacttcataccacattgtcaaggaaaggactagaagaattttttgatgacccaaaaaactgggggcaagaaaaagtaaaatctggagcagcatggacctgtcagcaactaaggaacaaaagtaatgaagatttacacaaactttggtatgtcttactgaaagaaagaaacatgcttctaaccctagagcaggaggccaagcggcagagattgccaatgccaagtccagagcggttagataaggtagtagattccatggatgcattagataaagttgtccaggaaagagaagatgccctaaggcttcttcagactggtcaagaaagagctagacctggtgcttggagaagagacatctttggaagaatcatctggcacaagttcaagcagtgggttataccttggcacctaaataaaagatacaataggaaacgattctttgccttgccttatgtggaccattttctcagactggaacgtgagaaacgagcccgcatcaaagcacggaaggaaaatttagagagaaagaaagcaaaaattcttttaaaaaagtttccacatcttgctgaagcccaaaagtcaagtcttgtctaagatgtctgaactattaaatttaccattttgtttttcttgaatagtctgtgtacaggagtaaatatgttaagtggtttataaagaaattctgtttttagtcaagtgactttactaatcagttgttctaagtgtgaatatggcatgctaattagctaatttggtagaagctaatttgcttctaaaaatcaggtataaagttcagatgagattcccactttataaattctgacatttaagcaggctttaaatgtcacctgctaccttagagtgtgaaggtgatggtaactgccacagcaaaggcaataccgtagtttttgaatttgaataatagttttacctctgttgttaataggctatgaagaggatgtgggtattgctgttaataaacggaggactttgattcaaaataatgagaaa

SEQ ID NO: 18320 - DNA, 673 bp, Homo sapiens
  source 1..673: mol_type = unassigned DNA
cgcgttttgccagttatgcgaaaacatggctgcggccggtttggcccttctttgtaggagagtttcatccgccctgaaatcttcccgatcgttaataactcctcaggtccctgcctgcacagggagcagcatggacctgtcagcaactaaggaacaaaagtaatgaagatttacacaaactttggtatgtcttactgaaagaaagaaacatgcttctaaccctagagcaggaggccaagcggcagagattgccaatgccaagtccagagcggttagataaggtagtagattccatggatgcattagataaagttgtccaggaaagagaagatgccctaaggcttcttcagactggtcaagaaagagctagacctggtgcttggagaagagacatctttggaagaatcatctggcacaagttcaagcagtgggttataccttggcacctaaataaaagatacaataggaaacgattctttgccttgccttatgtggaccattttctcagactggaacgtgagaaacgagcccgcatcaaagcacggaaggaaaatttagagagaaagaaagcaaaaattcttttaaaaaagtttccacatcttgctgaagcccaaaagtcaagtcttgtctaagatgtctgaactattaaatttaccattttgtttttcttgaa

SEQ ID NO: 18321 - DNA, 1370 bp, Homo sapiens
  source 1..1370: mol_type = unassigned DNA
ggaaacgcgttttgccagttatgcgaaaacatggctgcggccggtttggcccttctttgtaggagagtttcatccgccctgaaatcttcccgatcgttaataactcctcaggtccctgcctgcacagggttttttcttagtttgttgcctaagagtacaccaaatgtgacatcctttcaccaatatagattacttcataccacattgtcaaggaaaggactagaagaattttttgatgacccaaaaaactgggggcaagaaaaagtaaaatctggagcagcatggacctgtcagcaactaaggaacaaaagtaatgaagatttacacaaactttggtatgtcttactgaaagaaagaaacatgcttctaaccctagagcaggaggccaagcggcagagattgccaatgccaagtccagagcggttagataaggtagtagattccatggatgcattagataaagttgtccaggaaagagaagatgccctaaggcttcttcagactggtcaagaaagagctagacctggtgcttggagaagagacatctttggaagaatcatctggcacaagttcaagcagtgggttataccttggcacctaaataaaagatacaataggaaacgattctttgccttgccttatgtggaccattttctcagactggaacgtgagaaacgagcccgcatcaaagcacggaaggaaaatttagagagaaagaaagcaaaaattcttttaaaaaagtttccacatcttgctgaagcccaaaagtcaagtcttgtctaagatgtctgaactattaaatttaccattttgtttttcttgaatagtctgtgtacaggagtaaatatgttaagtggtttataaagaaattctgtttttagtcaagtgactttactaatcagttgttctaagtgtgaatatggcatgctaattagctaatttggtagaagctaatttgcttctaaaaatcaggtataaagttcagatgagattcccactttataaattctgacatttaagcaggctttaaatgtcacctgctaccttagagtgtgaaggtgatggtaactgccacagcaaaggcaataccgtagtttttgaatttgaataatagttttacctctgttgttaataggctatgaagaggatgtgggtattgctgttaataaacggaggactttgattcaaaataatgagaaatacatttagtccttaaagtagtaatcacagtgcacaacagtccaaaatatatttctggaatggctaatttttatttaattctgtaagcctaaggtaaaaagcataggcagtaacttttactagtcaataaaaagcagttctaccaatccactggtaattaatacactaaa

SEQ ID NO: 18322 - DNA, 1536 bp, Homo sapiens
  source 1..1536: mol_type = unassigned DNA
aggccgaggcgggcggatcacctgaggtcgggagttcaagaccagcctgacaaacatggagaaacctcatctctagtaaaaatataaaaattaggcgggcgtggtggcgggcacctgtaatcccagctacttggagacagaattgcttgaacccgagaggcggaggtggcagtgagctgagatcgtgccactacactccagcctgcgcaacagagcgagactccgtctcaaacaaacaaaaaagtcagatctgtgctagacgctgaaaggaattaatcagacaggatctcagtcttttaagaactttcaaatacagagaagaggtggtaacaaatcattagtgtataatattgtaagcgaaaaattagaattgtgtgctaagtactggggtaacacagagatggtaattaattctttctggagaaacagcagtgaatgtgacaacctgagtgagggtggaaagcaggagaatttctagactctgaatttcagaagcttccggaactaaaatgatgtggaagttgagtgagtctcggtgggatattgctgctgcacctggtcaaggccgttccttcagtgttttcagacgccctgggaacgcggctgcagggtccggtcttcggtttgcacagctagaggccgcgcagcagcaaaggatgagcggaaccttggaaaaggtgctgtgcctgaggaacaataccatttttaagcaagccttttctctcttaaggtttagaacttcaggagagaagcccatctattctgtaggtggaattctactaagtatcagtcggccctacaagacaaagcccacccacggcattggaaagtacaagcacttaattaaagcagaagagcccaagaagaagaagggaaaagtggaagtgagagccattaatttggggacagattatgaatatggggttttaaatattcatctgactgcatatgatatgaccctggcagagagttatgcccagtatgttcacaacctctgcaactctctctccattaaagtcgaggaaagttatgcaatgccaaccaaaaccatagaagtgttgcagttgcaggaccaaggcagcaaaatgctcctggactcagtgcttaccacccatgagcgagtggttcagatcagcggtttgagtgctacgtttgcagaaattttcttggaaataatccaaagcagtcttcctgaaggagtcagactgtcagtgaaggagcacactgaagaagacttcaagggacgattcaaagctcgaccagaactggaagaactgttggccaagttgaagtagctactgtagaccctttcatgccagcagtggtcatattgagtgccaaagagaagagcttactgggtagttagagttcatcaggagacccaacccttagatttcataagtacccattcccatagccagtaatgtcctcactcctctgtggcttggctgtacttgccatttcttaccacttacctatgaggtaatgcttgttatcttccatctaataaaaatctgctgcagatgtgtatatgta

SEQ ID NO: 18323 - DNA, 1560 bp, Homo sapiens
  source 1..1560: mol_type = unassigned DNA
tggtcaaggccgttccttcagtgttttcagacgccctgggaacgcggctgcagggtccggtcttcggtttgcacagctagaggccgcgcagcagcaaaggatgagcggaaccttggaaaaggtgctgtgcctgaggaacaataccatttttaagcaagccttttctctcttaaggtttagaacttcaggagagaagcccatctattctgtagatgggactgtctagttgcaggaaaacaagctcagggcttccactgattctacattatggtggaattctactaagtatcagtcggccctacaagacaaagcccacccacggcattggaaagtacaagcacttaattaaagcagaagagcccaagaagaagaagggaaaagtggaagtgagagccattaatttggggacagattatgaatatggggttttaaatattcatctgactgcatatgatatgaccctggcagagagttatgcccagtatgttcacaacctctgcaactctctctccattaaagtcgaggaaagttatgcaatgccaaccaaaaccatagaagtgttgcagttgcaggaccaaggcagcaaaatgctcctggactcagtgcttaccacccatgagcgagtggttcagatcagcggtttgagtgctacgtttgcagaaattttcttggaaataatccaaagcagtcttcctgaaggagtcagactgtcagtgaaggagcacactgaagaagacttcaagggacgattcaaagctcgaccagaactggaagaactgttggccaagttgaagtagctactgtagaccctttcatgccagcagtggtcatattgagtgccaaagagaagagcttactgggtagttagagttcatcaggagacccaacccttagatttcataagtacccattcccatagccagtaatgtcctcactcctctgtggcttggctgtacttgccatttcttaccacttacctatgaggtaatgcttgttatcttccatctaataaaaatctgctgcagatgtgtatatgtatgtgtgtgtgagagagagaaattggcccatcctgtggagtatctttaagagattctatattctggccaggcaccgtggtgcatccctgtaatcccagcactttgcgaggccgaggcaggaggactgctcgaggccaggagcttgagaccagcctggcaacattctgtctttaccaaaaacattcttttttttttttccgaaacggagtctcgctctgttgcccaggctggagtgcagtggcacgatctagactcactgcaagctctgcctcccgggttcacaccattctcctgcctcagcctcccaagtagctgggactgcaggcgcccgccaccacacctggctaattttttgtatttttagtagagacggggttttaccatgttagccaagatggtctcgatctcctgacctcgtgatccgccagccttggcctcccaaagtgctgggattacaggtgtgagccactgcacccagccaaactttttattttaattagctggacgtggtggtatgcacttg

SEQ ID NO: 18324 - DNA, 2019 bp, Homo sapiens
  source 1..2019: mol_type = unassigned DNA
gctggcgtagcaggtaaagatggcagctaccatgttccgggctacgctgcggggatggagaaccggtgtccagcggggctgcgggctacggctgttgagccagacccagggccctccagattaccccaggtttgtggagtctgtggatgaatatcagtttgtggagcgcctgttaccggctaccaggatcccagatcccccaaagcatgaacattatcctacccctagtggctggcagcctcccagagaccccccacccaacctgccttactttgtacgacgctctcggatgcacaacatccccgtctacaaggacatcacgcatggcaaccggcagatgactgtgatccggaaagtggaaggggacatctgggccctgcagaaagacgtggaagattttctgagcccgctgctggggaagacacctgtcacccaggtcaatgaggtgacaggtaccctacggatcaagggctactttgaccaggagcttaaagcctggctcttggagaaaggcttctgaggcccagccgagcagcctgcttgtcagcatgccctgtggatcaagtctagggggcctcaggaggagggaggtgggtgttggagcccctgagacaggggatacagaaactagggctaaaggactttggggtcaggccttgcttgcataaaggagaaaacaactctatgtacatgctgggggagagtgcctaatgtgggagaccaaatagggatcaccaggctaatggggggcgtcagcagctttctctccctcctatcttggcctgttcttttttgttttttgagacggagtctcactctgttgcccagggtggagtgcagtggcatgatcttggctcactgcaacttccacctctgggatcaagggattctcctgcctcagcctcttgagtagctgggattacaggcgcccaccaccacagcctgctaatttttgtatttttagtagagatggggtttcaccatgttggccaggctggtctcaaactcctgactcgaagtgatccgcccaccttggcctcccaaagcgttgggattataggcatgagccatgtgcctggtccaccttggcctgttttgtttttctttccttgggctcagcaattcaaattctagttgttatttggtggaagcagtagcccaaccccagtttaggggaaggtagcacagggcagagccactgggcactttgtttccttggccctccgaagctcactgttgcaaatacccccaagcctttgctctaggccagatcttgtttggtgcaggtgatggagaacacagatgactcgggcatgggtcttggagatcttctgttcaaagtacagtgctggcactggggcacagagtgcccacgttagccccgggctctgatagagaggtaggaggcacgttcttggtcactgttccattgcagaccagacttgctggcctgaccacaagggagtggctgggaactcacagccagcatagggacatccccctgcagccttctgacctgcaatcaaggctggggaggggtttgcaggcaggaatatgctgacctttcaccctgccatcccatcccaaccccagctcactagccttcatatatgccttatacttggagtcacaggggccaaaggcctgagaccccaccctgcccccaaactggctaagacagctttcagttcctgactccccaacttggtctctgccctgaagcagggcactgaactctgggctgcttctctgtgtgtaaaatgggcacatcttcctaatctgttaatggtcagtggtgtccccaaggatagtgctggcttccatggaaaccctcactcctggagattccattccattttcaagtgtacagccacagcaaggagcccgacactgatttgatcgattctgtgacacaaaccccaccaattgttaatgcaagtttttatttggctgtatatacaatttaagctattaaaatttgtacaatatttacaaattaaataatcatctgaaactgtc

SEQ ID NO: 18325 - DNA, 1906 bp, Homo sapiens
  source 1..1906: mol_type = unassigned DNA
gcacagaaggctggcgtagcaggtaaagatggcagctaccatgttccgggctacgctgcggggatggagaaccggtgtccagcggggctgcgggctacggctgttgagccagacccagggccctccagattaccccaggtttgtggagtctgtggatgaatatcagtttgtggagcgcctgttaccggctaccaggatcccagatcccccaaagcatgaacattatcctacccctagtggctggcagcctcccagagaccccccacccaacctgccttactttgtacgacgctctcggatgcacaacatccccgtctacaaggacatcacgcatggcaaccggcagatgactgtgatccggaaagtggaaggggacatctgggccctgcagaaagacgtggaagattttctgagcccgctgctggggaagacacctgtcacccaggtcaatgaggtgacaggtaccctacggatcaagggctactttgaccaggagcttaaagcctggctcttggagaaaggcttctgaggcccagccgagcagcctgcttgtcagcatgccctgtggatcaagtctagggggcctcaggaggagggagtgcctaatgtgggagaccaaatagggatcaccaggctaatggggggcgtcagcagctttctctccctcctatcttggcctgttcttttttgttttttgagacggagtctcactctgttgcccagggtggagtgcagtggcatgatcttggctcactgcaacttccacctctgggatcaagggattctcctgcctcagcctcttgagtagctgggattacaggcgcccaccaccacagcctgctaatttttgtatttttagtagagatggggtttcaccatgttggccaggctggtctcaaactcctgactcgaagtgatccgcccaccttggcctcccaaagcgttgggattataggcatgagccatgtgcctggtccaccttggcctgttttgtttttctttccttgggctcagcaattcaaattctagttgttatttggtggaagcagtagcccaaccccagtttaggggaaggtagcacagggcagagccactgggcactttgtttccttggccctccgaagctcactgttgcaaatacccccaagcctttgctctaggccagatcttgtttggtgcaggtgatggagaacacagatgactcgggcatgggtcttggagatcttctgttcaaagtacagtgctggcactggggcacagagtgcccacgttagccccgggctctgatagagaggtaggaggcacgttcttggtcactgttccattgcagaccagacttgctggcctgaccacaagggagtggctgggaactcacagccagcatagggacatccccctgcagccttctgacctgcaatcaaggctggggaggggtttgcaggcaggaatatgctgacctttcaccctgccatcccatcccaaccccagctcactagccttcatatatgccttatacttggagtcacaggggccaaaggcctgagaccccaccctgcccccaaactggctaagacagctttcagttcctgactccccaacttggtctctgccctgaagcagggcactgaactctgggctgcttctctgtgtgtaaaatgggcacatcttcctaatctgttaatggtcagtggtgtccccaaggatagtgctggcttccatggaaaccctcactcctggagattccattccattttcaagtgtacagccacagcaaggagcccgacactgatttgatcgattctgtgacacaaaccccaccaattgttaatgcaagtttttatttggctgtatatacaatttaagctattaaaatttgtacaatatttacaaattaaataatcatctg

SEQ ID NO: 18326 - DNA, 3332 bp, Homo sapiens
  source 1..3332: mol_type = unassigned DNA
aggcccgtggatctcatcgaagatggcggcgcgatctgtgtcgggcattaccagaagagtcttcatgtggacagtctcagggacaccatgtagagaattttggtctcgattcagaaaagagaaagagccagtggttgttgagacagtagaagagaaaaaggaacctatcctagtgtgtccacctttacgaagccgagcatacacaccacctgaagatctccagagtcgtttggaatcttacgttaaagaagtttttggttcatctcttcctagtaattggcaagacatctccctggaagatagtcgtctaaagttcaatcttctggctcatttagctgatgacttgggtcatgtagtccctaactccagactccaccagatgtgcagggttagagatgttcttgatttctataatgtccctattcaagatagatctaaatttgatgaactcagtgccagtaatctgccccccaatttgaaaatcacttggagttactaagcaattcggaagagaaacacattgaaatcactgtctttccctgagcaagggggctgctcattagatcttttgatactttaccatgtgaaatactaccagaactgttctctaaacccactttttctgtagaggaatgtatcatctttttttttctcatattacaaatggacaaataacggactttctattttcatatttgctgaaaccattttttaaatgaaattaggtcattatttatgaaaagttttgagagggcactgtcaacttgggtttaagacaggaggacattgcaagttcacacctttcataagcataaagtagttgcaagaaagtattttcatcctgttaggattcatatctaagatagagttatgcattgcacatacacaaataaacttttattagatagatacctataaaagaaacataaaagtatgttgtgtattactgacagttctagattaatttcttttagaattaaagtagatttgttaaagtgtattgtgtgttgtaaattttttaagtgaaatttgcttgcgctctgccttgccatttctttccagtaagtataattttgaaaaaattagaatatatgccaaatattgagtgctgtgactcttcctcataagagatgtgccagattctatgtctaattgcatattctcttcagaggagatgatgcttattttaaacctttttctctataacttttaaaaagtggtgctgagtattcactagagtggcaagtctttgtgctttaatgcactcaatttgtggaaattacttaaatagcaggttatcagatggttctgaatgacaaaggtgttaaatttgggatttttttttcaagctttagatatggctggagagtaatgagacagaaggaatgtcttatattgttctgactgctgacaattcctaaagaaaagtgatagaagggtttttaacaaaataagttgcatttattctctttcccagggttactcctttgaagagggcaaaattcagttgggaatataaattctggaatcttcatgaagaaaattagttaacagtatagacatgccctacaaatatcatccacaggcacttcattcaagaacttcaggtgtcagagtgcctggagctctggagcttagacattagagttgattccttggggattggttccaggacacctacttggataccaaagtccacagatgcccaagccccttttataaaatgatgtagtatttgcatattatgtatgcacatcctcccatatactttaaatcatctttagattacttatactgaatagaatgtaaatagtatttacaattgtgaatacaatgtatttagttatgtaaatatgtaaattttaaagttatgtaaatatgtagctatgtaaatagctataaaataatatttacaattgtgaatagtatgtaaatagttgtgaacataactattgtgaataatatgttatatgttatagttgtgaatgtaaatagtattcacaattgtgaatacaatgtaaatagctttcacaattgtgaatacaatgtaagtagctatgtaaatagtgaatacaatgtaaatagctatgtaaatagttgttatgctgattagggaataatgagaaggaaaaaaagtatacatattcagtacagatgcagtcatctttttttcccctcgaacatttttgatccacaattggttgaatccacagatggggaacacacagtcttggtaaatttaaccaacaaggagggtaaacgcatcccaacagggaaggtaaactgcacatccatcagtacctctagagggcatcactggtttatagctcaatacagtgactatatcagaataatggcctttagttttcctgaaagattaaattaggcttgctgttgttgaatgagataatcaaacatatgatgtaattttaaagggtttacatacagaaggcctgctgtatgtcctgcttctgctgtgtaaaagattcagcatggaatcattggaattttatgtacaggatttcattatctcattttctatacaatttttccttctgatccagagacacggaaaaacaaagggcaagatggaaataagggatgagaaggtctatgtggaaaaacagttacaactggagtggtaactgcaaaaaccaagcagcttcatgtgatcgttaggacagaagaaatttctcctttgtagcctagagcaatattctcaaaatttaatgcgcatgttaatcatttggggatcttttattcattttttcatgtggggatcttttaaaaatgcaaattctgatttggtaagtctggagtaggtcctgagcttctgcatgcttcaaaagctgattatgttttgagaacatggatctagatgctggtattgaggtgggagacaagtactgccacctgaaacaacagtcttggtaaatttagccgacgagggtaaacacatcctaacagggaaggtaaactgtacgtccatcagtaccactagagggcatcactggtttatagttcaatacagtgaatatatcagaataatggcctttagttttcctgaaagattaaattaggcttgctaacttgtttaatgagataatcagacatatgatgtaattttaaagggtttacatttttaaaaatttaatgattgctacataaaaagggtatcagttaactaattttacttagatggaacttctgtaagcttagtaggtatgcttaaataaagcctgctaataaaatagagattcagactcaatagaatggttttacatatgtaatatatgttttaaactgcataaaataaactcctccctcctttc

SEQ ID NO: 18327 - DNA, 1026 bp, Homo sapiens
  source 1..1026: mol_type = unassigned DNA
atctcatcgaagatggcggcgcgatctgtgtcgggcattaccagaagagtcttcatgtggacagtctcagggacaccatgtagagaattttggtctcgattcagaaaagagaaagagccagtggttgttgagacagtagaagagaaaaaggaacctatcctagtgtgtccacctttacgaagccgagcatacacaccacctgaagatctccagagtcgtttggaatcttacgttaaagaagtttttggttcatctcttcctagtaattggcaagacatctccctggaagatagtcgtctaaagttcaatcttctggctcatttagctgatgacttgggtcatgtagtccctaactccagactccaccagatgtgcaggggttactcctttgaagagggcaaaattcagttgggaatataaattctggaatcttcatgaagaaaattagttaacagtatagacatgccctacaaatatcatccacaggcacttcattcaagaacttcaggtgtcagagtgcctggagctctggagcttagacattagagttgattccttggggattggttccaggacacctacttggataccaaagtccacagatgcccaagccccttttataaaatgatgtagtatttgcatattatgtatgcacatcctcccatatactttaaatcatctttagattacttatactgaatagaatgtaaatagtatttacaattgtgaatacaatgtatttagttatgtaaatatgtaaattttaaagttatgtaaatatgtagctatgtaaatagctataaaataatatttacaattgtgaatagtatgtaaatagttgtgaacataactattgtgaataatatgttatatgttatagttgtgaatgtaaatagtattcacaattgtgaatacaatgtaaatagctttcacaattgtgaatacaatgtaagtagctatgtaaatagtgaatacaatgtaaatagctatgtaaatagttgttatgctgattagggaataatgaga

SEQ ID NO: 18328 - DNA, 1136 bp, Homo sapiens
  source 1..1136: mol_type = unassigned DNA
gtaaaataggggtaataaaaacagctacagcggaagactgttgtgaggcacagagaaagggcttggtcattggaagcgggttccaggttctcaaccttcatttccttcacggttgaaggacgccaaagaaagcggaaagggtgaattttcttgaaatctcagttttggggaatcttagcgacgagtcgcggacctcagcttgtccggcgctccaaaacttccggcaggcggaccggaagcactgaggcgggaagggtggtagaggcccctcctgccggaacccggggggcggggctcgtggctgttgcggatggggcgtaggtgggcggtgcgcccacagctgcctgggtaaggcccaagatggctgtcttcgccttagtactcgtgtgaagttggcggggacggttcctgtcatcttcttgggcttatttggtgtgctgttgaaggggggagactagagaaatggcagggaacctcttatccggggcaggtaggcgcctgtgggactgggtgcctctggcgtgcagaagcttctctcttggtgtgcctagattgatcggtataaggctcactctcccgccccccaaagtggttgatcgttggaacgagaaaagggccatgttcggagtgtatgacaacatcgggatcctgggaaactttgaaaagcaccccaaagaactgatcagggggcccatatggcttcgaggttggaaagggaatgaattgcaacgttgtatccgaaagaggaaaatggttggaagtagaatgttcgctgatgacctgcacaaccttaataaacgcatccgctatctctacaaacactttaaccgacatgggaagtttcgatagaagagaaagctgagaacttcggaaaaggctcatctgtcaccctggagaagggaaactgtacttttccctgtgaggaaacggctttgtattttctctgtaataaaatggggcttctttggaatttgatagccacatacttttgttttcctctagatgctgcctctactcatgtagactatgaagtcttgactcatcctagatcttaggatcttaggtttgggcttcacaccacttgccttttacagtctagctatacctaattcctttaaaaagaaaagttggtgaga

SEQ ID NO: 18329 - DNA, 1118 bp, Homo sapiens
  source 1..1118: mol_type = unassigned DNA
ttccggctaccccggctactcctgctcagcatggctgctttagggactgttctcttcacaggtgtccggaggctgcactgcagcgtagccgcttgggcgggcggccagtggcgactacagcagggactggctgccaacccctccggctacgggccccttaccgagctcccagactggtcatatgcggatggccgccctgctcccccaatgaaaggccagcttcgaagaaaagctgaaagggagacgtttgcaagacgagttgtactgctgtcacaggaaatggacgctggattacaagcatggcagctcaggcagcagaagttgcaggaagaacaaaggaagcaggaaaatgctcttaaacccaaaggggcttcactgaagagcccacttccaagtcaataaaaagcaactcctgcctcccttcctcaccctgtctctggatttcttttctatcacctagatgcttcatccagccagaagatagccttcacgttccccatctgtcttcagagaaaaagagctgggacaccaagaacaagctgttagatcactgcctgggaggcttggcttagtactctcatctctggttccattccagttcagctaagtcttgctttaaaatttttacctcctagctgggtgcggtggctcacgcctgtaatcccagcactttgggaggctgaggcgggcagatcacaagatcaggagttcgagaccagcctggccaacccagcctggtcaacatggtgaaaccctgtccctactaaagatacaaacaattagccgggcgtggtggggtgcgcttgtaatcccagctactcaggaggctgaggcaggagaatcgcttaaactcgggaggtagaggttgcagtgagccaaggtcacaccattgcactccaacctgggcgacagggcgagactccgtctcaaaaaaaaaaaaaaatttacctcctttgcaggccataggactagcccaactatgagaaatagctgttctgtgaacgtgaaaaggggacagcagttttcccagttttggccaggcagtcaagcctttaacagctcatgcacagtttaggccatgtacagctggcatctaataaatgttttcatgaaaaaga

SEQ ID NO: 18330 - DNA, 1111 bp, Homo sapiens
  source 1..1111: mol_type = unassigned DNA
ggctaccccggctactcctgctcagcatggctgctttagggactgttctcttcagtgtccggaggctgcactgcagcgtagccgcttgggcgggcggccagtggcgactacagcagggactggctgccaacccctccggctacgggccccttaccgagctcccagactggtcatatgcggatggccgccctgctcccccaatgaaaggccagcttcgaagaaaagctgaaagggagacgtttgcaagacgagttgtactgctgtcacaggaaatggacgctggattacaagcatggcagctcaggcagcagaagttgcaggaagaacaaaggaagcaggaaaatgctcttaaacccaaaggggcttcactgaagagcccacttccaagtcaataaaaagcaactcctgcctcccttcctcaccctgtctctggatttcttttctatcacctagatgcttcatccagccagaagatagccttcacgttccccatctgtcttcagagaaaaagagctgggacaccaagaacaagctgttagatcactgcctgggaggcttggcttagtactctcatctctggttccattccagttcagctaagtcttgctttaaaatttttacctcctagctgggtgcggtggctcacgcctgtaatcccagcactttgggaggctgaggcgggcagatcacaagatcaggagttcgagaccagcctggccaacccagcctggtcaacatggtgaaaccctgtccctactaaagatacaaacaattagccgggcgtggtggggtgcgcttgtaatcccagctactcaggaggctgaggcaggagaatcgcttaaactcgggaggtagaggttgcagtgagccaaggtcacaccattgcactccaacctgggcgacagggcgagactccgtctcaaaaaaaaaaaaaaatttacctcctttgcaggccataggactagcccaactatgagaaatagctgttctgtgaacgtgaaaaggggacagcagttttcccagttttggccaggcagtcaagcctttaacagctcatgcacagtttaggccatgtacagctggcatctaataaatgttttcatgaaaaaga

SEQ ID NO: 18331 - DNA, 333 bp, Homo sapiens
  source 1..333: mol_type = unassigned DNA
atggctgctttagggactgttctcttcacaggtgtccggaggctgcactgcagcgtagccgcttgggcgggcggccagtggcgactacagcagggactggctgccaacccctccggctacgggccccttaccgagctcccagactggtcatatgcggagacgagttgtactgctgtcacaggaaatggacgctggattacaagcatggcagctcaggcagcagaagttgcaggaagaacaaaggaagcaggaaaatgctcttaaacccaaaggggcttcactgaagagcccacttccaagtcaataaaaagcaactcctgcctcccttcctca

SEQ ID NO: 18332 - DNA, 586 bp, Homo sapiens
  source 1..586: mol_type = unassigned DNA
gctcagcatggctgctttagggactgttctcttcagtgagtgggtatagatagggaccgtggactcgggggccctttggggacgggcacaggacccctgatccggctgcgcggcctctcccccaactctgctctgttctcccagcaggtgtccggaggctgcactgcagcgtagccgcttgggcgggcggccagtggcgactacagcagggactggctgccaacccctccggctacgggccccttaccgagctcccagactggtcatatgcgggggtatgatcctgcttaattggataattggtgactgaggaagatggtgaagattttttctacttgttatttactatggccgccctgctcccccaatgaaaggccagcttcgaagaaaagctgaaagggagacgtttgcaagacgagttgtactgctgtcacaggaaatggacgctggattacaagcatggcagctcaggcagcagaagttgcaggaagaacaaaggaagcaggaaaatgctcttaaacccaaaggggcttcactgaagagcccacttccaagtcaataaaaagcaactcctgcctcccttcct

SEQ ID NO: 18333 - DNA, 895 bp, Homo sapiens
  source 1..895: mol_type = unassigned DNA
cggctactcctgctcagcatggctgctttagggactgttctcttcagtgagtgggtatagatagggaccgtggactcgggggccctttggggacgggcacaggacccctgatccggctgcgcggcctctcccccaactctgctctgttctcccagcaggtgtccggaggctgcactgcagcgtagccgcttgggcgggcggccagtggcgactacagcagggactggctgccaacccctccggctacgggccccttaccgagctcccagactggtcatatgcggatggccgccctgctcccccaatgaaaggccagcttcgaagaaaagctgaaagggagacgtttgcaagacgagttgtactgctgtcacaggaaatggacgctggattacaagcatggcagctcaggcagcagaagttgcaggaagaacaaaggaagcaggaaaatgctcttaaacccaaaggggcttcactgaagagcccacttccaagtcaataaaaagcaactcctgcctcccttcctcaccctgtctctggatttcttttctatcacctagatgcttcatccagccagaagatagccttcacgttccccatctgtcttcagagaaaaagagctgggacaccaagaacaagctgttagatcactgcctgggaggcttggcttagtactctcatctctggttccattccagttcagctaagtcttgctttaaaatttttacctcctagctgggtgcggtggctcacgcctgtaatcccagcactttgggaggctgaggcgggcagatcacaagatcaggagttcgagaccagcctggccaacccagcctggtcaacatggtgaaaccctgtccctactaaagatacaaacaattagccgggcgtggtgggg

SEQ ID NO: 18334 - DNA, 398 bp, Homo sapiens
  source 1..398: mol_type = unassigned DNA
tttagggactgttctcttcagtgagtggcaggtgtccggaggctgcactgcagcgtagccgcttgggcgggcggccagtggcgactacagcagggactggctgccaacccctccggctacgggccccttaccgagctcccagactggtcatatgcggatggccgccctgctcccccaatgaaaggccagcttcgaagaaaagctgaaagggagacgtttgcaagacgagttgtactgctgtcacaggaaatggacgctggattacaagcatggcagctcaggcagcagaagttgcaggaagaacaaaggaagcaggaaaatgctcttaaacccaaaggggcttcactgaagagcccacttccaagtcaataaaaagcaactcctgcctcccttcctca

SEQ ID NO: 18335 - DNA, 1162 bp, Homo sapiens
  source 1..1162: mol_type = unassigned DNA
gctagaatgcacttcaacttaagtcctgggagctacgctaattcatggagaaccacagaggtttaataggcatttctatacctggatcagccccaaggacagtattaccctgtactgcccttcctattactattttcagtcatttactaatattgggctgtagtactttcacgtttaagctttggctattcagagctcactacgtttaatcttcagttacctgaatggtgtttaccttctggtgtggatcatcccggcttgtgttagtgctctctctttggaagaagccaggatttaagatcgagttagcctagatgtggcccagcagggtacagaaggggaaaggctgcagaaaacgggcgtattttcgtgcaaagaggtttttgcgccatttatttatggttttcaccgtcgtatgagaggactattcatgataggctgtatttgctgacagcctactttgggctcccccatgcgttgtgccgaaaccacctctttctttcctgccttcctccgcctgggctaggaagcccagagctgcggttcgcaggcctgctaagcagccggcggccggaagtctatcccgcagaagcgcagccattcacggcctcacgcaatgcgacacttccgcctgcacgagttcttccggggcggaggtcaccatggcagctgccttggctcggcttggtctgcggcctgtcaaacaggttcgggttcagttctgtcccttcgagaaaaacgtggaatcgacgaggaccttcctgcagacggtgagcagtgagaaggtccgctccactaatctcaactgctcagtgattgcggacgtgaggcatgacggctccgagccctgcgtggacgtgctgttcggagacgggcatcgcctgattatgcgcggcgctcatctcaccgctctggaaatgctcaccgccttcgcctcccacatccgggccagggacgcggcgggcagcggggacaagccgggcgctgatactggtcgctgacagcgccaaagagaccaacaagatgattttagcgtggactaggacacttaacctaagaagagtttcacttaatcattcaaatcactatctgaagggtcacggagcgcaaaataaagtttaaaaccctgctaccacaatgtttctggaacaagactagatca

SEQ ID NO: 18336 - DNA, 622 bp, Homo sapiens
  source 1..622: mol_type = unassigned DNA
gaaacgtgcacttgcaagctgcccgcaatacgtcatggcgaccaaacgccttttcggggctacccggacgtgggccggctggggggcctgggagctcctaaaccccgccacttccggaagactcctggcccgggattatgccaagaaaccagttatgaagggggccaaatcgggaaaaggtgcagtgaccagcgaggccctcaaggaccccgacgtatgcacagatcctgtccagctcaccacatatgccatgggcgtcaacatctacaaggaagggcaggatgtacccctgaaaccggatgctgagtaccctgaatggctgttcgagatgaacttgggtcccccaaagaccctggaggagctggaccccgagagccgggagtactggcggcggctgcggaaacagaacatctggcgccacaaccggctgagcaagaacaagaggttgtagcatggagggcccggcatcgctgacccccacgccgagggcttgccgttttcccggaggacgtggacttttgtgagacaagaggcggctccccagcctgggtttccatgtgaccccacagtggggctggaccagggccctggaggccaataaagagctttctgggtagaccct

SEQ ID NO: 18337 - DNA, 632 bp, Homo sapiens
  source 1..632: mol_type = unassigned DNA
agtgacgtcgtgggctgcagcgcagcagcacccaacgcatctagcaggaaaggagagggagctttccccgaagaccctcctggaccagccccaggctcctgtgctggttgcacgccagggcctgtactgaccacctccacgtgccactggggctgtaaggaggaatggcggccgtgggcagcctgcttggccggctgaggcagagcaccgtgaaggccaccggacctgcactccgccgcctgcacacatcctcctggcgagctgacagcagcagggcctcactcactcgtgtgcaccgccaggcttatgcacgactctaccccgtgctgctggtgaagcaggatggctccaccatccacatccgctacagggagccacggcgcatgctggcgatgcccatagatctggacaccctgtctcctgaggagcgccgggccaggctgcggaagcgtgaggctcagctccagtcgaggaaggagtacgagcaggagctcagtgatgacttgcatgtggagcgctaccgacagttctggaccaggaccaagaagtgaccgtggctccagccaccccgggacattgctaagatgggagggctgttcttaaatcactcgttcttgaagctgccacctgga

SEQ ID NO: 18338 - DNA, 722 bp, Homo sapiens
  source 1..722: mol_type = unassigned DNA
gcctgccagtgacgtcgtgggctgcagcgcagcagcacccaacgcagtgagtaccttgatctcctgcgtggcctcgtccctggtcttagttccaccgggcagcgggagtcaggaccgcctgtcctcagacccctccgcagcgactgtggcggccgcaggcggttctgagaagtccaagggttgctgggagaggttggttgcacgccagggcctgtactgaccacctccacgtgccactggggctgtaaggaggaatggcggccgtgggcagcctgcttggccggctgaggcagagcaccgtgaaggccaccggacctgcactccgccgcctgcacacatcctcctggcgagctgacagcagcagggcctcactcactcgtgtgcaccgccaggcttatgcacgactctaccccgtgctgctggtgaagcaggatggctccaccatccacatccgctacagggagccacggcgcatgctggcgatgcccatagatctggacaccctgtctcctgaggagcgccgggccaggctgcggaagcgtgaggctcagctccagtcgaggaaggagtacgagcaggagctcagtgatgacttgcatgtggagcgctaccgacagttctggaccaggaccaagaagtgaccgtggctccagccaccccgggacattgctaagatgggagggctgttcttaaatcactcgttcttgaagctgccacctgga

SEQ ID NO: 18339 - DNA, 744 bp, Homo sapiens
  source 1..744: mol_type = unassigned DNA
agtgacgtcgtgggctgcagcgcagcagcacccaacgcagtgagtaccttgatctcctgcgtggcctcgtccctggtcttagttccaccgggcagcgggagtcaggaccgcctgtcctcagacccctccgcagcgactgtggcggccgcagtctagcaggaaaggagagggagctttccccgaagaccctcctggaccagccccaggctcctgtgctggttgcacgccagggcctgtactgaccacctccacgtgccactggggctgtaaggaggaatggcggccgtgggcagcctgcttggccggctgaggcagagcaccgtgaaggccaccggacctgcactccgccgcctgcacacatcctcctggcgagctgacagcagcagggcctcactcactcgtgtgcaccgccaggcttatgcacgactctaccccgtgctgctggtgaagcaggatggctccaccatccacatccgctacagggagccacggcgcatgctggcgatgcccatagatctggacaccctgtctcctgaggagcgccgggccaggctgcggaagcgtgaggctcagctccagtcgaggaaggagtacgagcaggagctcagtgatgacttgcatgtggagcgctaccgacagttctggaccaggaccaagaagtgaccgtggctccagccaccccgggacattgctaagatgggagggctgttcttaaatcactcgttcttgaagctgccacctgga

SEQ ID NO: 18340 - DNA, 661 bp, Homo sapiens
  source 1..661: mol_type = unassigned DNA
gcagcgcagcagcacccaacgcagtgagtaccttgatctcctgcgtggcctcgtccctggtcttagttccaccgggcagcgggagtcaggaccgcctgtcctcagacccctccgcagcgactgtggcggccgcaggttgcacgccagggcctgtactgaccacctccacgtgccactggggctgtaaggaggaatggcggccgtgggcagcctgcttggccggctgaggcagagcaccgtgaaggccaccggacctgcactccgccgcctgcacacatcctcctggcgagctgacagcagcagggcctcactcactcgtgtgcaccgccaggcttatgcacgactctaccccgtgctgctggtgaagcaggatggctccaccatccacatccgctacagggagccacggcgcatgctggcgatgcccatagatctggacaccctgtctcctgaggagcgccgggccaggctgcggaagcgtgaggctcagctccagtcgaggaaggagtacgagcaggagctcagtgatgacttgcatgtggagcgctaccgacagttctggaccaggaccaagaagtgaccgtggctccagccaccccgggacattgctaagatgggagggctgttcttaaatcactcgttcttgaagctgccacctgga

SEQ ID NO: 18341 - DNA, 1361 bp, Homo sapiens
  source 1..1361: mol_type = unassigned DNA
agtgacgtcgtgggctgcagcgcagcagcacccaacgcagtgagtaccttgatctcctgcgtggcctcgtccctggtcttagttccaccgggcagcgggagtcaggaccgcctgtcctcagacccctccgcagcgactgtggcggccgcagtctagcaggaaaggagagggagctttccccgaagaccctcctggaccagccccaggctcctgtgctggtgaggccgagggagagggatgtgggcataggacacgtagcaggatttccattttagaggcagccggacctgtcttcaggtcccttccttggtgagagacaggggtacgccagaggaagctgggcgctcggcctctgtgcagcctcatctcctggaatctgagtattgaaaactgggcttttacttcgcacacctcagcacagactcccatgggaatccaggtcacagcaaagcagccctgggcctccattctcctttaagcaagcatgacaatcctcacttcactgagtttttattaaaactagcaatgaccttagaaagcaaggcatgacctcagctccacttttgaggctgcagtccattcagagaggtttcgcagactcggtaacggccagaacagacagcctgggccctgccgcaggctgactcagaatctttgggagtagtgaccaacttctgcttttggaaaaacctctacaggcggttctgagaagtccaagggttgctgggagaggttggttgcacgccagggcctgtactgaccacctccacgtgccactggggctgtaaggaggaatggcggccgtgggcagcctgcttggcctggcagcctcttcctggctagggggccagaacgcctctgaccacagcctgtggctcctgaggaagccccgaggctcatcctgccccggcacgggtcaccagctctgccggctgaggcagagcaccgtgaaggccaccggacctgcactccgccgcctgcacacatcctcctggcgagctgacagcagcagggcctcactcactcgtgtgcaccgccaggcttatgcacgactctaccccgtgctgctggtgaagcaggatggctccaccatccacatccgctacagggagccacggcgcatgctggcgatgcccatagatctggacaccctgtctcctgaggagcgccgggccaggctgcggaagcgtgaggctcagctccagtcgaggaaggagtacgagcaggagctcagtgatgacttgcatgtggagcgctaccgacagttctggaccaggaccaagaagtgaccgtggctccagccaccccgggacattgctaagatgggagggctgttcttaaatcactcgttcttgaagctg

SEQ ID NO: 18342 - DNA, 723 bp, Homo sapiens
  source 1..723: mol_type = unassigned DNA
cttagaaagcaaggcatgacctcagctccacttttgaggctgcagtccattcagagaggtttcgcagactcggtaacggccagaacagacagcctgggccctgccgcaggctgactcagaatctttgggagtagtgaccaacttctgcttttggaaaaacctctacaggcggttctgagaagtccaagggttgctgggagaggttggttgcacgccagggcctgtactgaccacctccacgtgccactggggctgtaaggaggaatggcggccgtgggcagcctgcttgggcagagcaccgtgaaggccaccggacctgcactccgccgcctgcacacatcctcctggcgagctgacagcagcagggcctcactcactcgtgtgcaccgccaggcttatgcacgactctaccccgtgctgctggtgaagcaggatggctccaccatccacatccgctacagggagccacggcgcatgctggcgatgcccatagatctggacaccctgtctcctgaggagcgccgggccaggctgcggaagcgtgaggctcagctccagtcgaggaaggagtacgagcaggagctcagtgatgacttgcatgtggagcgctaccgacagttctggaccaggaccaagaagtgaccgtggctccagccaccccgggacattgctaagatgggagggctgttcttaaatcactcgttcttgaagctgccacctgga

SEQ ID NO: 18343 - DNA, 834 bp, Homo sapiens
  source 1..834: mol_type = unassigned DNA
tgggaatccaggtcacagcaaagcagccctgggcctccattctcctttaagcaagcatgacaatcctcacttcactgagtttttattaaaactagcaatgaccttagaaagcaaggcatgacctcagctccacttttgaggctgcagtccattcagagaggtttcgcagactcggtaacggccagaacagacagcctgggccctgccgcaggctgactcagaatctttgggagtagtgaccaacttctgcttttggaaaaacctctacaggcggttctgagaagtccaagggttgctgggagaggttggttgcacgccagggcctgtactgaccacctccacgtgccactggggctgtaaggaggaatggcggccgtgggcagcctgcttggccggctgaggcagagcaccgtgaaggccaccggacctgcactccgccgcctgcacacatcctcctggcgagctgacagcagcagggcctcactcactcgtgtgcaccgccaggcttatgcacgactctaccccgtgctgctggtgaagcaggatggctccaccatccacatccgctacagggagccacggcgcatgctggcgatgcccatagatctggacaccctgtctcctgaggagcgccgggccaggctgcggaagcgtgaggctcagctccagtcgaggaaggagtacgagcaggagctcagtgatgacttgcatgtggagcgctaccgacagttctggaccaggaccaagaagtgaccgtggctccagccaccccgggacattgctaagatgggagggctgttcttaaatcactcgttcttgaagctgccacctgga

SEQ ID NO: 18344 - DNA, 990 bp, Homo sapiens
  source 1..990: mol_type = unassigned DNA
aggcagccggacctgtcttcaggtcccttccttggtgagagacaggggtacgccagaggaagctgggcgctcggcctctgtgcagcctcatctcctggaatctgagtattgaaaactgggcttttacttcgcacacctcagcacagactcccatgggaatccaggtcacagcaaagcagccctgggcctccattctcctttaagcaagcatgacaatcctcacttcactgagtttttattaaaactagcaatgaccttagaaagcaaggcatgacctcagctccacttttgaggctgcagtccattcagagaggtttcgcagactcggtaacggccagaacagacagcctgggccctgccgcaggctgactcagaatctttgggagtagtgaccaacttctgcttttggaaaaacctctacaggcggttctgagaagtccaagggttgctgggagaggttgcaggttgcacgccagggcctgtactgaccacctccacgtgccactggggctgtaaggaggaatggcggccgtgggcagcctgcttggccggctgaggcagagcaccgtgaaggccaccggacctgcactccgccgcctgcacacatcctcctggcgagctgacagcagcagggcctcactcactcgtgtgcaccgccaggcttatgcacgactctaccccgtgctgctggtgaagcaggatggctccaccatccacatccgctacagggagccacggcgcatgctggcgatgcccatagatctggacaccctgtctcctgaggagcgccgggccaggctgcggaagcgtgaggctcagctccagtcgaggaaggagtacgagcaggagctcagtgatgacttgcatgtggagcgctaccgacagttctggaccaggaccaagaagtgaccgtggctccagccaccccgggacattgctaagatgggagggctgttcttaaatcactcgttcttgaagctgccacctgga

SEQ ID NO: 18345 - DNA, 1212 bp, Homo sapiens
  source 1..1212: mol_type = unassigned DNA
gggagctttccccgaagaccctcctggaccagccccaggctcctgtgctggtgaggccgagggagagggatgtgggcataggacacgtagcaggatttccattttagaggcagccggacctgtcttcaggtcccttccttggtgagagacaggggtacgccagaggaagctgggcgctcggcctctgtgcagcctcatctcctggaatctgagtattgaaaactgggcttttacttcgcacacctcagcacagactcccatgggaatccaggtcacagcaaagcagccctgggcctccattctcctttaagcaagcatgacaatcctcacttcactgagtttttattaaaactagcaatgaccttagaaagcaaggcatgacctcagctccacttttgaggctgcagtccattcagagaggtttcgcagactcggtaacggccagaacagacagcctgggccctgccgcaggctgactcagaatctttgggagtagtgaccaacttctgcttttggaaaaacctctacaggcggttctgagaagtccaagggttgctgggagaggttggtgagtggcgtggtgattacatgtgtcttggaagcatcctgggctgggatttgataagaaaccattaggtggaagaaccttccttttaaaaaagatctcttcattctctgcctagcaggttgcacgccagggcctgtactgaccacctccacgtgccactggggctgtaaggaggaatggcggccgtgggcagcctgcttggccggctgaggcagagcaccgtgaaggccaccggacctgcactccgccgcctgcacacatcctcctggcgagctgacagcagcagggcctcactcactcgtgtgcaccgccaggcttatgcacgactctaccccgtgctgctggtgaagcaggatggctccaccatccacatccgctacagggagccacggcgcatgctggcgatgcccatagatctggacaccctgtctcctgaggagcgccgggccaggctgcggaagcgtgaggctcagctccagtcgaggaaggagtacgagcaggagctcagtgatgacttgcatgtggagcgctaccgacagttctggaccaggaccaagaagtgaccgtggctccagccaccccgggacattgctaagatgggagggctgttcttaaatcactcgttcttgaagctgccacctgga

SEQ ID NO: 18346 - DNA, 660 bp, Homo sapiens
  source 1..660: mol_type = unassigned DNA
caggaaaggagagggagctttccccgaagaccctcctggaccagccccaggctcctgtgctgtgaccaacttctgcttttggaaaaacctctacaggcggttctgagaagtccaagggttgctgggagaggttggttgcacgccagggcctgtactgaccacctccacgtgccactggggctgtaaggaggaatggcggccgtgggcagcctgcttggccggctgaggcagagcaccgtgaaggccaccggacctgcactccgccgcctgcacacatcctcctggcgagctgacagcagcagggcctcactcactcgtgtgcaccgccaggcttatgcacgactctaccccgtgctgctggtgaagcaggatggctccaccatccacatccgctacagggagccacggcgcatgctggcgatgcccatagatctggacaccctgtctcctgaggagcgccgggccaggctgcggaagcgtgaggctcagctccagtcgaggaaggagtacgagcaggagctcagtgatgacttgcatgtggagcgctaccgacagttctggaccaggaccaagaagtgaccgtggctccagccaccccgggacattgctaagatgggagggctgttcttaaatcactcgttcttgaagctgccacctgga

SEQ ID NO: 18347 - DNA, 705 bp, Homo sapiens
  source 1..705: mol_type = unassigned DNA
gcagtctagcaggaaaggagagggagctttccccgaagaccctcctggaccagccccaggctcctgtgctggttgcacgccagggcctgtactgaccacctccacgtgccactggggctgtaaggaggaatggcggccgtgggcagcctgcttggcctggcagcctcttcctggctagggggccagaacgcctctgaccacagcctgtggctcctgaggaagccccgaggctcatcctgccccggcacgggtcaccagctctgccggctgaggcagagcaccgtgaaggccaccggacctgcactccgccgcctgcacacatcctcctggcgagctgacagcagcagggcctcactcactcgtgtgcaccgccaggcttatgcacgactctaccccgtgctgctggtgaagcaggatggctccaccatccacatccgctacagggagccacggcgcatgctggcgatgcccatagatctggacaccctgtctcctgaggagcgccgggccaggctgcggaagcgtgaggctcagctccagtcgaggaaggagtacgagcaggagctcagtgatgacttgcatgtggagcgctaccgacagttctggaccaggaccaagaagtgaccgtggctccagccaccccgggacattgctaagatgggagggctgttcttaaatcactcgttcttgaagctgccacctgga

SEQ ID NO: 18348 - DNA, 641 bp, Homo sapiens
  source 1..641: mol_type = unassigned DNA
ccccatgcagtctagcaggaaaggagagggagctttccccgaagaccctcctggaccagccccaggctcctgtgctggcggttctgagaagtccaagggttgctgggagaggttggttgcacgccagggcctgtactgaccacctccacgtgccactggggctgtaaggaggaatggcggccgtgggcagcctgcttggccggctgaggcagagcaccgtgaaggccaccggacctgcactccgccgcctgcacacatcctcctggcgagctgacagcagcagggcctcactcactcgtgtgcaccgccaggcttatgcacgactctaccccgtgctgctggtgaagcaggatggctccaccatccacatccgctacagggagccacggcgcatgctggcgatgcccatagatctggacaccctgtctcctgaggagcgccgggccaggctgcggaagcgtgaggctcagctccagtcgaggaaggagtacgagcaggagctcagtgatgacttgcatgtggagcgctaccgacagttctggaccaggaccaagaagtgaccgtggctccagccaccccgggacattgctaagatgggagggctgttcttaaatcactcgttcttgaagctgccacctgga

SEQ ID NO: 18349 - DNA, 644 bp, Homo sapiens
  source 1..644: mol_type = unassigned DNA
ccccatgcagtctagcaggaaaggagagggagctttccccgaagaccctcctggaccagccccaggctcctgtgctggcggttctgagaagtccaagggttgctgggagaggttgcaggttgcacgccagggcctgtactgaccacctccacgtgccactggggctgtaaggaggaatggcggccgtgggcagcctgcttggccggctgaggcagagcaccgtgaaggccaccggacctgcactccgccgcctgcacacatcctcctggcgagctgacagcagcagggcctcactcactcgtgtgcaccgccaggcttatgcacgactctaccccgtgctgctggtgaagcaggatggctccaccatccacatccgctacagggagccacggcgcatgctggcgatgcccatagatctggacaccctgtctcctgaggagcgccgggccaggctgcggaagcgtgaggctcagctccagtcgaggaaggagtacgagcaggagctcagtgatgacttgcatgtggagcgctaccgacagttctggaccaggaccaagaagtgaccgtggctccagccaccccgggacattgctaagatgggagggctgttcttaaatcactcgttcttgaagctgccacctgga

SEQ ID NO: 18350 - DNA, 603 bp, Homo sapiens
  source 1..603: mol_type = unassigned DNA
ccccatgcagtctagcaggaaaggagagggagctttccccgaagaccctcctggaccagccccaggctcctgtgctggttgcacgccagggcctgtactgaccacctccacgtgccactggggctgtaaggaggaatggcggccgtgggcagcctgcttggccggctgaggcagagcaccgtgaaggccaccggacctgcactccgccgcctgcacacatcctcctggcgagctgacagcagcagggcctcactcactcgtgtgcaccgccaggcttatgcacgactctaccccgtgctgctggtgaagcaggatggctccaccatccacatccgctacagggagccacggcgcatgctggcgatgcccatagatctggacaccctgtctcctgaggagcgccgggccaggctgcggaagcgtgaggctcagctccagtcgaggaaggagtacgagcaggagctcagtgatgacttgcatgtggagcgctaccgacagttctggaccaggaccaagaagtgaccgtggctccagccaccccgggacattgctaagatgggagggctgttcttaaatcactcgttcttgaagctgccacctgga

SEQ ID NO: 18351 - DNA, 630 bp, Homo sapiens
  source 1..630: mol_type = unassigned DNA
gctgcacctgtgataagcccttgtccccatgcagtctagcaggaaaggagagggagctttccccgaagaccctcctggaccagccccaggctcctgtgctgcaggttgcacgccagggcctgtactgaccacctccacgtgccactggggctgtaaggaggaatggcggccgtgggcagcctgcttggccggctgaggcagagcaccgtgaaggccaccggacctgcactccgccgcctgcacacatcctcctggcgagctgacagcagcagggcctcactcactcgtgtgcaccgccaggcttatgcacgactctaccccgtgctgctggtgaagcaggatggctccaccatccacatccgctacagggagccacggcgcatgctggcgatgcccatagatctggacaccctgtctcctgaggagcgccgggccaggctgcggaagcgtgaggctcagctccagtcgaggaaggagtacgagcaggagctcagtgatgacttgcatgtggagcgctaccgacagttctggaccaggaccaagaagtgaccgtggctccagccaccccgggacattgctaagatgggagggctgttcttaaatcactcgttcttgaagctgccacctgga

SEQ ID NO: 18352 - DNA, 726 bp, Homo sapiens
  source 1..726: mol_type = unassigned DNA
gcgcagcagcacccaacgcagtgagtaccttgatctcctgcgtggcctcgtccctggtcttagttccaccgggcagcgggagtcaggaccgcctgtcctcagacccctccgcagcgactgtggcggccgcagtgaccaacttctgcttttggaaaaacctctacaggcggttctgagaagtccaagggttgctgggagaggttgcacgccagggcctgtactgaccacctccacgtgccactggggctgtaaggaggaatggcggccgtgggcagcctgcttggccggctgaggcagagcaccgtgaaggccaccggacctgcactccgccgcctgcacacatcctcctggcgagctgacagcagcagggcctcactcactcgtgtgcaccgccaggcttatgcacgactctaccccgtgctgctggtgaagcaggatggctccaccatccacatccgctacagggagccacggcgcatgctggcgatgcccatagatctggacaccctgtctcctgaggagcgccgggccaggctgcggaagcgtgaggctcagctccagtcgaggaaggagtacgagcaggagctcagtgatgacttgcatgtggagcgctaccgacagttctggaccaggaccaagaagtgaccgtggctccagccaccccgggacattgctaagatgggagggctgttcttaaatcactcgttcttgaagctgccacctgga

SEQ ID NO: 18353 - DNA, 565 bp, Homo sapiens
  source 1..565: mol_type = unassigned DNA
agtgacgtcgtgggctgcagcgcagcagcacccaacgcagttgcacgccagggcctgtactgaccacctccacgtgccactggggctgtaaggaggaatggcggccgtgggcagcctgcttggccggctgaggcagagcaccgtgaaggccaccggacctgcactccgccgcctgcacacatcctcctggcgagctgacagcagcagggcctcactcactcgtgtgcaccgccaggcttatgcacgactctaccccgtgctgctggtgaagcaggatggctccaccatccacatccgctacagggagccacggcgcatgctggcgatgcccatagatctggacaccctgtctcctgaggagcgccgggccaggctgcggaagcgtgaggctcagctccagtcgaggaaggagtacgagcaggagctcagtgatgacttgcatgtggagcgctaccgacagttctggaccaggaccaagaagtgaccgtggctccagccaccccgggacattgctaagatgggagggctgttcttaaatcactcgttcttgaagctgccacctgga

SEQ ID NO: 18354 - DNA, 603 bp, Homo sapiens
  source 1..603: mol_type = unassigned DNA
agtgacgtcgtgggctgcagcgcagcagcacccaacgcagcggttctgagaagtccaagggttgctgggagaggttggttgcacgccagggcctgtactgaccacctccacgtgccactggggctgtaaggaggaatggcggccgtgggcagcctgcttggccggctgaggcagagcaccgtgaaggccaccggacctgcactccgccgcctgcacacatcctcctggcgagctgacagcagcagggcctcactcactcgtgtgcaccgccaggcttatgcacgactctaccccgtgctgctggtgaagcaggatggctccaccatccacatccgctacagggagccacggcgcatgctggcgatgcccatagatctggacaccctgtctcctgaggagcgccgggccaggctgcggaagcgtgaggctcagctccagtcgaggaaggagtacgagcaggagctcagtgatgacttgcatgtggagcgctaccgacagttctggaccaggaccaagaagtgaccgtggctccagccaccccgggacattgctaagatgggagggctgttcttaaatcactcgttcttgaagctgccacctgga

SEQ ID NO: 18355 - DNA, 685 bp, Homo sapiens
  source 1..685: mol_type = unassigned DNA
cgcagcgcctgccagtgacgtcgtgggctgcagcgcagcagcacccaacgcatctagcaggaaaggagagggagctttccccgaagaccctcctggaccagccccaggctcctgtgctggcggttctgagaagtccaagggttgctgggagaggttgcaggttgcacgccagggcctgtactgaccacctccacgtgccactggggctgtaaggaggaatggcggccgtgggcagcctgcttggccggctgaggcagagcaccgtgaaggccaccggacctgcactccgccgcctgcacacatcctcctggcgagctgacagcagcagggcctcactcactcgtgtgcaccgccaggcttatgcacgactctaccccgtgctgctggtgaagcaggatggctccaccatccacatccgctacagggagccacggcgcatgctggcgatgcccatagatctggacaccctgtctcctgaggagcgccgggccaggctgcggaagcgtgaggctcagctccagtcgaggaaggagtacgagcaggagctcagtgatgacttgcatgtggagcgctaccgacagttctggaccaggaccaagaagtgaccgtggctccagccaccccgggacattgctaagatgggagggctgttcttaaatcactcgttcttgaagctgccacctgg

SEQ ID NO: 18356 - DNA, 1253 bp, Homo sapiens
  source 1..1253: mol_type = unassigned DNA
agtgacgtcgtgggctgcagcgcagcagcacccaacgcagtgagtaccttgatctcctgcgtggcctcgtccctggtcttagttccaccgggcagcgggagtcaggaccgcctgtcctcagacccctccgcagcgactgtggcggccgcagtctagcaggaaaggagagggagctttccccgaagaccctcctggaccagccccaggctcctgtgctggtgaggccgagggagagggatgtgggcataggacacgtagcaggatttccattttagaggcagccggacctgtcttcaggtcccttccttggtgagagacaggggtacgccagaggaagctgggcgctcggcctctgtgcagcctcatctcctggaatctgagtattgaaaactgggcttttacttcgcacacctcagcacagactcccatgggaatccaggtcacagcaaagcagccctgggcctccattctcctttaagcaagcatgacaatcctcacttcactgagtttttattaaaactagcaatgaccttagaaagcaaggcatgacctcagctccacttttgaggctgcagtccattcagagaggtttcgcagactcggtaacggccagaacagacagcctgggccctgccgcaggctgactcagaatctttgggagtagtgaccaacttctgcttttggaaaaacctctacaggcggttctgagaagtccaagggttgctgggagaggttggttgcacgccagggcctgtactgaccacctccacgtgccactggggctgtaaggaggaatggcggccgtgggcagcctgcttggccggctgaggcagagcaccgtgaaggccaccggacctgcactccgccgcctgcacacatcctcctggcgagctgacagcagcagggcctcactcactcgtgtgcaccgccaggcttatgcacgactctaccccgtgctgctggtgaagcaggatggctccaccatccacatccgctacagggagccacggcgcatgctggcgatgcccatagatctggacaccctgtctcctgaggagcgccgggccaggctgcggaagcgtgaggctcagctccagtcgaggaaggagtacgagcaggagctcagtgatgacttgcatgtggagcgctaccgacagttctggaccaggaccaagaagtgaccgtggctccagccaccccgggacattgctaagatgggagggctgttcttaaatcactcgttcttgaagctg

SEQ ID NO: 18357 - DNA, 864 bp, Homo sapiens
  source 1..864: mol_type = unassigned DNA
cgcagcgcctgccagtgacgtcgtgggctgcagcgcagcagcacccaacgcagtgagtaccttgatctcctgcgtggcctcgtccctggtcttagttccaccgggcagcgggagtcaggaccgcctgtcctcagacccctccgcagcgactgtggcggccgcagtctagcaggaaaggagagggagctttccccgaagaccctcctggaccagccccaggctcctgtgctggttgcacgccagggcctgtactgaccacctccacgtgccactggggctgtaaggaggaatggcggccgtgggcagcctgcttggcctggcagcctcttcctggctagggggccagaacgcctctgaccacagcctgtggctcctgaggaagccccgaggctcatcctgccccggcacgggtcaccagctctgccggctgaggcagagcaccgtgaaggccaccggacctgcactccgccgcctgcacacatcctcctggcgagctgacagcagcagggcctcactcactcgtgtgcaccgccaggcttatgcacgactctaccccgtgctgctggtgaagcaggatggctccaccatccacatccgctacagggagccacggcgcatgctggcgatgcccatagatctggacaccctgtctcctgaggagcgccgggccaggctgcggaagcgtgaggctcagctccagtcgaggaaggagtacgagcaggagctcagtgatgacttgcatgtggagcgctaccgacagttctggaccaggaccaagaagtgaccgtggctccagccaccccgggacattgctaagatgggagggctgttcttaaatcactcgttcttgaagctgccacctgg

SEQ ID NO: 18358 - DNA, 544 bp, Homo sapiens
  source 1..544: mol_type = unassigned DNA
cagtgacgtcgtgggctgcagcgcagcagcacccaacgcagtgagtaccttgatctcctgcgtggcctcgtccctggtcttagttccaccgggcagcgggagtcaggaccgcctgtcctcagacccctccgcagcgactgtggcggccgcagtctagcaggaaaggagagggagctttccccgaagaccctcctggaccagccccaggctcctgtgctggcggttctgagaagtccaagggttgctgggagaggttggttgcacgccagggcctgtactgaccacctccacgtgccactggggctgtaaggaggaatggcggccgtgggcagcctgcttggccggctgaggcagagcaccgtgaaggccaccggacctgcactccgccgcctgcacacatcctcctggcgagctgacagcagcagggcctcactcactcgtgtgcaccgccaggcttatgcacgactctaccccgtgctgctggtgaagcaggatggctccaccatccacatccgctacagggagccacggcgcatgctggcgg

SEQ ID NO: 18359 - DNA, 882 bp, Homo sapiens
  source 1..882: mol_type = unassigned DNA
tgaacatggcggcgcccgttgtcacggccccgggcagagctctgctgcgggcgggcgctggacggctgcttcggggaggcgtccaggagctactgcggccgcgacatgaagggaacgcccctgacctggcctgcaacttcagcctttctcaaaatcggggcacggtcatcgtggagcgctggtggaaggtaccgctggccggggagggccggaagccgcgcctgcaccggcgacatcgcgtctataagctggtggaggacacgaagcatcggcccaaagaaaacctggagctcatcctgacgcagtcggtggagaatgttggagtccggggtgacctggtctcagtgaagaaatctttaggccggaatcgactccttcctcagggactggctgtatatgcatcccctgaaaacaagaagctgtttgaagaggagaaattgctgagacaagaaggaaaattagagaagatccagaccaaggcaggtgaggcgcttggtgttgtggttgccccacatacattaaagttaccagaagagcctatcacacggtggggcgagtattggtgtgaggtgacggtaaatgggcttgatactgtgagagtgcctatgtctgtcgtgaactttgagaagcccaagaccaaaagatataagtactggttagcccagcaagctgccaaggctatggcccccaccagcccccagatctaaatctactctccctccaaggcagcaaagcagaatcgggagcagtggagcagaaatgtgcaagcaccctgatctcactcccagctctgaccaaatacagaattttagagaacatctgaagacatcagactgcactgcgtatacatgttgaattcttcatttttgccatctttaactg

SEQ ID NO: 18360 - DNA, 1296 bp, Homo sapiens
  source 1..1296: mol_type = unassigned DNA
ggcgcgccgcaggcagcactggcgggggcctttcctgccgccgacgccggggtcctccctcaggtctcattctgtgcctgtgaacatggcggcgcccgttgtcacggccccgggcagagctctgctgcgggcgggcgctggacggctgcttcggggaggcgtccaggagctactgcggccgcgacatgaagggaacgcccctgacctggcctgcaacttcagcctttctcaaaatcggggcacggtcatcgtggagcgctggtggaaggtaccgctggccggggagggccggaagccgcgcctgcaccggcgacatcgcgtctataagctggtggaggacacgaagcatcggcccaaagaaaacctggagctcatcctgacgcagtcggtggagaatgttggagtccggggtgacctggtctcagtgaagaaatctttaggccggaatcgactccttcctcagggactggctgtatatgcatcccctgaaaacaagaagctgtttgaagaggagaaattgctgagacaagaaggaaaattagagaagatccagaccaaggcaggtgaggcgacagtgaaatttctaaaaagctgtcgcctggaggtagggatgaagaacaatgtcaaatgggagctgaaccctgaaatagttgcccgccacttctttaagaatcttggtgttgtggttgccccacatacattaaagttaccagaagagcctatcacacggtggggcgagtattggtgtgaggtgacggtaaatgggcttgatactgtgagagtgcctatgtctgtcgtgaactttgagaagcccaagaccaaaagatataagtactggttagcccagcaagctgccaaggctatggcccccaccagcccccagatctaaatctactctccctccaaggcagcaaagcagaatcgggagcagtggagcagaaatgtgcaagcaccctgatctcactcccagctctgaccaaatacagaattttagagaacatctgaagacatcagactgcactgcgtatacatgttgaattcttcatttttgccatctttaactgtcatcactggggcagggaagtcctgttccagaagtaccaggctgtagatttgataagctagatgcagtagaccgaaaccatccaaaacctgtttagcttcttcctccattggagtttattgggacaaacaggagagccagccattgtctccagtacttgcctcattctcatcatccaaactgaacatttgtatcccaagcagaaataaagagaatatgttctttttaagtaa

SEQ ID NO: 18361 - DNA, 2110 bp, Homo sapiens
  source 1..2110: mol_type = unassigned DNA
ggtcgggaccggcaagatggcggcgcggacagcgttcggtgctgtgtgccggcgcctctggcagggattggggaatttttctgtaaacacttctaagggcaatacagccaaaaatggtggcttgcttctcagtaccaatatgaagtgggtacagttttcaaacctacacgttgatgttccaaaggatttgaccaaacctgtggtaacaatctctgatgaaccagacatattatataagcgcctctcggttttggtgaaaggtcacgataaggctgtattggacagttatgaatattttgctgtgcttgctgctaaagaacttggtatctctattaaagtacatgaacctccaaggaaaatagagcgatttactcttctccaatcagtgcatatttacaagaagcacagagttcagtatgaaatgagaacactttacagatgtttagagttagaacatctaactggaagcacagcagatgtctacttggaatatattcagcgaaacttacctgaaggggttgccatggaagtaacaaagacacaattagaacagttaccagaacacatcaaggagccaatctgggaaacactatcagaagaaaaagaagaaagcaagtcataaagcctcagggaggccatttttgcctaaatttgaaatgagggtgggccagatgagtatgtttaagtggagagtgcttccagctgagatgatttgagtctgccctaactgctccattgagttctcgtgccctcatcagctgagggcagggaatggaactttaatggaagaaccacttttatctattctttttattcattgtttcagttctgatttcagcaaacatgagcaaaccactttgactgaaagcagaaagagtgaaaattctattttgttacgctactggtgttcaattattagtttgtaccatttttaatttatgtcagttgatgcatctgaaaataagtgcttggagtgttcgtacccttatttttttttaagattcctagaaggaatctttggttaattcagattgagcagttaaagtttttgctatttacctttgtgcaggctggcatatgctaatttgggggtggtaaccaaccgattttatctcatgtaagcattacattttgaagactgaatatacttcacagcagatcaaacacatttatggcatgcactgacctcttcttggagcccagaactttatagagttgcctaccagggttactgtaatggaatttatgatcttaagaaattactagttgtattatttatcctatgattcattcattcaataagcttttactgcataaactttacatccagcactgtagttaagtacccaaaattgaatagaaataatggcttttgaaaatcgcacaaagcaggccaggcacggtggctcacgcctgtaatcccagcattttgggaggccgaggcaggcggatcacgaggtcaagagatccagaccatcctggctaacacggtgaaaccccgtctctaataaaaatacaaaaattagctggacatggtggcacgtgcctgtaatcccagctactcaggaggctgaggcaggagaattgcgtgaacccgggcccggtggaggctgcagtgagacgagatcgcgccactgcactccagcctggcgacagagcgagacgccgtctcaaaaaaaaaaaaagaaaattgtgcaaagcataggtaaatatttttctttattaagcttctcactgagaagccctctttattttggtaaatgtcactctgtttgttaggagatgtctgcttttccatgaaatgaaatagtggctaaagccctgaaagaggcaagactacaatgggctgaaacagttggtatagcaaccccagagaagtgcttcattttctttttatagtagaagcaggtccatgtcttttgtggtttcctgcacatctttggagtagttatgacttctcagtttttccccccttaaactgcattgcctattcttttttcctgacatgctatcaggtatcagtgtgttgaatacatactgcttgtgtatcagacttacgttactgtcatcaccattaaaagaattgcagctttgtgccccatgaccttca

SEQ ID NO: 18362 - DNA, 1862 bp, Homo sapiens
  source 1..1862: mol_type = unassigned DNA
agtcccggaactgctagaacgaaccattcgcatatggagggggtgacccaccatctcagaacattaaaaaagggaaagaatcccctggtgaactacagtgaaagtcttattgagcatttaaatggaaataaaaatattcagtggacctaatgaagagtagatgactttcccttctgtcccctccccgacaggcactcatggtaccggcgccggcgcagctgtgactgtcgctgcagacggaaactgactggggtcaattcaagtcatgcaggctgtgagaaacgcggggtcgcggttcctgcggtcctggacttggccccagacagccggcagggtcgtggccagaacgccggccgggaccatctgcacaggcgctcgacagctccaagacgctgcggccaagcagaaagttgaacagaacgcggctcccagccacaccaagttcagcatttaccctcccattccaggagaggagagctctctgaggtgggcaggaaagaaatttgaggagatcccaattgcacacattaaagcatcccacaacaacacacagatccaggtagtctctgctagtaatgagccccttgcctttgcttcctgtggcacagagggatttcggaatgccaagaagggcacaggcatcgcagcacagacagcaggcatagccgcagcggcgagagctaaacaaaagggcgtgatccacatccgagttgtggtgaaaggcctggggccaggacgcttgtctgccatgcacggactgatcatgggcggcctggaagtgatctcaatcacagacaacaccccaatcccacacaacggctgccgccccaggaaggctcggaagctgtgatgggaaggaggcctgcacttggacctgacctcaagcctcagctccagtgggaccttgtaaaatgctccctgtcagagctctccagaatatgcttgttggagatccttcaggcagtaagggagagttttgcctccttacacagtggcctttgcttgcacctccagctggagatgggtgtgccccagaagtaagctttgcatctcttacaagaggggagctacaggggcagccgtggcctaggcccaaactctgctctgagaaaataaatatctgtaccacctgtcataattttgagattttttgctttcagagttacgtaattcctaattcctcttgaaaaagagagtgtgaaatgaggtgaggcctcagatgaaagtaaaatataaatgtgagttgctatttaccagacacttctggtttcagatatttcttttctagccccttacccaagatttctagagctaatcctagtaacttttcttattaatgacttataatttggccccaaattggagctttttgccacctacctctggattctgatggatttcgccattatgggcatgtttaaagttagccctaaacacaggattttctacaagtggacagtcaaactccccacactaaagtggcagtcatcgtttacactccatgggcttcagcagtcccagcactaacgagagagtgccctaaaagcggggagggtagagttgtacaaaacatgattcttggccaggcacggtggctcacacctgtaaccctggcactttgggaggccaaggcgggtggatcacttgagtccagttagagaccagcctgggcaacatggtgaaaccccctctctactaaaaatacaaaaattaaccaggcatggtggtgtgcgcctgtaatcccagctactctggaggctgaggcatgaaaatcgcttgaacccaggaggtggaggctgcagtgagctgagatcatcctactgcactccagcccaggtgacagcgagactgtctcaaaaaaa

SEQ ID NO: 18363 - DNA, 766 bp, Homo sapiens
  source 1..766: mol_type = unassigned DNA
atgcaggctgtgagaaacgcggggtcgcggttcctgcggtcctggacttggccccagacagccggcagggtcgtggccagaacgccggccgggaccatctgcacaggcgctcgacagctccaagacgctgcggccaagcagaaagttgaacagaacgcggctcccagccacaccaagttcagcacacagatccaggtagtctctgctagtaatgagccccttgcctttgcttcctgtggcacagagggatttcggaatgccaagaagggcacaggcatcgcagcacagacagcaggcatagccgcagcggcgagagctaaacaaaagggcgtgatccacatccgagttgtggtgaaaggcctggggccaggacgcttgtctgccatgcacggactgatcatgggcggcctggaagtgatctcaatcacagacaacaccccaatcccacacaacggctgccgccccaggaaggctcggaagctgtgatgggaaggaggcctgcacttggacctgacctcaagcctcagctccagtgggaccttgtaaaatgctccctgtcagagctctccagaatatgcttgttggagatccttcaggcagtaagggagagttttgcctccttacacagtggcctttgcttgcacctccagctggagatgggtgtgccccagaagtaagctttgcatctcttacaagaggggagctacaggggcagccgtggcctaggcccaaactctgctctgagaaaataaatatctgtaccacc

SEQ ID NO: 18364 - DNA, 1044 bp, Homo sapiens
  source 1..1044: mol_type = unassigned DNA
cacaagcgccgcgccatggacgcagccatcttggaccgggaacaaggcggcacttcgtcccgcccactccgcgtttagaccaattgcaaggcagcgaacctgaccgtgacgagccaatcagatcctgaggaaagttgaccgcgatagagtccttcgtcgcccaatcgtcgtctgtgtcccgcctcttcagtgacgcgaggcagaaccagccaatccctgcacggatagcgcccggaagaggctagaagctggattcagcgtgtccgcgacctcacctttaggtcctgtgagggacggcccaggtggcaggatgtcctggtctggccttctccatggcctcaacacgtccctaacttgtggcccagctctggttccccggctctgggctacctgctccatggctaccctgaaccagatgcaccgcctggggccccccaagcggccgcctcggaagctgggccccacggaaggccggccgcagctgaagggtgtggtcctgtgcacgtttacccgcaagccgaagaagcccaactcagccaatcgcaagtgctgtcgagtgcggctcagcactggccgcgaggccgtctgcttcatccctggggagggccacaccctgcaggagcaccagattgtccttgtggagggcggccgcacccaggacctgccaggcgtcaagctcaccgttgtgcgtggcaagtacgactgtggccacgtgcagaagaagtgacggctgggggcacagtgggctgggcgcccctgcagaacatgaaccttccgctcctggctgccacagggtcctccgatgctggcctttgcgcctctagaggcagccactcatggattcaagtcctggctccgcctcttccatcaggaccactattaagccataggagtcctgggggtgcaaagggtgcccctctgtcaacacccttggctcctgtgtttagaggggtggcctgaaggaccttttctgctgggacaagacactgtactgccctctgctgggaaggggttttaataaacagaccctggcgcttgtgatgt

SEQ ID NO: 18365 - DNA, 926 bp, Homo sapiens
  source 1..926: mol_type = unassigned DNA
gtcggtggaatcctggggtcctccaaatctaccaggccatctccccagtttcccagttcttcctgcgtgcgggcgagagtggttgggccctcgggaacccactcagagcgaggctaaatttacggagggactttctgttagcagcatgagggcctgtggttagacctatagagggacggcccaggtggcaggatgtcctggtctggccttctccatggcctcaacacgtccctaacttgtggcccagctctggttccccggctctgggctacctgctccatggctaccctgaaccagatgcaccgcctggggccccccaagcggccgcctcggaagctgggccccacggaaggccggccgcagctgaagggtgtggtcctgtgcacgtttacccgcaagccgaagaagcccaactcagccaatcgcaagtgctgtcgagtgcggctcagcactggccgcgaggccgtctgcttcatccctggggagggccacaccctgcaggagcaccagattgtccttgtggagggcggccgcacccaggacctgccaggcgtcaagctcaccgttgtgcgtggcaagtacgactgtggccacgtgcagaagaagtgacggctgggggcacagtgggctgggcgcccctgcagaacatgaaccttccgctcctggctgccacagggtcctccgatgctggcctttgcgcctctagaggcagccactcatggattcaagtcctggctccgcctcttccatcaggaccactattaagccataggagtcctgggggtgcaaagggtgcccctctgtcaacacccttggctcctgtgtttagaggggtggcctgaaggaccttttctgctgggacaagacactgtactgccctctgctgggaaggggttttaataaacagaccctggcgcttgtgatgt

SEQ ID NO: 18366 - DNA, 1075 bp, Homo sapiens
  source 1..1075: mol_type = unassigned DNA
agctggattcagcgtgtccgcgacctcacctttaggtcctgtgaggtcggtggaatcctggggtcctccaaatctaccaggccatctccccagtttcccagttcttcctgcgtgcgggcgagagtggttgggccctcgggaacccactcagagcgaggctaaatttacggagggactttctgttagcagcatgagggcctgtggttagacctatagaggtatttcctttgatttaagccagaaagtcctgagagcggatcggggagcatttgcggatcggtcactttttcctcctttctgagtctcttatcccctaccacagggacggcccaggtggcaggatgtcctggtctggccttctccatggcctcaacacgtccctaacttgtggcccagctctggttccccggctctgggctacctgctccatggctaccctgaaccagatgcaccgcctggggccccccaagcggccgcctcggaagctgggccccacggaaggccggccgcagctgaagggtgtggtcctgtgcacgtttacccgcaagccgaagaagcccaactcagccaatcgcaagtgctgtcgagtgcggctcagcactggccgcgaggccgtctgcttcatccctggggagggccacaccctgcaggagcaccagattgtccttgtggagggcggccgcacccaggacctgccaggcgtcaagctcaccgttgtgcgtggcaagtacgactgtggccacgtgcagaagaagtgacggctgggggcacagtgggctgggcgcccctgcagaacatgaaccttccgctcctggctgccacagggtcctccgatgctggcctttgcgcctctagaggcagccactcatggattcaagtcctggctccgcctcttccatcaggaccactattaagccataggagtcctgggggtgcaaagggtgcccctctgtcaacacccttggctcctgtgtttagaggggtggcctgaaggaccttttctgctgggacaagacactgtactgccctctgctgggaaggggttttaataaacagaccctggcgcttgtgatgt

SEQ ID NO: 18367 - DNA, 2115 bp, Homo sapiens
  source 1..2115: mol_type = unassigned DNA
agtttgtagcggacaacatggcggccttcatgctgggctcgctgctgcggacgttcaagcagatggttccttcatcagcttcaggccaagttcgaagtcactatgtagactggagaatgtggcgcgatgtgaagagacgaaaaatggcctatgaatacgcagatgagaggctacgtattaattcactcaggaagaataccattttgccaaaaattcttcaggatgtggctgatgaagaaattgctgccctcccccgggatagctgtcctgttagaatcagaaatcggtgtgttatgacgtcccgtccgcgtggtgtgaagcggcgctggaggcttagtcgtatagtcttccgtcacttagctgaccatgggcaactttctgggatccagcgagcgacatggtaaatgagctccagaacctattgagcttgcagggaagccaagcttgcagttccagcaagcaaagattttttttaatagaccaaaccctaatctctacaggggcccagtacagttgtttggcctacctgatgctatctctaaactacttttaaaatgaagacatttgggtgtttcatgtcagtgaattatcttttctcttggacttaacaaacatactgttcccatacatagtacaaagagtagcataataaatattttctgtgaatgttttttataccctccttttaagtttaatcttttagtaacatataggggtttttgtattaagagcattatttcataaaatgctatcttatacataatccaactaattgacatgtagctcatgtatggcagtttgtaatcctggactagctttgctgacctgcagagctccccttaactattattgttagataaacagattggatagcaaggctgctgttctggattatctaatgctccacttcttcttgtgatggctgaacaaaagaaccactaagtgttttcttgtccatccttaagggactttaaaacaaattatgcctctttaagtccttgaaagtctccatctaaagaggaaaagtttgttggaacagtatatattccctatttttatgtttatttaatccataacagaaatgagtaagggtagcacaaagttctcattcagtaactcaacagtgtgatcatcagcccagtgataaaaatatacatactgaatggaagtacctacttaacatcaggaaaatattcctggagaacttaataaatcaggaggtgaggggtgagatttttttctgcacacagagggaacaaaagcacaaagaagcaaaggcactctgtagcatcagagaaccacagtcacttcagtagatcagaaatatgaagcacaagacaaggcccgtattgtggaggatctcacaaatcatgtgaaggaattaagactgacataccaggtattacagagttttaagcacaggaatgacatcatcagtttgtaatacaggtaagtgacagctgtgtggcagatggccatgagaggaaaaagctacaggcaagacaaccagttaggaggatgtcttagttgttgaggaagatgaaggcctgaactaacattgtggtattagtagaggagagaggacagatttttaaagttttaggaaagaaaattgggcaagacttacaagactgattatatctaagaggtaaagatggttctctgggttcctgataaaagtgtctagatagatggtagagggcaattccaagagggcaactccaagatagaaaatttggaaaaagaacaaatttaggggaaacagaagataagcgagttcaggttccagtcatgcggtgttggagatgcctgtgtcatctgatgaagactagtacgcagctggatagcagagtccgaaactcaggtggaggtgaagttatgagggaattatcacaatctagtttggattcatatttcttaaatatgtatgacaacttaccaactggaatgttctagctaatatctcaacttagaatccatctcactaccaatgggcaaacacttgtgttctaaagttacttgcaagtagtttatactgccaacttgatatatatacatgctatagtttgaacattttgtgtacttccaaaattcacattaaaatctaatccacaa

SEQ ID NO: 18368 - DNA, 1006 bp, Homo sapiens
  source 1..1006: mol_type = unassigned DNA
gtcacgccacctaatccattctctcggtcttcgtctgctccggtattgcaactgcctcgattggtcgatcctgggccagcatggcggcgcccatgtaacccggtccgtgccgcaaagcgaacggcggccgcggcgcgggccccgcgggggttagaggtcaccatgctgagggtcgcgtggaggacgctgagtttgattcggacccgggcagttacccaggtcctagtacccgggctgccgggcggtgggagcgccaagtttcctttcaaccagtggggcctgcagcctcgaagtctcctcctccaggccgcgcgcggatatgtcgtccggaaaccagcccagtctaggctggatgatgacccacctccctctacgctgctcaaagactaccagaatgtccctggaattgagaaggttgatgatgtcgtgaaaagactcttgtctttggaaatggccaacaagaaggagatgctaaaaatcaagcaagaacagtttatgaagaagattgttgcaaacccagaggacaccagatccctggaggctcgaattattgccttgtctgtcaagatccgcagttatgaagaacacttggagaaacatcgaaaggacaaagcccacaaacgctatctgctaatgagcattgaccagaggaaaaagatgctcaaaaacctccgtaacaccaactatgatgtctttgagaagatatgctgggggctgggaattgagtacaccttcccccctctgtattaccgaagagcccaccgccgattcgtgaccaagaaggctctgtgcattcgggttttccaggagactcaaaagctgaagaagcgaagaagagccttaaaggctgcagcagcagcccaaaaacaagcaaagcggaggaacccagacagccctgccaaagccataccaaagacactcaaagacagccaataaattctgttcaatcatttctttctgtcttgaagaatgataggagagatgatggggctctttttggcctgaa

SEQ ID NO: 18369 - DNA, 866 bp, Homo sapiens
  source 1..866: mol_type = unassigned DNA
attgtgggaagtatagggcggcaagcggaggaggcgtggcgagcggatcatccgcttccggagtcgaggttttcgggcttgtaccgcttggcggtgcggcctggtgtcggcttgcaggttctttctgtgtttgttctctgccctgccaaggccgtagagctggtgcgtgcgggtagcggggctctccgaggagccgcacgccggcggcaccatggtccacctcactactctcctctgcaaggcctaccgtgggggccacttaaccatccgccttgccctgggtggctgcaccaatcggccgttctaccgcattgtggctgctcacaacaagtgtcccagggatggccgtttcgtagagcagctgggctcctatgatccattgcccaacagtcatggagaaaaactcgttgccctcaacctagacaggatccgtcattggattggctgcggggcccacctctctaagcctatggaaaagcttctgggtctcaagtattcccatgtgttttaaaagcctgaagtcagtgagatgaaattcaacatcaagaatttgaagtaacttgtaaggaaaaataatataaagataccattggggcagtggctcacacctgtaatctcagcactttgggaggctgaggtggaaggatcacttgaagccagagtttgagaccagcctgtgcaacacagcaagaccccgtctctacaaaaacttaaaaaattagctggctgtggtgttgctcacccatagttccagctactcgggaagctgaggcagtaagatcacttgagcccaggaggccgatgctgcagtgaactgtgattgttccactacagtccagcctgggtgacagagaaaagaaaaagaa

SEQ ID NO: 18370 - DNA, 2634 bp, Homo sapiens
  source 1..2634: mol_type = unassigned DNA
attgtgggaagtatagggcggcaagcggaggaggcgtggcgagcggatcatccgcttccggagtcgaggttttcgggcttgtaccgcttggcggtgcggcctggtgtcggcttgcaggttctttctgtgtttgttctctgccctgccaaggccgtagagctggtgcgtgcgggtagcggggctctccgaggagccgcacgccggcggcaccatggtccacctcactactctcctctgcaaggcctaccgtgggggccacttaaccatccgccttgccctgggtggctgcaccaatcggccgttctaccgcattgtggctgctcacaacaagtgtcccagggatggccgtttcgtagagcagctgggctcctatgatccattgcccaacagtcatggagaaaaactcgttgccctcaacctagacaggatccgtcattggattggctgcggggcccacctctctaagcctatggaaaagcttctgggtcttgctggctttttccctctgcatcctatgatgatcacaaatgctgagagactgcgaaggaaacgggcacgtgaagtcctgttagcttctcagaaaacagatgcagaagctacagatacagaggctacagaaacataaatgagctgactttagtgagcatagcagtgggaacaaggtcaaggtccttttgaaacactgcagcgatcttaattttgttagatttggagttcaataaatggagtatcctgagttgcccttgctcttctggcctggcctgcacagggcccagggagagatttgttcttgtgtgacttagagctgggtgtgggtactaattagcttttttcgactttgtcttgggatagacagtggctatgggaggattggacttttgagttgggctctgggtctcttggacaactttacaatttactggcttccaagacttcctgcttcaaaacccccagccagactattcatggcccattcagatcttcatgttcatcccacaagtgcaagaacagttaacctttcttaattgatttttgtaattggaggtttatattgtcttgcctaatgcatattctctttttttttttttttttgagacggagtcttgttctgttgccaggctggagtgcggtggtgcaatctcagctcactgcaatctccacctcctgggttcaagaggttctcctgcctcagcctcctgagtagccggggagctacaagcatgcaccaccacacccagctaattttttttttttttttgagaggagtctcgctctgtcgcccaggcttgagtgcagtggcgcgatctcggctcactgcaagctctgtctcctgggttcatgccattctcctgcttcagcctcccgagtagtcccaggagtagctgggactacaggtgcccaccaccacacccagctaatttttttgtatttttagtagagatggggtttcaccatgttatccaggatggttttgatctcctgacctcgtgatccgcccgccttggcctcccaaaagtgctgggattataggcgtgagccaccgcccgggcaaatttttgtatttttagtagagatggggtttcaccgtgttggccaggatggtctcaatctgaccttgtgatctgcccacctcggcctcccaaagtgctaggattactggcgtgagccaccactcctagccttaatgcatattcttaaatatacaaaggtagatttgttatgaaaattgctttggggctctaataacctaccttttaagaatgagaaactgctgggcttaagggagttcagtatgaatcaagattgaaccattcaaatgtggctgtgatttctgcatatatcatagatgggatccttctgagaatactggaatagggaattaggacaccaagccaattcagctgtgaaccttattcttgtacttttctttcttgctggtaattttatggagcaggttaagaaggctgctctgtgttaggataaactgtataccaataatgttgacaacctgtaatgagtgttgcattttacttcttgtatcttttccttcctaccttgatgccagtaatctataagggatctttatagtttgaatgtatttgaataacttcagtatactttagttctacttttttatttgactcacaaccattcttaggtctcaagtattcccatgtgttttaaaagcctgaagtcagtgagatgaaattcaacatcaagaatttgaagtaacttgtaaggaaaaataatataaagataccattggggcagtggctcacacctgtaatctcagcactttgggaggctgaggtggaaggatcacttgaagccagagtttgagaccagcctgtgcaacacagcaagaccccgtctctacaaaaacttaaaaaattagctggctgtggtgttgctcacccatagttccagctactcgggaagctgaggcagtaagatcacttgagcccaggaggccgatgctgcagtgaactgtgattgttccactacagtccagcctgggtgacagagaaaagaaaaagaaaacattacataatttggctagagcataataatttgattttctggtttttgaaaatttgagttgcaataaaaggatatttcagtgtgcgatttcaa

SEQ ID NO: 18371 - DNA, 996 bp, Homo sapiens
  source 1..996: mol_type = unassigned DNA
agtcgaggttttcgggcttgtaccgcttggcggtgcggcctggtgtcggcttgcaggttctttctgtgtttgttctctgccctgccaaggccgtagagctggtgcgtgcgggtagcggggctctccgaggagccgcacgccggcggcaccatggtccacctcactactctcctctgcaaggcctaccgtgggggccacttaaccatccgccttgccctgggtggctgcaccaatcggccgttctaccgcattgtggctgctcacaacaagtgtcccagggatggccgtttcgtagagcagctgggctcctatgatccattgcccaacagtcatggagaaaaactcgttgccctcaacctagacaggatccgtcattggattggctgcggggcccacctctctaagcctatggaaaagcttctgggtaagacggacgccagatttccagagcaaggggaggagagacccgagcaacatcacttccctgaagacctagctcctgcgcgcggccggggactgtgactccacatgccggcgttacttacccgggcccgcgcctgactcgccacacctcattttgcggccgccgtaaagcgcggatgcgcggcgtggccacgccccttcagtgcttgtgacgcaggcgccctgggctttttgggcgcgaaaaagaagcagtcctgggttgtacccggcgcagctgggagcggctgcttcctccggggtcgtatctccgcccggcatggggctgctggacctttgcgaggaagtgttcggcaccgccgacctttaccgggtgctgggcgtgcgacgcgaggcctccgacggcgaggtccgacgaggctaccacaaggtgtccctgcaggtacacccggaccgggtgggtgagggcgacaaggaggacgccacccgccgcttccagatcctgggaaaagtctattccgttctcagtgacagagaacagagagcagtgtacgatgagcagggaacagtggacga

SEQ ID NO: 18372 - DNA, 1843 bp, Homo sapiens
  source 1..1843: mol_type = unassigned DNA
atgcacggcctacgagaggggtagtgtgggactgagccaatgcgtacggcgtgacgccatcccgctgcgaccggcgctccccggggcaggtggctgcatagtcttggcggaggtgaccaaagccacgtaatgtccgtagttcgctcatccgtccatgccagatggattgtggggaaggtgattgggacaaaaatgcaaaagactgctaaagtgagagtgaccaggcttgttctggatccctatttattaaagtattttaataagcggaaaacctactttgctcacgatgcccttcagcagtgcacagttggggatattgtgcttctcagagctttacctgttccacgagcaaagcatgtgaaacatgaactggctgagatcgttttcaaagttggaaaagtcatagatccagtgacaggaaagccctgtgctggaactacctacctggagagtccgttgagttcggaaaccacccagctaagcaaaaatctggaagaactcaatatctcttcagcacagtgaagcgggagtggaagaaggatctaaagggaaaaactgacatgtttatgttatggaaaaagaaatttttctaagtttcatcacaaactgtgtccagtttctctgtggtgtttatgaaatagctaaaagcaaatgaagtaaagggcatactatggtttttcacaaaggtttatggtcgtgtttcaaattttcatcatttcagtgaacatacttccacgttacattaagtgtgcctagcagtctgttgcattttgtaagctcacagttttttgttttgagatggaatctcactctgtcacccaggctggagtgcagtggtgcaatcttggctcactgcaagctccgcctcccgggttcacgccgttctcctgcctcagcctcccgagtagctgggactacaggcgcctgccaccatgcccagctaatttttttttttttttttttggtatttttagtagagacggggtttcaccgtgttagccaggatggtcttgatctcctgacctcgtgatctgcctgccttggcctctcagagtgctgggattacaggcgtgagccactgtgcttagcaagctcactgttttagaaggttttatttttgtcttttgagacagggttttgctttgttgtgggggctggagtgcagtggtatgatcttggctcactgcagccttgacctccctggctctagcatctttccaccccagccttctgagtagctgggaacacaggagcgtaccactacacttggctgattttttgtaaattttgtagagacagggtctccctgtgttgcccaggttggtctcggactcctgggagcaatctgcccatcttggcctaacagtgctgggattacaggcctgagccactgtgcccagccggtttcctttatttcattcaaaggaattttgaatttatcttagaacctttattttgaaggaagaaagtcttttttttttttgagctggagtttcactcttgttgcccaggctggagtgcaatggcatgatctcagcccaccacgacctccgcctcccaggttcaagtgattctgcttcagcctcctgagtagctaggattacaggcatgtgccaccacgcccagctaattttgtatttttagtagggatggggtttctccatgtttgtcaggctagtcttgaactccggacctcaggtgatccgcccgcctgggcctctcaaagtgcttggattacaggcatgagccactgcatgtaatgaccagccactggtcagaattctttcaatcaagctgtgttaataagaatattgatgtgtggaaaataaaattttacaattct

SEQ ID NO: 18373 - DNA, 718 bp, Homo sapiens
  source 1..718: mol_type = unassigned DNA
cggggtattgctgccgggggaggatttgctggggacccaaggcaccctcgcgtgagagccctgagagcgaatcgcttcgtctgacctcggggttgtctggggcgagggcacgaatcaccccaacctttccgaagcctggtggaatggcttgtgaactgatctcaaaagcagcccaagtcatccgtcgctgggccggggagggggacaccgcggcggccccgccgagtgctacctgggcactgagcctgtggggagaggcgacccagcggggtggagagagataagggaccagtaacgtccagcgtttgtccgtggtgaccaaagccacgtaatgtccgtagttcgctcatccgtccatgccagatggattgtggggaaggtgattgggacaaaaatgcaaaagactgctaaagtgagagtgaccaggcttgttctggatccctatttattaaagtattttaataagcggaaaacctactttgctcacgatgcccttcagcagtgcacagttggggatattgtgcttctcagagctttacctgttccacgagcaaagcatgtgaaacatgaactggctgagatcgttttcaaagttggaaaagtcatagatccagtgacaggaaagccctgtgctggaactacctacctggagagtccgttgagttcggaaaccacccagctaagcaaaaatctggaagaactcaatatctcttcagca

SEQ ID NO: 18374 - DNA, 785 bp, Homo sapiens
  source 1..785: mol_type = unassigned DNA
aggtttttgaagatggcggccctcaaggctctggtgtccggctgtgggcggcttctccgtgggctactagcgggcccggcagcgaccagctggtctcggcttccagctcgcgggttcagggaagtggtggagacccaagaagggaagacaactataattgaaggccgtatcacagcgactcccaaggagagtccaaatcctcctaacccctctggccagtgccccatctgccgttggaacctgaagcacaagtataactatgacgatgttctgctgcttagccagttcatccggcctcatggaggcatgctgccccgaaagatcacaggcctatgccaggaagaacaccgcaagatcgaggagtgtgtgaagatggcccaccgagcaggtacctgacgcgctgggctcctggctccgtcaagcccatctacaaaaaaggcccccgctggaacagggtgcgcatgcccgtggggtcaccccttctgagggacaatgtctgctactcaagaacaccttggaagctgtatcactgacagagagcagtgcttccagagttcctcctgcacctgtgctggggagtaggaggcccactcacaagcccttggccacaactatactcctgtcccaccccaccacgatggcctggtccctccaacatgcatggacaggggacagtgggactaacttcagtacccttggcctgcacagtagcaatgctgggagctagaggcaggcagggcagttgggtcccttgccagctgctatggggcttaggccatgctcag

SEQ ID NO: 18375 - DNA, 1150 bp, Homo sapiens
  source 1..1150: mol_type = unassigned DNA
ggacgagaggtcagggtaggtttttgaagatggcggccctcaaggctctggtgtccggctgtgggcggcttctccgtgggctactagcgggcccggcagcgaccagctggtctcggcttccagctcgcgggttcagggaagtggtggagacccaagaagggaagacaactataattgaaggccgtatcacagcgactcccaaggagagtccaaatcctcctaacccctctggccagtgccccatctgccgttggaacctgaagcacaagtataactatgacgatgttctgctgcttagccagttcatccggcctcatggaggcatgctgccccgaaagatcacaggcctatgccaggaagaacaccgcaagatcgaggagtgtgtgaagatggcccaccgagcaggtagaaggccctggggaccaagaggggcagagggctgcaggcactctctccccacccagctgccccatgtttcagcccctcctggaagaaaagtggatatccggagtgttaattatactcaccacccaatgccaaccttcccgctcccttgggctttccctctggccccctcagagctgcagagggagctgcaaagactatcccctcttccccgccactcaggtctattaccaaatcacaggcctcggcttcctgaaggagttgttccgaagagcaaaccccaactcaaccggtacctgacgcgctgggctcctggctccgtcaagcccatctacaaaaaaggcccccgctggaacagggtgcgcatgcccgtggggtcaccccttctgagggacaatgtctgctactcaagaacaccttggaagctgtatcactgacagagagcagtgcttccagagttcctcctgcacctgtgctggggagtaggaggcccactcacaagcccttggccacaactatactcctgtcccaccccaccacgatggcctggtccctccaacatgcatggacaggggacagtgggactaacttcagtacccttggcctgcacagtagcaatgctgggagctagaggcaggcagggcagttgggtcccttgccagctgctatggggcttaggccatgctcagtgctggggacaggagttttgcccaacgcagtgtcataaactgggttcatgggctta

SEQ ID NO: 18376 - DNA, 1062 bp, Homo sapiens
  source 1..1062: mol_type = unassigned DNA
aggtttttgaagatggcggccctcaaggctctggtgtccggctgtgggcggcttctccgtgggctactagcgggcccggcagcgaccagctggtctcggcttccagctcgcgggttcagggaagtggtggagacccaagaagggaagacaactataattgaaggccgtatcacagcgactcccaaggagagtccaaatcctcctaacccctctggccagtgccccatctgccgttggaacctgaagcacaagtataactatgacgatgttctgctgcttagccagttcatccggcctcatggaggcatgctgccccgaaagatcacaggcctatgccaggaagaacaccgcaagatcgaggagtgtgtgaagatggcccaccgagcaggtctattaccaaatcacaggcctcggcttcctgaaggagttgttccgaagagcaaaccccaactcaaccggtacctgacgcgctgggctcctggctccgtcaagcccatctacaaaaaaggcccccgctggaacagggtgcgcatgcccgtggggtcaccccttctgagggacaatgtctgctactcaagaacaccttggaagctgtatcactgacagagagcagtgcttccagagttcctcctgcacctgtgctggggagtaggaggcccactcacaagcccttggccacaactatactcctgtcccaccccaccacgatggcctggtccctccaacatgcatggacaggggacagtgggactaacttcagtacccttggcctgcacagtagcaatgctgggagctagaggcaggcagggcagttgggtcccttgccagctgctatggggcttaggccatgctcagtgctggggacaggagttttgcccaacgcagtgtcataaactgggttcatgggcttacccattgggtgtgcgctcactgcttgggaagtgcagggggtcctgggcacattgccagctgggtgctgagcattgagtcactgatctcttgtgatggggccaatgagtcaattgaattcatgggccaaacaggtcccatcctcttcatgac

SEQ ID NO: 18377 - DNA, 803 bp, Homo sapiens
  source 1..803: mol_type = unassigned DNA
aggtttttgaagatggcggccctcaaggctctggtgtccggctgtgggcggcttctccgtgggctactagcgggcccggcagcgaccagctggtctcggcttccagctcgcgggttcagggaagtggtggagacccaagaagggaagacaactataattgaaggccgtatcacagcgactcccaaggagagtccaaatcctcctaacccctctggccagtgccccatctgccgttggaacctgaagcacaagtataactatgacgatgttctgctgcttagccagttcatccggcctcatggaggcatgctgccccgaaagatcacaggcctatgccaggaagaacaccgcaagatcgaggagtgtgtgaagatggcccaccgagcaggtagaaggccctggggaccaagaggggcagagggctgcaggcactctctccccacccagctgccccatgtttcagcccctcctggaagaaaagtggatatccggagtgttaattatactcaccacccaatgccaaccttcccgctcccttgggctttccctctggccccctcagagctgcagagggagctgcaaagactatcccctcttccccgccactcaggtctattaccaaatcacaggcctcggcttcctgaaggagttgttccgaagagcaaaccccaactcaaccggtacctgacgcgctgggctcctggctccgtcaagcccatctacaaaaaaggcccccgctggaacagggtgcgcatgcccgtggggtcaccccttctgagggacaatgtctgctactcaagaac

SEQ ID NO: 18378 - DNA, 1532 bp, Homo sapiens
  source 1..1532: mol_type = unassigned DNA
agcttctcccccatgccttccctttcacgcttccgtcctgacgcaaacgtggggccgccttccgcactgcgggcttgtccttggccctgccctactcagtttcctgaagcatgcgcagttgcctttccgtcaattcctgtcctgggcgtacgtcaagatggcggcgtctgtattaaacaccgtgctgaggcggcttcctatgctatctctcttccgaggttctcacagagttcaggttcccctccagactctttgcaccaaagctccctctgaggaagattctttgtcctcagttcccatttctccttataaggatgagccctggaaatatctggaatcagaagaataccaggagcgatatggttctcgccccgtctgggctgactaccgccgcaaccacaagggtggtgtacccccacagcggactcggaagacatgtattcgtcggaataaagttgttgggaatccctgccccatctgtcgagatcacaagttgcatgttgactttaggaacgtgaagctcttggagcaatttgtctgcgcccacacgggtatcatcttctatgctccatacacaggagtctgtgtgaagcagcacaagcggttgacccaggccatccagaaagccagggatcatggtctcctcatttaccacatcccccaggttgaaccacgggaccttgacttcagtacctctcatggggctgtgagtgctactccgccagcccccaccctggtctcaggtgacccctggtacccatggtacaactggaaacagccaccggagagagaactgtctcgccttcgccggctttaccagggtcatctccaagaagagagtggccccccacctgagtcaatgcccaagatgccccctagaacaccagcggaagcctcctccactgggcagacaggccctcagagtgctctgtaggagctgtagactgggaagagaggccaggcgtggtggctcactcctgtaatcccagcactttgggaagccaaggtgggctgatcacttgatcccaggagtttgagaccagcctgggcaccatggtgaaacctcgtctttaccaaaaaatacaaaaattagctgggtgtggtggtgcacacctgtagtctcaactattggggaggctaaggtaggatcacttgatcccaggaggcggaggttgcagtgagttgcagtcacacccctgcactccagcctgggtgacagctagaccctgtctcaaaaaaaaaaaaaaagactgggaagagagctagagggactaggagataatgtgtatgtaggtttatgtgatgggatatcaccctgaagagttgtgtcttttgtggccagtgacaaatccaggaaatgaatgttgctgatagggataaatcttgaggctgagggcgggtggtacagatgtgtatgggaaaccccaacccctatatattgtaaatagatgggctgggctaaacattgttgccgtttcatacttctaccaactcagcttttacacaataaagctctactgtctctggtttgc

SEQ ID NO: 18379 - DNA, 1532 bp, Homo sapiens; identical to SEQ ID NO: 18378
  source 1..1532: mol_type = unassigned DNA

SEQ ID NO: 18380 - DNA, 1252 bp, Homo sapiens
  source 1..1252: mol_type = unassigned DNA
gtcaagatggcggcgtctgtattaaacaccgtgctgaggcggcttcctatgctatctctcttccgaggttctcacagagttcaggttcccctccagactctttgcaccaaagctccctctgaggaagattctttgtcctcagttcccatttctccttataaggatgagccctggaaatatctggaatcagaagaataccaggagcgatatggttctcgccccgtctgggctgactaccgccgcaaccacaagggtggtgtacccccacagcggactcggaagacatgtattaacgtgaagctcttggagcaatttgtctgcgcccacacgggtatcatcttctatgctccatacacaggtctcctcatttaccacatcccccaggttgaaccacgggaccttgacttcagtacctctcatggggctgtgagtgctactccgccagcccccaccctggtctcaggtgacccctggtacccatggtacaactggaaacagccaccggagagagaactgtctcgccttcgccggctttaccagggtcatctccaagaagagagtggccccccacctgagtcaatgcccaagatgccccctagaacaccagcggaagcctcctccactgggcagacaggccctcagagtgctctgtaggagctgtagactgggaagagaggccaggcgtggtggctcactcctgtaatcccagcactttgggaagccaaggtgggctgatcacttgatcccaggagtttgagaccagcctgggcaccatggtgaaacctcgtctttaccaaaaaatacaaaaattagctgggtgtggtggtgcacacctgtagtctcaactattggggaggctaaggtaggatcacttgatcccaggaggcggaggttgcagtgagttgcagtcacacccctgcactccagcctgggtgacagctagaccctgtctcaaaaaaaaaaaaaaagactgggaagagagctagagggactaggagataatgtgtatgtaggtttatgtgatgggatatcaccctgaagagttgtgtcttttgtggccagtgacaaatccaggaaatgaatgttgctgatagggataaatcttgaggctgagggcgggtggtacagatgtgtatgggaaaccccaacccctatatattgtaaatagatgggctgggctaaacattgttgccgtttcatacttctaccaactcagcttttacacaataaagctctactgtctctggtttgc

SEQ ID NO: 18381 - DNA, 1252 bp, Homo sapiens; identical to SEQ ID NO: 18380
  source 1..1252: mol_type = unassigned DNA

SEQ ID NO: 18382 - DNA, 1532 bp, Homo sapiens; identical to SEQ ID NO: 18378
  source 1..1532: mol_type = unassigned DNA

SEQ ID NO: 18383 - DNA, 1252 bp, Homo sapiens; identical to SEQ ID NO: 18380
  source 1..1252: mol_type = unassigned DNA

SEQ ID NO: 18384 - DNA, 1252 bp, Homo sapiens; identical to SEQ ID NO: 18380
  source 1..1252: mol_type = unassigned DNA

SEQ ID NO: 18385 - DNA, 1532 bp, Homo sapiens; identical to SEQ ID NO: 18378
  source 1..1532: mol_type = unassigned DNA

SEQ ID NO: 18386 - DNA, 1252 bp, Homo sapiens; identical to SEQ ID NO: 18380
  source 1..1252: mol_type = unassigned DNA

SEQ ID NO: 18387 - DNA, 1532 bp, Homo sapiens; identical to SEQ ID NO: 18378
  source 1..1532: mol_type = unassigned DNA

SEQ ID NO: 18388 - DNA, 1252 bp, Homo sapiens; identical to SEQ ID NO: 18380
  source 1..1252: mol_type = unassigned DNA

SEQ ID NO: 18389 - DNA, 1252 bp, Homo sapiens; identical to SEQ ID NO: 18380
  source 1..1252: mol_type = unassigned DNA

SEQ ID NO: 18390 - DNA, 1532 bp, Homo sapiens; identical to SEQ ID NO: 18378
  source 1..1532: mol_type = unassigned DNA

SEQ ID NO: 18391 - DNA, 1532 bp, Homo sapiens; identical to SEQ ID NO: 18378
  source 1..1532: mol_type = unassigned DNA

SEQ ID NO: 18392 - DNA, 1213 bp, Homo sapiens
  source 1..1213: mol_type = unassigned DNA
gtcctgggcgtacgtcaagatggcggcgtctgtattaaacaccgtgctgaggcggcttcctatgctatctctcttccgaggttctcacagagttcaggttcccctccagactctttgcaccaaagctccctctgaggaagattctttgtcctcagttcccatttctccttataaggatgagccctggaaatatctggaatcagaagaataccaggagcgatatggttctcgccccgtctgggctgactaccgccgcaaccacaagggtggtgtacccccacagcggactcggaagacatgtattcgtcggaataaagttgttgggaatccctgccccatctgtcgagatcacaagttgcatgttgactttagggagtctgtgtgaagcagcacaagcggttgacccaggccatccagaaagccagggatcatggtctcctcatttaccacatcccccaggttgaaccacgggaccttgacttcagtacctctcatggggctgtgagtgctactccgccagcccccaccctggtctcaggtgacccctggtacccatggtacaactggaaacagccaccggagagagaactgtctcgccttcgccggctttaccagggtcatctccaagaagagagtggccccccacctgagtcaatgcccaagatgccccctagaacaccagcggaagcctcctccactgggcagacaggccctcagagtgctctgtaggagctgtagactgggaagagaggccaggcgtggtggctcactcctgtaatcccagcactttgggaagccaaggtgggctgatcacttgatcccaggagtttgagaccagcctgggcaccatggtgaaacctcgtctttaccaaaaaatacaaaaattagctgggtgtggtggtgcacacctgtagtctcaactattggggaggctaaggtaggatcacttgatcccaggaggcggaggttgcagtgagttgcagtcacacccctgcactccagcctgggtgacagctagaccctgtctcaaaaaaaaaaaaaaagactgggaagagagctagagggactaggagataatgtgtatgtaggtttatgtgatgggatatcaccctgaagagttgtgtcttttgtggccagtgacaaatccaggaaatgaatgttgctgatagggataaatcttgaggctgagggcgggtggtacagatgtgtatgg

SEQ ID NO: 18393 - DNA, 1213 bp, Homo sapiens; identical to SEQ ID NO: 18392
  source 1..1213: mol_type = unassigned DNA

SEQ ID NO: 18394 - DNA, 1213 bp, Homo sapiens; identical to SEQ ID NO: 18392
  source 1..1213: mol_type = unassigned DNA

SEQ ID NO: 18395 - DNA, 1213 bp, Homo sapiens; identical to SEQ ID NO: 18392
  source 1..1213: mol_type = unassigned DNA

SEQ ID NO: 18396 - DNA, 1213 bp, Homo sapiens; identical to SEQ ID NO: 18392
  source 1..1213: mol_type = unassigned DNA

SEQ ID NO: 18397 - DNA, 1213 bp, Homo sapiens; identical to SEQ ID NO: 18392
  source 1..1213: mol_type = unassigned DNA

SEQ ID NO: 18398 - DNA, 1213 bp, Homo sapiens; identical to SEQ ID NO: 18392
  source 1..1213: mol_type = unassigned DNA

SEQ ID NO: 18399 - DNA, 1643 bp, Homo sapiens
  source 1..1643: mol_type = unassigned DNA
agcgttctcctgcggaacctttgaacggggtactcgagcccacaggggaagagcagcggaaggggcctttcggaacgatttggaacgaaaggaagtggaagaaacgcggaaccatggccgctgtggttgctgtttgcggtggtctagggaggaagaagttgacacacttggtaacggctgctgtcagccttacacatcccgggactcacacggtgctttggagaagaggttgttcacaacaggtatccagcaatgaggacctgcccatttcaatggaaaatccttataaagaacctcttaagaaatgtatcttgtgtggaaagcatgtagattataagaatgtacagcttttgtcccagtttgtttctccatttactggatgcatttatggaaggcacattacaggtctttgtgggaagaaacagaaagaaatcacaaaagcaattaagagagctcaaataatggggtttatgccagttacatacaaggatcctgcatatctcaaggaccctaaagtttgtaacatcagatatcgggaataaattctatcacgttaccactaataaacttattttacagtaagtggttgtatgatgccaatactgactcaaaccaacctttggatagaaaagtgtttgaggagtgaggtaaagaatgacacttccccttcataccaatgtccattaagcagattgcttatttaaaatgttaacactcatcacattttatctatgttgaataaaagtggttctgtgtgattgtcatttatatctgatccccaaatagctcatacaataatccattcaatagaatggaattaaaactgttcagaatgattttccaactagcaaatataagtatgcctggttaagatatcttccctttgtagaaatgttacattgggatggatagtggtgctgtcacagaaggacaaaatattcctagacgagtctaccctcaaaccagtagtgtcttttacatgaagagatgatttacacctaatagacattgaatatgatagacatacatgtatatatgtatcagttctgagttccactggcctatcccaaatacactggattaccaggcttgtactgtattcaaaatgatagatttgctaaatttcatgcaaaggactctaaactaggggagagattactgtttgtgttgtgttatagttgtgtaataattaaggctgccagatttagcaagtacaaatgtaggacaaatttaaattttagatgatgttttgcaaatttattgcatgatatccagcattttatctggcaactctagccataatgtacttctaaaaaagtatcacttaaggagaattttaatgactcagataaattttcatataaatttctttccatattttgaaaataaggctattcttgcttttccattttattttttaatagacatggtctcaatacgttgcccaggctggtctctaactcctaacttcaatcaatcctcctgacttgtcttccctaagtgctgggattacaggtgtgagccactgtgcctggtctcacttttccaattctaaagaatgtgtctgtgtaagccttcccctcaacaacttagtgaaaggtgaaaaaaaggtttggaaataaaagcatctgatgtttgaaaaa

SEQ ID NO: 18400 - DNA, 666 bp, Homo sapiens
  source 1..666: mol_type = unassigned DNA
ctttgaacggggtactcgagcccacaggggaagagcagcggaaggggcctttcggaacgatttggaacgaaaggaagtggaagaaacgcggaaccatggccgctgtggttgctgtttgcggtggtctagggaggaagaagttgacacacttggtaacggctgctgtcagccttacacatcccgggactcacacggtgctttggagaagaggttgttcacaacaggtatccagcaatgaggacctgcttttgtcccagtttgtttctccatttactggatgcatttatggaaggcacattacaggtctttgtgggaagaaacagaaagaaatcacaaaagcaattaagagagctcaaataatggggtttatgccagttacatacaaggatcctgcatatctcaaggaccctaaagtttgtaacatcagatatcgggaataaattctatcacgttaccactaataaacttattttacagtaagtggttgtatgatgccaatactgactcaaaccaacctttggatagaaaagtgtttgaggagtgaggtaaagaatgacacttccccttcataccaatgtccattaagcagattgcttatttaaaatgttaacactcatcacattttatctatgttgaataaaagtggttctgtgtgattgtcattta

SEQ ID NO: 18401 - DNA, 1502 bp, Homo sapiens
  source 1..1502: mol_type = unassigned DNA
cgcggatggcgacggaaggggaggccgctcggcctggcctggagggagacctcgctctgccccgcgtcccagccatggcgacatcctcggccgcgctgccccgaatactcggcgcgggtgcccgggccccgtcgcgctggttgggctttctcgggaaggcgaccccccggcctgctcggccgagccgcaggacgcttggaagcgcgacggcccttatgatccgcgagtcggaggacagcaccgatttcaacgacaagattttgaatgagcccctcaagcactctgacttcttcaatgtcaaggaactgttttccgtgagaagcctcttcgatgcccgagtccatctgggacacaaagctggctgtcggcacaggtttatggagccgtacatctttgggagccgcctggaccacgacatcatcgacctggaacagacagccacgcacctccagctggccttgaacttcaccgcccacatggcctaccgcaagggcatcatcttgtttataagccgcaaccggcagttctcgtacctgattgagaacatggcccgtgactgtggcgagtacgcccacactcgctacttcaggggcggcatgctgaccaacgcgcgcctcctctttggccccacggtccgcctgccggacctcatcatcttcctgcacacgctcaacaacatctttgagccacacgtggccgtgagagacgcagccaagatgaacatccccacagtgggcatcgtggacaccaactgcaacccctgcctcatcacctaccctgtacccggcaatgacgactctccgctggctgtgcacctctactgcaggctcttccagacggccatcacccgggccaaggagaagcggcagcaggttgaggctctctatcgcctgcagggccagaaggagcccggggaccaggggccagcccaccctcctggggctgacatgagccattccctgtgatgttcactctcctcccaaagcaaaccacagccaagcctgtctgagctgggagtccccttccccagccctgggtcagcggcatcctcagtcgttgttacttactcagctgatgtcacagtgcagacatccaccgttccaccacagaaccagtggctgagcggaccaacgttgccatgtgcgtttgctctgtggggaacagagcacagagggtgagcgacatgtgcagaacggccccttggctgcagttaggacctcagtggctggtatggccaagctgctagaagatgctgctgtccctgtgatcccagcagccctcccttcaccgtgacccctgacctttgtcaggaaggtgcagtttttcttctcaatctaaatgcctttcaggtgggccgcttccttggctacctggttccagggggctgttttgtaatgagatgctgctggcaggccactcagaggctcccagctgggttggtgggacagccaggccagatgacctgattccagcaaaaataaaactcagatttgggcaaaatg

SEQ ID NO: 18402 - DNA, 1640 bp, Homo sapiens
  source 1..1640: mol_type = unassigned DNA
aacctgccgggcgactccccaagggccgggaaggtcgggacggcgagagattccctgctgggaccgtcggaggtcccagccgcctggggacagcgctgtggctcctccgggcctgtaggcggcactgcggccccgcgcggatggcgacggaaggggaggccgctcggcctggcctggagggagacctcgctctgccccgcgtcccagccatggcgacatcctcggccgcgctgccccgaatactcggcgcgggtgcccgggccccgtcgcgctggttgggctttctcgggaaggcgaccccccggcctgctcggccgagccgcaggacgcttggaagcgcgacggcccttatgatccgcgagtcggaggacagcaccgatttcaacgacaagattttgaatgagcccctcaagcactctgacttcttcaatgtcaaggaactgttttccgtgagaagcctcttcgatgcccgagtccatctgggacacaaagctggctgtcggcacaggtttatggagccgtacatctttgggagccgcctggaccacgacatcatcgacctggaacagacagccacgcacctccagctggccttgaacttcaccgcccacatggcctaccgcaagggcatcatcttgtttataagccgcaaccggcagttctcgtacctgattgagaacatggcccgtgactgtggcgagtacgcccacactcgctacttcaggggcggcatgctgaccaacgcgcgcctcctctttggccccacggtccgcctgccggacctcatcatcttcctgcacacgctcaacaacatctttgagccacacgtggccgtgagagacgcagccaagatgaacatccccacagtgggcatcgtggacaccaactgcaacccctgcctcatcacctaccctgtacccggcaatgacgactctccgctggctgtgcacctctactgcaggctcttccagacggccatcacccgggccaaggagaagcggcagcaggttgaggctctctatcgcctgcagggccagaaggagcccggggaccaggggccagcccaccctcctggggctgacatgagccattccctgtgatgttcactctcctcccaaagcaaaccacagccaagcctgtctgagctgggagtccccttccccagccctgggtcagcggcatcctcagtcgttgttacttactcagctgatgtcacagtgcagacatccaccgttccaccacagaaccagtggctgagcggaccaacgttgccatgtgcgtttgctctgtggggaacagagcacagagggtgagcgacatgtgcagaacggccccttggctgcagttaggacctcagtggctggtatggccaagctgctagaagatgctgctgtccctgtgatcccagcagccctcccttcaccgtgacccctgacctttgtcaggaaggtgcagtttttcttctcaatctaaatgcctttcaggtgggccgcttccttggctacctggttccagggggctgttttgtaatgagatgctgctggcaggccactcagaggctcccagctgggttggtgggacagccaggccagatgacctgattccagcaaaaataaaactcagatttgggcaaaatgaga

SEQ ID NO: 18403 - DNA, 810 bp, Homo sapiens
  source 1..810: mol_type = unassigned DNA
cggaggggcccgttggggatgcggtggggagcgggcgtggtgcattcgggactcggcgccaggacctctatctacttccccccaggtgcccgggccccgtcgcgctggttgggctttctcgggaaggcgaccccccggcctgctcggccgagccgcaggacgcttggaagcgcgacggcccttatgatccgcgagtcggaggacagcaccgatttcaacgacaagattttgaatgagcccctcaagcactctgacttcttcaatgtcaaggaactgttttccgtgagaagcctcttcgatgcccgagtccatctgggacacaaagctggctgtcggcacaggtttatggagccgtacatctttgggagccgcctggaccacgacatcatcgacctggaacagacagccacgcacctccagctggccttgaacttcaccgcccacatggcctaccgcaagggcatcatcttgtttataagccgcaaccggcagttctcgtacctgattgagaacatggcccgtgactgtggcgagtacgcccacactcgctacttcaggggcggcatgctgaccaacgcgcgcctcctctttggccccacggtccgcctgccggacctcatcatcttcctgcacacgctcaacaacatctttgagccacacgtggccgtgagagacgcagccaagatgaacatccccacagtgggcatcgtggacaccaactgcaacccctgcctcatcacctaccctgtacccggcaatgacgactctccgctggctgtgcacctctactgcaggctcttccagacggcc

SEQ ID NO: 18404 - DNA, 1078 bp, Homo sapiens
  source 1..1078: mol_type = unassigned DNA
ttccggtgggctaggtactgagcgcgcgaggctctacagagtgaaggtttaaatccaaggtcatggcaaaacatctgaagttcatcgccaggactgtgatggtacaggaagggaacgtggaaagcgcatacaggaccctaaacagaatcctcactatggatgggctcattgaggacattaagcatcggcggtattatgagaagccatgccgccggcgacagagggaaagctatgaaaggtgccggcggatctacaacatggaaatggctcgcaagatcaacttcttgatgcgaaagaatcgggcagatccgtggcagggctgctgaggcctgtgggtgggacacccagtgcgaaaccctcatccagttttctctccatctcttttctttgtacaatcccatttcctattaccattctctgcaataaactcaaatcacatgtctgcaagaaggcctccaaatatagaaacaatcccattagtcagcagtggaccctgtcttttattaagtgaaagaagaaactgagtctgaaagtactctaggagtagaatggtatttgccagggactggaggagggggcagtgaggagttattgtttaatgggtacagagtttcagtttgggcagatgaaaaagttcaggagacgatggcctggcatggtggctcacgcctgttatcccaacactttgggaggctgaggcgggcggctcacttgaggccaggagtttgagaccagcttggccaatgtggtgaaaccccatctctactaaaaatacaaaaaaaaaattggccgggcgtggtggtgcacgcctgtaatcccagatacttgggtggctgaggcaggagaattgcttgaactggggaggaagaggttgcagtgagccaagatcatgccactgcactccaacctgggcgacagagtgagactccatctcaaaacaaaaaaacggagatggatgatgaatggtgatggcggttgctcaaaaagttgaatgtacttaatgccactgaactatacccttaaatggtcacgatggtaaattttgtgttttactacaataaaaacttttttgaaagtc

SEQ ID NO: 18405 - DNA, 1463 bp, Homo sapiens
  source 1..1463: mol_type = unassigned DNA
ggggaaaggaaggctggcttggcgagagggcaggtttgcgggctttcgcccccttttccaaagaccaacaaagagtccttccccaactcccaactcaaccccttttggaactatgtgtggtggttgggaccctgtggcgcatccttgtcgctcgtgtccttctcatgcccggcgacgcgtctttgtggtaacgccctgctgccatctcttttcttctctatgcgaggatttggactggcagtgagaataagagacaacgattcacgtctactttctaggatgacttccatgtgctccatctcgcgcgtccctgagcatgttgaatttccaaatcctaaataagccgcgcggtgtagtttgtattatgttgcgtttctctttctgctttcctcgccctttctccatcatcctttaggctctacagagtgaaggtttaaatccaaggtcatggcaaaacatctgaagttcatcgccaggactgtgatggtacaggaagggaacgtggaaagcgcatacaggaccctaaacagaatcctcactatggatgggctcattgaggacattaagcatcggcggtattatgagaagccatgccgccggcgacagagggaaagctatgaaaggtgccggcggatctacaacatggaaatggctcgcaagatcaacttcttgatgcgaaagaatcgggcagatccgtggcagggctgctgaggcctgtgggtgggacacccagtgcgaaaccctcatccagttttctctccatctcttttctttgtacaatcccatttcctattaccattctctgcaataaactcaaatcacatgtctgcaagaaggcctccaaatatagaaacaatcccattagtcagcagtggaccctgtcttttattaagtgaaagaagaaactgagtctgaaagtactctaggagtagaatggtatttgccagggactggaggagggggcagtgaggagttattgtttaatgggtacagagtttcagtttgggcagatgaaaaagttcaggagacgatggcctggcatggtggctcacgcctgttatcccaacactttgggaggctgaggcgggcggctcacttgaggccaggagtttgagaccagcttggccaatgtggtgaaaccccatctctactaaaaatacaaaaaaaaaattggccgggcgtggtggtgcacgcctgtaatcccagatacttgggtggctgaggcaggagaattgcttgaactggggaggaagaggttgcagtgagccaagatcatgccactgcactccaacctgggcgacagagtgagactccatctcaaaacaaaaaaacggagatggatgatgaatggtgatggcggttgctcaaaaagttgaatgtacttaatgccactgaactatacccttaaatggtcacgatggtaaattttgtgttttactacaataaaaacttttttgaaagtc

SEQ ID NO: 18406 - DNA, 1120 bp, Homo sapiens
  source 1..1120: mol_type = unassigned DNA
tgataatcatggcgcccctcggaacaactgtattgctgtggagcctcttgaggagttctccgggcgtggaacgggtctgtttccgggctcgaatccagccctggcacggtggcctgctccaaccgctaccttgctctttcgagatggggctgccacgccgccggttcagctccgaggccgcagaatctggtagcccagagaccaagaaacctacatttatggatgaggaagttcaaagcatactcacgaaaatgacaggcttgaacttgcagaagacttttaagccagctatacaagaactgaagccaccaacctataagctaatgactcaggcacagttggaagaggctacaagacaggcagttgaggcagctaaagtacgattaaaaatgccaccagttctggaagagcgagtaccaataaatgatgtgttagctgaagataagattttggaaggaacagaaacaaccaaatatgtgtttactgatatatcatatagcataccacaccgggagcgttttattgtcgtcagagaaccaagtggcacactacgcaaagcctcttgggaagaacgggaccgaatgatacaagtttatttcccaaaagaaggtcgtaaaattttgacaccaataattttcaaggaagaaaatcttaggactatgtatagccaggacaggcatgttgatgtcctcaatctctgctttgcccagtttgagccagattccacagagtatatcaaggttcatcacaagacctatgaagatatagataaacgtggaaaatatgaccttttacgttcaacaagatactttggtggaatggtgtggtattttgtaaataataaaaagattgatggtttgctgattgaccagattcagagagatttaatcgatgatgcaaccaacttggtccagctgtatcacgtgctccatccagatggccagtcggctcaaggggccaaggatcaggctgctgagggaataaatttaatcaaggtctttgcaaaaacagaagcacagaagggagcctatatagaactaacactgcagacttatcaagaagcactcagtcgccattctgcagcttcctaaaaatattttaaaaatacatttattttact

SEQ ID NO: 18407 - DNA, 1099 bp, Homo sapiens
  source 1..1099: mol_type = unassigned DNA
atggcgcccctcggaacaactgtattgctgtggagcctcttgaggagttctccgggcgtggaacgggtctgtttccgggctcgaatccagccctggcacggtggcctgctccaaccgctaccttgctctttcgagatggggctgccacgccgccggttcagctccgaggccgaatctggtagcccagagaccaagaaacctacatttatggatgaggaagttcaaagcatactcacgaaaatgacaggcttgaacttgcagaagacttttaagccagctatacaagaactgaagccaccaacctataagctaatgactcaggcacagttggaagaggctacaagacaggcagttgaggcagctaaagtacgattaaaaatgccaccagttctggaagagcgagtaccaataaatgatgtgttagctgaagataagattttggaaggaacagaaacaaccaaatatgtgtttactgatatatcatatagcataccacaccgggagcgttttattgtcgtcagagaaccaagtggcacactacgcaaagcctcttgggaagaacgggaccgaatgatacaagtttatttcccaaaagaaggtcgtaaaattttgacaccaataattttcaaggaagaaaatcttaggactatgtatagccaggacaggcatgttgatgtcctcaatctctgctttgcccagtttgagccagattccacagagtatatcaaggttcatcacaagacctatgaagatatagataaacgtggaaaatatgaccttttacgttcaacaagatactttggtggaatggtgtggtattttgtaaataataaaaagattgatggtttgctgattgaccagattcagagagatttaatcgatgatgcaaccaacttggtccagctgtatcacgtgctccatccagatggccagtcggctcaaggggccaaggatcaggctgctgagggaataaatttaatcaaggtctttgcaaaaacagaagcacagaagggagcctatatagaactaacactgcagacttatcaagaagcactcagtcgccattctgcagcttcctaaaaatattttaaaaatacat

SEQ ID NO: 18408 - DNA, 1065 bp, Homo sapiens
  source 1..1065: mol_type = unassigned DNA
ggaaggtcagggaagggttcctggcaaatatgaccaaagctgagatctggttagccatgctaaggagaaagcaagaagcttctcaagcataggggacagtagcagatgtccagaaatgagactgagcacagatatttgggaacccattttggagcagaatctggtagcccagagaccaagaaacctacatttatggatgaggaagttcaaagcatactcacgaaaatgacaggcttgaacttgcagaagacttttaagccagctatacaagaactgaagccaccaacctataagctaatgactcaggcacagttggaagaggctacaagacaggcagttgaggcagctaaagtacgattaaaaatgccaccagttctggaagagcgagtaccaataaatgatgtgttagctgaagataagattttggaaggaacagaaacaaccaaatatgtgtttactgatatatcatatagcataccacaccgggagcgttttattgtcgtcagagaaccaagtggcacactacgcaaagcctcttgggaagaacgggaccgaatgatacaagtttatttcccaaaagaaggtcgtaaaattttgacaccaataattttcaaggaagaaaatcttaggactatgtatagccaggacaggcatgttgatgtcctcaatctctgctttgcccagtttgagccagattccacagagtatatcaaggttcatcacaagacctatgaagatatagataaacgtggaaaatatgaccttttacgttcaacaagatactttggtggaatggtgtggtattttgtaaataataaaaagattgatggtttgctgattgaccagattcagagagatttaatcgatgatgcaaccaacttggtccagctgtatcacgtgctccatccagatggccagtcggctcaaggggccaaggatcaggctgctgagggaataaatttaatcaaggtctttgcaaaaacagaagcacagaagggagcctatatagaactaacactgcagacttatcaagaagcactcagtcgccattctgcagcttcctaa

SEQ ID NO: 18409 - DNA, 1547 bp, Homo sapiens
  source 1..1547: mol_type = unassigned DNA
cctcttcctgggcggcgatctctgggacagatgcgcagaagacttcctgctcaacgacgacgtcctccctgagagcgcccaggaaaacgtccacttccagcccagcagacgagtcgtcctgcgctcctgagcgttcgtcgacagagctcaggaggacctctgggatcaggatgagggtgtgtccatcgagagacactcgcaggatcgacgttggcgggagctccagcaccaggtcgacgtcgtccaggggcacacgcagggcacagcccgcggccaggaccactatggagcactttgagtatatcatcccactgtctcctggagggcaagattcagccttaagggggttcccttgtatgtgagtgctgcaagaactgggtgtgactcggaatccctcccaaccacttccggcgcaagtggcttctgataatcatggcgcccctcggaacaactgtattgctgtggagcctcttgaggagttctccgggcgtggaacgggtctgtttccgggctcgaatccagccctggcacggtggcctgctccaaccgctaccttgctctttcgagatggggctgccacgccgccggttcagctccgaggccgcagaatctggtagcccagagaccaagaaacctacatttatggatgaggaagttcaaagcatactcacgaaaatgacaggcttgaacttgcagaagacttttaagccagctatacaagaactgaagccaccaacctataagctaatgactcaggcacagttggaagaggctacaagacaggcagttgaggcagctaaagtacgattaaaaatgccaccagttctggaagagcgagtaccaataaatgatgtgttagctgaagataagattttggaaggaacagaaacaaccaaatatgtgtttactgatatatcatatagcataccacaccgggagcgttttattgtcgtcagagaaccaagtggcacactacgcaaagcctcttgggaagaacgggaccgaatgatacaagtttatttcccaaaagaaggtcgtaaaattttgacaccaataattttcaaggaagaaaatcttaggactatgtatagccaggacaggcatgttgatgtcctcaatctctgctttgcccagtttgagccagattccacagagtatatcaaggttcatcacaagacctatgaagatatagataaacgtggaaaatatgaccttttacgttcaacaagatactttggtggaatggtgtggtattttgtaaataataaaaagattgatggtttgctgattgaccagattcagagagatttaatcgatgatgcaaccaacttggtccagctgtatcacgtgctccatccagatggccagtcggctcaaggggccaaggatcaggctgctgagggaataaatttaatcaaggtctttgcaaaaacagaagcacagaagggagcctatatagaactaacactgcagacttatcaagaagcactcagtcgccattctgcagcttcctaaaaatattttaaaaatacatttattttactaaa

SEQ ID NO: 18410 - DNA, 1401 bp, Homo sapiens
  source 1..1401: mol_type = unassigned DNA
taatcatggcgcccctcggaacaactgtattgctgtggagcctcttgaggagttctccgggcgtggaacgggtctgtttccgggctcgaatccagccctggcacggtggcctgctccaaccgctaccttgctctttcgagatggggctgccacgccgccggttcagctccgaggccgaatctggtagcccagagaccaagaaacctacatttatggatgaggaagttcaaagcatactcacgaaaatgacaggcttgaacttgcagaagacttttaagccagctatacaagaactgaagccaccaacctataagctaatgactcaggcacagttggaagaggctacaagacaggcagttgaggcagctaaagtacgattaaaaatgccaccagttctggaagagcgagtaccaataaatgatgtgttagctgaagataagattttggaaggaacagaaacaaccaaatatgtgtttactgatatatcatatagcataccacaccggtgttgatggaagtttcatctatgttatcttcagaacacatttagagactcctacacctctgaaaacttgagagtcagtactgtttggttaatttatacattaatcaggagcgttttattgtcgtcagagaaccaagtggcacactacgcaaagcctcttgggaagaacgggaccgaatgatacaagtttatttcccaaaagaaggtcgtaaaattttgacaccaataattttcaaggaagaaaatcttaggactatgtatagccaggacaggcatgttgatgtcctcaatctctgctttgcccagtttgagccagattccacagagtatatcaaggttcatcacaagacctatgaagatatagataaacgtggaaaatatgaccttttacgttcaacaagatactttggtggaatggtgtggtattttgtaaataataaaaagattgatggtttgctgattgaccagattcagagagatttaatcgatgatgcaaccaacttggtccagctgtatcacgtgctccatccagatggccagtcggctcaaggggccaaggatcaggctgctgagggaataaatttaatcaaggtctttgcaaaaacagaagcacagaagggagcctatatagaactaacactgcagacttatcaagaagcactcagtcgccattctgcagcttcctaaaaatattttaaaaatacatttattttactaaatactgactacatttctctgttaatattgagctaaatgttaaaaaatggccagattaaaagatatcaatttgtagttctccctacaaagcaaaaattattaccctactcacttttcgtaggctacaaggatatttgagtgcctggttatgaatttctcaaatcatgttagatgagcgt

SEQ ID NO: 18411 - DNA, 903 bp, Homo sapiens
  source 1..903: mol_type = unassigned DNA
tagtcacgctcggtaccaggcgcagatcatggcaggcagccggctggaaaccgtagggagcatcttctctcggactcgggacctggttcgggccggggtgctgaaggagaagcccctgtggtttgacgtatatgacgcctttcccccgctgagggagcccgtcttccaaaggcctcgagtgcgatatggcaaagccaaagctcccatccaagacatctggtaccacgaggatcggattagagcgaagttttattcagtgtatgggtctggtcaaagagcttttgatctattcaatccaaacttcaagtctacctgtcaacggtttgtggagaagtacactgagctacagaaacttggagaaacagatgaagagaagttatttgtggaaacagggaaggctttattggcagaaggtgtcattttaagacgagtaggcgaagcaaggactcaacacggaggtagtcacgtttcccggaaatccgaacacttgagtgtcagaccacagactgcgttggaagaaaacgagactcagaaagaagttccacaggaccagcatttggaggcacctgcagaccagtcgaaaggtctcttgcctccctgaaggacctgtatactgtgtatgctggcattcacactctactcactggctgaatgttgagctatttttaaacagttgaactgtgtaaatgtttcttgatctctaaggtattatgtttgccttctcttagttatttctgggttgtcacaaagctcagtatcatggtttgacagaagcagttatgtgaacttttatgttaggacattactaaataaagaattccctagctgcttataaagtaaatttactttgaattgtaaataacatgaagaaacctttataaagattgttcaaatgggactcaa

SEQ ID NO: 18412 - DNA, 707 bp, Homo sapiens
  source 1..707: mol_type = unassigned DNA
gtccgcggtcgtccccacccctcagcgcgctgtggtacgtcccgcgctccgcttggcccaagatggcggcctccgtgtgcagcgggttgctggggccacgggtgctgtcctggagccgagagctgccttgcgcttggcgcgccctgcacacctccccggtctgcgccaagaaccgggcggcccgagtacgcgtaagcaagggggacaagccggtgacctacgaggaggcacacgcgccgcactacatcgcccaccgtaaaggctggctgtcgctgcacacaggtaacctggatggagaggaccatgccgcagagcgaacggtggaggatgttttccttcgcaagttcatgtggggtaccttcccaggctgcctggctgaccagctggttttaaagcgccggggtaaccagttggagatctgtgccgtggtcctgaggcagttgtctccacacaagtactacttcctcgtgggctacagtgaaactttgctgtcctacttttacaaatgtcctgtgcgactccacctccaaactgtgccctcaaaggttgtgtataagtacctctagaacaatccccttttttccatcaagctgtagcctgcagagaatggaaacgtgggaaaggaatggtatgtgggggaaatgcatcccctcagaggactgaggcatagtctctcatctgctattgaataaagaccttctatcttg

SEQ ID NO: 18413 - DNA, 4586 bp, Homo sapiens
  source 1..4586: mol_type = unassigned DNA
agcgtctcctgtgcgtctgcgcgggaagtggaacctggctctggggagaagccgcgtgagatccgcgcgggtgctagctagtcctttctcgtcgctgctcggctcgcggcccgtggggtcggccccgccaccgttgccgccatgcccatgaagggccgcttccccatccgccgcaccctgcaatatctgagccaggggaacgtggtgttcaaggactccgtgaaggtcatgacagtgaattacaacacgcatggggagctgggcgagggcgccaggaagtttgtgtttttcaacatacctcagattcaatacaaaaacccttgggtgcagatcatgatgtttaagaacatgacgccgtcacccttcctgcgattctacttagattctggggagcaggtcctggtggatgtggagaccaagagcaataaggagatcatggagcacatcagaaaaatcttggggaagaatgaggaaaccctcagggaagaggaggaggagaaaaagcagctttctcacccagccaacttcggccctcgaaagtactgcctgcgggagtgcatctgtgaagtggaagggcaggtgccctgccccagcctggtgccattacccaaggagatgagggggaagtacaaagccgctctgaaagccgatgcccaggactaaggcccacggtcactgtgggctggggtgatggtgtctgaccagtggggagattggaatgggattactttggcccagggaagcccctggttctgtccctggagactctggaaatccttttgcattaaaaggactttacacacctgtgtaaaaggatgtgggagaggagggtctgaagctgagctgctaaatgaatatccctgctctgctggtcaataaaacgcttcctaatagcagcttggcgtgtatctggtcctagtgaagaggaaggcctgtgtagcagaaaggctttgggcctgagaggttaaggccacagcctgttgacacctgttttggtcctgcgaccctttactggtctccgctggctttgaatcttcctctgggctctactctggagaacataagggctgctgtggttgagtctggctagcactgtctgtggttggcagtgtgtacacccctccgttcagttccttgggggtatttttcagaaatccaaaggcaacccttcgtgcagtgctcacttttttaagtacagttgattacccttgcctgctggggggcctagccatgggccagagatggaggagccccagtggctgacaggccagcctcactcaggcacgtacctgctgaccagtcagccactgccaacccatggcccagccactgtgtgcattagcagggaggtttgtaggccatggaggaaatgaggagacaccacctagtggagacattggggccctgctggggggatggtgtctatagctggctctgctggctccctcaggccctgcttaccaagctctggaggagggagtgctgcattactgagcaccttccttgttctttcctcataggacactgatgttactgtcactttagttatgctaaagtggaggtttcagcctccagaagacagcagagccttctagggtcaccttaagaataggtttagctaggctgggtgtggtggctcatgcctgtaatcccagcactttgggaggctgatgtgggcggatagttgagcccaggagttcgagaccagcctgggcaacatggcaagaccttgtctctacaaaaagtacaaaaattagatgggtgtggtgtttcgcgtctgtagtcccagctatttgggaagctgaggtgggaggatctcgagcctgcgagatcaaggctgcagtgaatcatgatcgtgcgctactgcactccagcctgggccacagagcaagactgtctcaagaaaaaaaattttttaaataagtttaattataaagtgaaggaccagttggaccacggacccctagaaactcagccaaggagacctgactttatctgagacaggaaggcagtggttaaaagaattaaaaaaggacagtggtgcttgacagagcaggactgaagttttcattcctctacctgctggggccttggtcaagtcctaaaagctttccaggtctgtaactggttttgtctgtaaaatggggaaaaggttaccttttctgccacatgaagtagctggctggtgaaatgatgtcatactacgatgtgtttcattaactgttggagattatcacattaaattgagcagatttggatcttttacatttgatgctcaagtttgattctgtaccagatctgggtttggggtgatggcttgtcgggggtgggaggggaaggtgggcagagactgatgtataatggacaggtgttccttgagtgacagacttacaaagggagtgtttaattgaaatctagcatcttgtctctctgctatcagcattttggctgggtggaaaaagctctcctccacagagagccctcccatgtctgctggtttcagttccccacccaactgactgaagtcttgaccttgataccacctgcctgggcgttctacttggctgcaagggctcttcagaaagcacctagttccttttggctttcatctgcagtgtaggtctccatagctagtgacacacaaagccttatgagagtattccttccctctagggcccaaagaggctgctaaccagcaggaatgtcctgaaccaaaaggagtggtgaccattctctagacagaataaatgtctggtccctaatgggacagataactagggtttgagttcaggcttgacacaggagcaatgggcagtgaggtggacagcccagaccctgaaaggacgtgtggagacagcagcagtcctgtggtgcagttactgcctgtgtggccagcttcacaggcagcagataatttgtggaaataaacattattttctttttttgttccctgtaggctacttgatcctggatagtttctctttaaacctttgtctttccctattttgtttagtagtgatgaaagatgggtttaaaatatacagaaatgggagaaaattaattagagaaaatgtgaggattttataattgataacatgttcttaattttacttgcacaagcagtgttcacagccttattctgaagtgaccacttttcttctctttgaggcactacctggcagcaccatctaaacctgtatcatctgctgtggtcccagttactcaggaggctgaggcaggaggatcacttgagcccaggaggttgaggctggagtgagccatgactgtaccactgcattccagcctgggtgacggagtgaggccctatctgcctgccagtgagttctgtcatgcatcagactttggacctcagaattttcacctggaacatgagaggtcagatgacataatgaatatgttctaacttctgaaacttttggagcttgtttttgcccttgatagcacgtatccttagagaataagcttgccaatttaaggcctgtctgtaatggcatctgaatgttccagcagcctaactgtgctctgctccagaaacatgtgtgtggcttccctacctccacaccaaggagctgccttgctgggtggatgtaaagactgtcctgccagggtttcccactaaaggtattaataagtccagtggaccacagagggcccaatccctcttggccgctaaggctaaggtaggagccagagagctgtagagacaggaccaccaggatgcttcatgtccataacacaagagagcgctgcattgtttgggggccaggcattactactatcatgaagaaaaatgaagagcaggatgcatgttagtctttaattcacttttaatagtataaacctcatttaggtagtagtattaagccacaacaataatgccacattgaaacagcatttaataaaatgcataaagctaattcatgcactgcaatactctatatacaaacacaacaatgcaaattcttcttcaagactgaagacattgattagatataaaattcagtttaaaaagaacatgctattttttaaatgccatcacataaacaaagtgatttcacagggagaagaaagctgtataaagctgcagctttcaacaggttttaaacctggcattaaaatgtaatggcaaaaccaatattttctatattgtgaagggcaaaggttacagaaacggtcccaagaaaatctaacacccaaattttcctttgatagatagatgcctttaaaagggctggtaatgcagttacattctaacagagaagtccaaactacaggtaaaaactacggcttgtactgtgaaaaatgtgcagcttttcagttataaaactagttgaacactggtttacaagataatccgtagaacagagagactgtagaaaaatattccagcacttgagttgtgtgtggcagcagcatttgagtccatgaatgctatggtcattaaaataattgattatactttcctaaagaaaagccattttttaatgcaaagtctactacttccaaatgttattccaaacattaaattttaacagtctatcaatcaataaatgttgaacattttt

SEQ ID NO: 18414 - DNA, 590 bp, Homo sapiens
  source 1..590: mol_type = unassigned DNA
gaagtggaacctggctctggggagaagccgcgtgagatccgcgcgggtgctagctagtcctttctcgtcgctgctcggctcgcggcccgtggggtcggccccgccaccgttgccgccatgcccatgaagggccgcttccccatccgccgcaccctgcaatatctgagccaggggaacgtggtgttcaaggactccgtgaaggtcatgacagtgaattacaacacgcatggggagctgggcgagggcgccaggaagtttgtgtttttcaacatacctcagattcaatacaaaaacccttgggtgcagatcatgatgtttaagaacatgacgccgtcacccttcctgcgattctacttagattctggggagcaggtcctggtggatgtggagaccaagagcaataaggagatcatggagcacatcagaaaaatcttggggaagaatgagtgagttgtttggtttgacctggaaggaacaaacttctcagcccagagaatttgaggaagaaaggggtgtgtgggaagggtgttgagaggcactacctggcagcaccatctaaacctgtatcatctgctgtggtcccagttact

SEQ ID NO: 18415 - DNA, 1281 bp, Homo sapiens
  source 1..1281: mol_type = unassigned DNA
gcgcgggaagtggaacctggctctggggagaagccgcgtgagatccgcgcgggtgctagctagtcctttctcgtcgctgctcggctcgcggcccgtggggtcggccccgccaccgttgccgccatgcccatgaagggccgcttccccatccgccgcaccctgcaatatctgagccaggggaacgtggtgttcaaggactccgtgaaggtcatgacagtgaattacaacacgcatggggagctgggcgagggcgccaggaagtttgtgtttttcaacatacctcagattcaatacaaaaacccttgggtgcagatcatgatgtttaagaacatgacgccgtcacccttcctgcgattctacttagggaaaccctcagggaagaggaggaggagaaaaagcagctttctcacccagccaacttcggccctcgaaagtactgcctgcgggagtgcatctgtgaagtggaagggcaggtgccctgccccagcctggtgccattacccaaggagatgagggggaagtacaaagccgctctgaaagccgatgcccaggactaaggcccacggtcactgtgggctggggtgatggtgtctgaccagtggggagattggaatgggattactttggcccagggaagcccctggttctgtccctggagactctggaaatccttttgcattaaaaggactttacacacctgtgtaaaaggatgtgggagaggagggtctgaagctgagctgctaaatgaatatccctgctctgctggtcaataaaacgcttcctaatagcagcttggcgtgtatctggtcctagtgaagaggaaggcctgtgtagcagaaaggctttgggcctgagaggttaaggccacagcctgttgacacctgttttggtcctgcgaccctttactggtctccgctggctttgaatcttcctctgggctctactctggagaacataagggctgctgtggttgagtctggctagcactgtctgtggttggcagtgtgtacacccctccgttcagttccttgggggtatttttcagaaatccaaaggcaacccttcgtgcagtgctcacttttttaagtacagttgattacccttgcctgctggggggcctagccatgggccagagatggaggagccccagtggctgacaggccagcctcactcaggcacgtacctgctgaccagtcagccactgccaacccatggcccagccactgtgtgcattagcagggaggtttgtaggccatggaggaaatgaggagacaccaccta

SEQ ID NO: 18416 - DNA, 723 bp, Homo sapiens
  source 1..723: mol_type = unassigned DNA
tggctctggggagaagccgcgtgagatccgcgcgggtgctagctagtcctttctcgtcgctgctcggctcgcggcccgtggggtcggccccgccaccgttgccgccatgcccatgaagggccgcttccccatccgccgcaccctgcaatatctgagccaggggaacgtggtgttcaaggactccgtgaaggtcatgacagtgaattacaacacgcatggggagctgggcgagggcgccaggaagtttgtgtttttcaacatacctcagattcaatacaaaaacccttgggtgcagatcatgatgtttaagaacatgacgccgtcacccttcctgcgattctacttagattctggggagcaggtcctggtggatgtggagaccaagagcaataaggagatcatggagcacatcagaaaaatcttggggaagaatgagtgagttgtttggtttgacctggaaggaacaaacttctcagcccagagaatttgaggaagaaaggggtgtgtgggaagggtgttgagagggaaaccctcagggaagaggaggaggagaaaaagcagctttctcacccagccaacttcggccctcgaaagtactgcctgcgggagtgcatctgtgaagtggaagggcaggtgccctgccccagcctggtgccattacccaaggagatgagggggaagtacaaagccgctctgaaagccgatgcccaggactaaggccca

SEQ ID NO: 18417 - DNA, 1119 bp, Homo sapiens
  source 1..1119: mol_type = unassigned DNA
agctagtcctttctcgtcgctgctcggctcgcggcccgtggggtcggccccgccaccgttgccgccatgcccatgaagggccgcttccccatccgccgcaccctgcaatatctgagccaggggaacgtggtgttcaaggactccgtgaaggtcatgacagtgaattacaacacgcatggggagctgggcgagggcgccaggaagtttgtgtttttcaacatacctcagattcaatacaaaaacccttgggtgcagatcatgatgtttaagaacatgacgccgtcacccttcctgcgattctacttagattctggggagcaggtcctggtggatgtggagaccaagagcaataaggagatcatggagcacatcagaaaaatcttggggaagaatgagcactacctggcagcaccatctaaacctgtatcatctgctgtggtcccagttactcaggaggctgaggcaggaggatcacttgagcccaggaggttgaggctggagtgagccatgactgtaccactgcattccagcctgggtgacggagtgaggccctatctgcctgccagtgagttctgtcatgcatcagactttggacctcagaattttcacctggaacatgagaggtcagatgacataatgaatatgttctaacttctgaaacttttggagcttgtttttgcccttgatagcacgtatccttagagaataagcttgccaatttaaggcctgtctgtaatggcatctgaatgttccagcagcctaactgtgctctgctccagaaacatgtgtgtggcttccctacctccacaccaaggagctgccttgctgggtggatgtaaagactgtcctgccagggtttcccactaaaggtattaataagtccagtggaccacagagggcccaatccctcttggccgctaaggctaaggtaggagccagagagctgtagagacaggaccaccaggatgcttcatgtccataacacaagagagcgctgcattgtttgggggccaggcattactactatcatgaagaaaaatgaagagcaggatgcatgttagtctttaattcacttttaatagtataaacctcatttaggtagtagtattaagccacaac

SEQ ID NO: 18418 - DNA, 1127 bp, Homo sapiens
  source 1..1127: mol_type = unassigned DNA
agaggccacacggccgggcggggcgtgagggacagcccgaggactacaggtcccaaggttccccgcgccgcttccggggcacggtggcgtcccggcaccgcggccgcagtgaggagactcggccatgctacgcgcgctgagccgcctgggcgcggggaccccgtgcaggccccgggcccctctggtgctgccagcgcgcggccgcaagacccgccacgacccgctggccaaatccaagatcgagcgagtgaacatgccgcccgcggtggaccctgcggagttcttcgtgctgatggagcgttaccagcactaccgccagaccgtgcgcgccctcaggatggagttcgtgtccgaggtgcagaggaaggtgcacgaggcccgagccggggttctggcggagcgcaaggccctgaaggacgccgccgagcaccgcgagctgatggcctggaaccaggcggagaaccggcggctgcacgagctgcggatagcgaggctgcggcaggaggagcgggagcaggagcagcggcaggcgttggagcaggcccgcaaggccgaagaggtgcaggcctgggcgcagcgcaaggagcgggaagtgctgcagctgcaggaagaggtgaaaaacttcatcacccgagagaacctggaggcacgggtggaagcagcattggactcccggaagaactacaactgggccatcaccagagaggggctggtggtcaggccacaacgcagggactcctaggggcccagtaaggacagtgcccgccagggaccatgtatgtatcatggcggaagagttggccctgacctggaataaagcagttggtgttgcttatgaggaaggttcagccttatccagcacagccttcacgttttgccctctgctgtcaccacttggtcagaaacttccaaacgcagtgccctgttctgccggtgtgtacagcctcagcgcaccaggagaccctagagtggtttccatctcacagagaatcagacagggccacagccccctcaggcagccaggtcatctgagtatcattaagagtagtgatgggaagattacagtctgagggccaaacgtgcctgcttcctgtttttgtaaataaagttttgttggaacacagcca

SEQ ID NO: 18419 - DNA, 2785 bp, Homo sapiens
  source 1..2785: mol_type = unassigned DNA
gtccgtaacccgttggctgttccttttggtacgctccaagatggctgcctccatagtgcggcgcgggatgctcctggcgcggcaagtggttcttcctcagctctctcctgcaggtaaaagatacctgctttcttcagcctatgtagacagccacaaatgggaagcaagagaaaaagaacattactgtcttgctgatcttgcatctttaatggataaaacatttgagagaaagttgcctgttagttctttaacaatatcacggcttatagacaacatttcctctcgggaagagatagatcatgcagagtattacctttacaagtttcgacacagccccaactgctggtacctgagaaactggactatccacacctggattaggcagtgtctaaaatatgatgcacaagacaaagccctatatacccttgtaaataaggttcaatatggaatttttccagataactttacattcaatttactgatggattctttcataaagaaagaaaattacaaagatgctttatctgtggtttttgaggtcatgatgcaagaagcctttgaagtgccttccacccaacttctctccctctatgttttatttcattgcctggcaaagaagacagacttcagttgggaagaggagaggaactttggtgcatcccttttgcttccaggcctaaaacaaaagaactcagtgggtttcagttcccagttgtatggctatgcacttcttgggaaggtggagttgcagcaagggctacgggctgtgtaccacaacatgcctctgatatggaaaccaggctaccttgacagagcccttcaagtgatggagaaagtggctgcctccccagaagacataaagctgtgtagagaagcgctcgatgtgctgggtgcagtgctgaaggctctgacttcagctgatggggcttcagaggagcagtcccaaaatgatgaagacaaccaggggtcagaaaaactggtggagcagttagacatcgaggaaacagagcagtccaagcttcctcaatacctggaacgatttaaggccttacattctaagcttcaagctctgggcaaaattgagtcagaaggtcttttaagtctgaccacccagcttgtcaaggaaaaactctccacctgtgaagcagaggacatcgccacctatgagcagaatctgcagcagtggcatctagaccttgtacagttgatccagagagaacagcaacagagggagcaagcgaagcaggagtaccaggctcagaaagcagcaaaggcatctgcctaatagggtcccccagggccccacctgtctcacaagaacttcactcaaccccgtgccaggactcagcagtggcctggacaacagcctcagcttcctctacccatcttcttttcttaaagcaggctatgtgccctacatggcaaggcaccatgactgcccatcgagatgccaagaagggctatggaactatgcaggtggctagtggtcagactgaagtcaccagctgaataccttaaggaggactcttgaggctcataatggagttcctggggcacagggattagttatgagcattaaagttcctaagacccagtgacagtactgggagaaaccaaggctgaagagtcaggttgaagcacaggcttttgttttttgttgtttttgttttttgagacagagtctcattctgtcacccaggctggagtgcagtggcgcaatcttggctcactgcaacctccgactcccaggttcaagcaattctcctgcctcggcctcctttagtaggtgggattacaggtgcataccaccacacctttctaatttttgcatttttagtagagatggggtttcaccatgttggtcaggctggtctcaacctcctgacctcaagtgatctgcccgcctcagcctcccaaagtgctgggatgataggcgtgagccaccacacccggccaagcacaggcttttgaatggtctccctctccccagcccaggtacatgaggccaaggtgaactgtgcatcctgagaccttgtgtccctgagtctcctttctgagtgcaagctgcactgtgagctggctgtgggatactcacacattcccacattctcctttctgccacatctcgcccttctggacctgcactgggagaaattcaggacaggagtgaactcaaggccatgaactcactggatttccatttttaggcacccatagggatgtttttaggatgtaagtttctgaggagaaagctagctctagcatgaagcttttttggattggcttctccatcgtgttggggtaacattttttttccaattttttttttcccaaaacatcgtctcagctcatttatcaagtaggtaaaatgagccttttgtgtacacacagaggcacatgtgcatgcacacacaacttgtgaacacacatttctgttaaagaagttagaaaatgagagatgggttggggcttgaagtgcatcagaggtatgaatgttgtaaaactgtcaggagatgtaaaattcctttctgaagtgtctcttctgtgaaagggttcagagcagattttgcttactatgtagtgttgcccttaagtacagtggtgtaattttattcaagattgtgctcttctatcaaaagcctctggaaataaatgttccgggatcatgttagtgtactctttatctttggggaaagggaggagggagagggactcattattgttactatgattttgaggagtgtactttaaaccctcccccattaaactatgggatttattgtaa

SEQ ID NO: 18420 - DNA, 2628 bp, Homo sapiens
  source 1..2628: mol_type = unassigned DNA
aacccgttggctgttccttttggtacgctccaagatggctgcctccatagtgcggcgcgggatgctcctggcgcggtaaaagatacctgctttcttcagcctatgtagacagccacaaatgggaagcaagagaaaaagaacattactgtcttgctgatcttgcatctttaatggataaaacatttgagagaaagttgcctgttagttctttaacaatatcacggcttatagacaacatttcctctcgggaagagatagatcatgcagagtattacctttacaagtttcgacacagccccaactgctggtacctgagaaactggactatccacacctggattaggcagtgtctaaaatatgatgcacaagacaaagccctatatacccttgtaaataaggttcaatatggaatttttccagataactttacattcaatttactgatggattctttcataaagaaagaaaattacaaagatgctttatctgtggtttttgaggtcatgatgcaagaagcctttgaagtgccttccacccaacttctctccctctatgttttatttcattgcctggcaaagaagacagacttcagttgggaagaggagaggaactttggtgcatcccttttgcttccaggcctaaaacaaaagaactcagtgggtttcagttcccagttgtatggctatgcacttcttgggaaggtggagttgcagcaagggctacgggctgtgtaccacaacatgcctctgatatggaaaccaggctaccttgacagagcccttcaagtgatggagaaagtggctgcctccccagaagacataaagctgtgtagagaagcgctcgatgtgctgggtgcagtgctgaaggctctgacttcagctgatggggcttcagaggagcagtcccaaaatgatgaagacaaccaggggtcagaaaaactggtggagcagttagacatcgaggaaacagagcagtccaagcttcctcaatacctggaacgatttaaggccttacattctaagcttcaagctctgggcaaaattgagtcagaaggtcttttaagtctgaccacccagcttgtcaaggaaaaactctccacctgtgaagcagaggacatcgccacctatgagcagaatctgcagcagtggcatctagaccttgtacagttgatccagagagaacagcaacagagggagcaagcgaagcaggagtaccaggctcagaaagcagcaaaggcatctgcctaatagggtcccccagggccccacctgtctcacaagaacttcactcaaccccgtgccaggactcagcagtggcctggacaacagcctcagcttcctctacccatcttcttttcttaaagcaggctatgtgccctacatggcaaggcaccatgactgcccatcgagatgccaagaagggctatggaactatgcaggtggctagtggtcagactgaagtcaccagctgaataccttaaggaggactcttgaggctcataatggagttcctggggcacagggattagttatgagcattaaagttcctaagacccagtgacagtactgggagaaaccaaggctgaagagtcaggttgaagcacaggcttttgttttttgttgtttttgttttttgagacagagtctcattctgtcacccaggctggagtgcagtggcgcaatcttggctcactgcaacctccgactcccaggttcaagcaattctcctgcctcggcctcctttagtaggtgggattacaggtgcataccaccacacctttctaatttttgcatttttagtagagatggggtttcaccatgttggtcaggctggtctcaacctcctgacctcaagtgatctgcccgcctcagcctcccaaagtgctgggatgataggcgtgagccaccacacccggccaagcacaggcttttgaatggtctccctctccccagcccaggtacatgaggccaaggtgaactgtgcatcctgagaccttgtgtccctgagtctcctttctgagtgcaagctgcactgtgagctggctgtgggatactcacacattcccacattctcctttctgccacatctcgcccttctggacctgcactgggagaaattcaggacaggagtgaactcaaggccatgaactcactggatttccatttttaggcacccatagggatgtttttaggatgtaagtttctgaggagaaagctagctctagcatgaagcttttttggattggcttctccatcgtgttggggtaacattttttttccaattttttttttcccaaaacatcgtctcagctcatttatcaagtaggtaaaatgagccttttgtgtacacacagaggcacatgtgcatgcacacacaacttgtgaacacacatttctgttaaagaagttagaaaatgagagatgggttggggcttgaagtgcatcagaggtatgaatgttgtaaaactgtcaggagatgtaaaattcctttctgaagtgtctcttctgtgaaagggttcagagcagattttgcttactatgtagtgttgcccttaagtacagtggtgtaattttattcaagattgtgctcttctatcaaaagcctctggaaataaatgttccgggatca

SEQ ID NO: 18421 - DNA, 1369 bp, Homo sapiens
  source 1..1369: mol_type = unassigned DNA
acgctccaagatggctgcctccatagtgcggcgcgggatgctcctggcgcggcaagtggttcttcctcagctctctcctgcaggtaaaagatacctgctttcttcagcctatgtagacagccacaaatgggaagcaagagaaaaagaacattactgtcttgctgatcttgcatctttaatggataaaacatttgagagaaagttgcctgttagttctttaacaatatcacggcttatagacaacatttcctctcgggaagagatagatcatgcagagtattacctttacaaaaagggagaatgctcatccagcaatccacagaattattccaggtttcgacacagccccaactgctggtacctgagaaactggactatccacacctggattaggcagtgtctaaaatatgatgcacaagacaaagccctatatacccttgtaaataaggttcaatatggaatttttccagataactttacattcaatttactgatggattctttcataaagaaagaaaattacaaagatgctttatctgtggtttttgaggtcatgatgcaagaagcctttgaagtgccttccacccaacttctctccctctatgttttatttcattgcctggcaaagaagacagacttcagttgggaagaggagaggaactttggtgcatcccttttgcttccaggcctaaaacaaaagaactcagtgggtttcagttcccagttgtatggctatgcacttcttgggaaggtggagttgcagcaagggctacgggctgtgtaccacaacatgcctctgatatggaaaccaggctaccttgacagagcccttcaagtgatggagaaagtggctgcctccccagaagacataaagctgtgtagagaagcgctcgatgtgctgggtgcagtgctgaaggctctgacttcagctgatggggcttcagaggagcagtcccaaaatgatgaagacaaccaggggtcagaaaaactggtggagcagttagacatcgaggaaacagagcagtccaagcttcctcaatacctggaacgatttaaggccttacattctaagcttcaagctctgggcaaaattgagtcagaaggtcttttaagtctgaccacccagcttgtcaaggaaaaactctccacctgtgaagcagaggacatcgccacctatgagcagaatctgcagcagtggcatctagaccttgtacagttgatccagagagaacagcaacagagggagcaagcgaagcaggagtaccaggctcagaaagcagcaaaggcatctgcctaatagggtcccccagggccccacctgtctcacaagaacttcactcaaccccgtgccaggactcagcagtggcct

SEQ ID NO: 18422 - DNA, 850 bp, Homo sapiens
  source 1..850: mol_type = unassigned DNA
caaaggtcagaggtaaagaagtcatggcggcgctgtgtcggacccgtgctgtggctgccgagagccattttctgcgagtgtttctcttcttcaggccctttcggggtgtaggcactgagagtggatccgaaagtggtagttccaatgccaaggagcctaagacgcgcgcaggcggtttcgcgagcgcgttggagcggcactcggagcttctacagaaggtggagcccctacagaagggttctccaaaaaatgtggaatcctttgcatctatgctgagacattctcctcttacacagatgggacctgcaaaggataaactggtcattggacggatctttcatattgtggagaatgatctgtacatagattttggtggaaagtttcattgtgtatgtagaagaccagaagtggatggagagaaataccagaaaggaaccagggtccggttgcggctattagatcttgaacttacgtctaggttcctgggagcaacaacagatacaactgtactagaggctaatgcagttctcttgggaatccaggagagtaaagactcaagatcgaaagaagaacatcatgaaaaataaatgaactttgcttagtggattgactcctttgctgaagtcagttattcatcaagaatgcaattagactaattgtgaataaatgattgaatgaagatataataaataaaagctataattatagataactcttattagaattttctttagcaatattcccaccccccaccccttgttttgctcttaatgtttttttcctttggtggggatagtatacactgtactaagaaattgtcattcaataaatacgttttgagtgctgtcta

SEQ ID NO: 18423 - DNA, 1678 bp, Homo sapiens
  source 1..1678: mol_type = unassigned DNA
gcttaagttgacctctgggtccggaatcgcgggcaaagatggcggcggccaggtgttggaggcctttgctacgcggtccgaggctttcattgcacaccgcggctaatgccgccgccacggctacagaaacgacctgccaagacgtcgcggcgacccccgtcgcgcggtacccgccgattgtggcctccatgacagccgacagcaaagctgcacggctgcggcggatcgagcgctggcaggcgacggtgcacgctgcggagtcggtagacgagaagctgcgaatcctcaccaagatgcagtttatgaagtacatggtttacccgcagaccttcgcgctgaatgccgaccgctggtaccagtacttcaccaagaccgtgttcctgtcgggtctgccgccgcccccagcggagcccgagcccgagcccgaacccgaacctgaacctgcgctggacctcgcggcgctgcgtgcggtcgcctgcgactgcctgctgcaggagcacttctacctgcggcgcaggcggcgcgtgcaccgttacgaggagagcgaggtcatatctttgcccttcctggatcagctggtgtcaaccctcgtgggcctcctcagcccacacaacccggccctggccgctgccgccctcgattatagatgcccagttcatttttactgggtgcgtggtgaagaaattattcctcgtggtcatcgaagaggtcgaattgatgacttgcgataccagatagatgataaaccaaacaaccagattcgaatatccaagcaactcgcagagtttgtgccattggattattctgttcctatagaaatccccactataaaatgtaaaccagacaaacttccattattcaaacggcagtatgaaaaccacatatttgttggctcaaaaactgcagatccttgctgttacggtcacacccagtttcatctgttacctgacaaattaagaagggaaaggcttttgagacaaaactgtgctgatcagatagaagttgtttttagagctaatgctattgcaagcctttttgcttggactggagcacaagctatgtatcaaggattctggagtgaagcagatgttactcgaccttttgtctcccaggctgtgatcacagatggaaaatacttttcctttttctgctaccagctaaatactttggcactgactacacaagctgatcaaaataaccctcgtaaaaatatatgttggggtacacaaagtaagcctctttatgaaacaattgaggataatgatgtgaaaggttttaatgatgatgttctacttcagatagttcactttctactgaatagaccaaaagaagaaaaatcacagctgttggaaaactgaaaaagcatatttgattgagaactgtgggaatatttaaattttactgaaggaacaataatgatgagatttgtaactgtcaactattaaatacattgatttttgagacaaatatttcttatgtcaacctgttattagatctcttactctgctcaaattcatcactgaaagatttaattttagttaccttttgttgatttaaaaataattgcatttgtatattgctaactgataagacaaattgagttattgagctattaaatgcacattttaatataaatgcagaaatcccaaataaaatgctaacatactgaattcagtaa

SEQ ID NO: 18424 - DNA, 1293 bp, Homo sapiens
  source 1..1293: mol_type = unassigned DNA
tttcagttgtgttcttggttcatttcgtgtctcggcgatgtttcctagagtctcgacgttcctacctcttcgccccctttcccgccaccctttgtcctctggaagcccggagacatcagcggctgcgattatgctactcactgttcggcacggaacagtcaggtaccgcagttcagcgctgttggcccggacaaaaaataacatccaaagatattttggcactaacagtgtgatctgtagcaagaaagataagcagtctgttcgaactgaggagacttccaaggagacttcagagagccaagacagtgaaaaggaaaatacgaaaaaagacttgttaggcattattaagggcatgaaagttgaattaagcacagtaaatgtacgaacaacaaagccccccaaaagaagaccacttaaaagtttggaagctacacttggcaggcttcgaagagctacagaatatgctccaaagaagagaattgagcccctgagtcctgagttggtggcagctgcatctgctgtggcagattctctcccttttgataagcaaacaaccaagtcagagctgctgagccagctccagcagcatgaggaagagtcaagggcacagagagatgcaaagcgacctaaaattagtttcagtaacataatatcagatatgaaagttgccagatctgctacagctagagttcgttcaagaccagagcttcggattcagtttgatgaaggctatgacaattatcctggccaggagaagacggatgatcttaaaaaaaggaaaaatatattcacagggaaaagacttaatatttttgacatgatggcagttactaaagaagcacctgaaacagacacatcaccttcactttgggatgtggaatttgctaagcagttagccacagtaaatgaacaaccccttcagaatggatttgaagagctgatccagtggacaaaagaggggaaactatgggagttcccaattaacaatgaagcaggttttgatgatgatggttcagaatttcatgaacatatatttctggagaaacacctggagagctttccaaaacaaggaccaattcgccacttcatggagctggtgacttgtggcctttccaaaaacccatatcttagtgttaaacagaaggttgaacacatagagtggtttagaaattattttaatgaaaaaaaggatattctaaaagaaagtaacatacagttcaattaagaccatggaaatttttatttcaaacaattagagatggatattacaactaaataaaataattttactag

SEQ ID NO: 18425 - DNA, 690 bp, Homo sapiens
  source 1..690: mol_type = unassigned DNA
gcgcgagcttggagccgggtagagggcgggccttccgggacgagggcgcgtgggtgaggaaggtcaggtctaggaactctaactccttgccactcaagaaatgtcctccctttcagaatatgccttccgcatgtctcgtctcagtgcccggctatttggtgaagtcaccaggcctactaattccaagtctatgaaagtggtgaaactgtttagtgaactgcccttggccaagaagaaggagacttatgattggtatccaaatcaccacacttacgctgaactcatgcagacgctccgatttcttggactctacagagatgagcatcaggattttatggatgagcaaaaacgactaaagaagcttcgtggaaaggagaaaccaaagaaaggagaagggaaaagagcagcaaaaaggaaatagtgttggtccctcaagagggagactttcttcctcagtggcggagagaagaaagtgcatttattgtctttccacctattggaggaatgtcatcttcctaaatgaagtttatttggaggaacacagtcatctccttggtgaaatctaatccggttacattgtggctggtttcttgaacacattctaactgtgcaaaattatcttggccttggccgtgtaatgtgaggtttacctgattctctaatgaaataaatacctaagttattgtttga

SEQ ID NO: 18426 - DNA, 853 bp, Homo sapiens
  source 1..853: mol_type = unassigned DNA
gcaattactctcttccatattggttaacagtagaaggctcagtttctctgctcatcacacggccttcggcactgtagctttgggtggtgggctgcagattaattttgtaaccaccttaagaaaaatacggaactctaactccttgccactcaagaaatgtcctccctttcagaatatgccttccgcatgtctcgtctcagtgcccggctatttggtgaagtcaccaggcctactaattccaagtctatgaaagtggtgaaactgtttagtgaactgcccttggccaagaagaaggagacttatgattggtatccaaatcaccacacttacgctgaactcatgcagacgctccgatttcttggactctacagagatgagcatcaggattttatggatgagcaaaaacgactaaagaagcttcgtggaaaggagaaaccaaagaaaggagaagggaaaagagcagcaaaaaggaaatagtgttggtccctcaagagggagactttcttcctcagtggcggagagaagaaagtgcatttattgtctttccacctattggaggaatgtcatcttcctaaatgaagtttatttggaggaacacagtcatctccttggtgaaatctaatccggttacattgtggctggtttcttgaacacattctaactgtgcaaaattatcttggccttggccgtgtaatgtgaggtttacctgattctctaatgaaataaatacctaagttattgtttgatgatttgtttggggtgggatgggatgctgggggaatggaggggaaacctcattaagtgagcatcctatagtgtcctcatttctcccttcttgcttactgactcaccc

SEQ ID NO: 18427 - DNA, 744 bp, Homo sapiens
  source 1..744: mol_type = unassigned DNA
attcccaccaaaacatactaccgaaccgtgcatgcccttccaggagagccagacctttctaactctccccagcccaccacctccccgggtcctccgcacaggcggcggcgctagccttactgcgcaggcgccaggaactctaactccttgccactcaagaaatgtcctccctttcagaatatgccttccgcatgtctcgtctcagtgcccggctatttggtgaagtcaccaggcctactaattccaagtctatgaaagtggtgaaactgtttagtgaactgcccttggccaagaagaaggagacttatgattggtatccaaatcaccacacttacgctgaactcatgcagacgctccgatttcttggactctacagagatgagcatcaggattttatggatgagcaaaaacgactaaagaagcttcgtggaaaggagaaaccaaagaaaggagaagggaaaagagcagcaaaaaggaaatagtgttggtccctcaagagggagactttcttcctcagtggcggagagaagaaagtgcatttattgtctttccacctattggaggaatgtcatcttcctaaatgaagtttatttggaggaacacagtcatctccttggtgaaatctaatccggttacattgtggctggtttcttgaacacattctaactgtgcaaaattatcttggccttggccgtgtaatgtgaggtttacctgattctctaatgaaataaatacctaagttat

SEQ ID NO: 18428 - DNA, 688 bp, Homo sapiens
  source 1..688: mol_type = unassigned DNA
agattgttcttgatgaactgaatgcagctaatacattttcagtgccgttgatgcctctatgactccgtaaaataatcggaactctaactccttgccactcaagaaatgtcctccctttcagaatatgccttccgcatgtctcgtctcagtgcccggctatttggtgaagtcaccaggcctactaattccaagtctatgaaagtggtgaaactgtttagtgaactgcccttggccaagaagaaggagacttatgattggtatccaaatcaccacacttacgctgaactcatgcagacgctccgatttcttggactctacagagatgagcatcaggattttatggatgagcaaaaacgactaaagaagcttcgtggaaaggagaaaccaaagaaaggagaagggaaaagagcagcaaaaaggaaatagtgttggtccctcaagagggagactttcttcctcagtggcggagagaagaaagtgcatttattgtctttccacctattggaggaatgtcatcttcctaaatgaagtttatttggaggaacacagtcatctccttggtgaaatctaatccggttacattgtggctggtttcttgaacacattctaactgtgcaaaattatcttggccttggccgtgtaatgtgaggtttacctgattctctaatgaaataaatacctaagttat

SEQ ID NO: 18429 - DNA, 402 bp, Homo sapiens
  source 1..402: mol_type = unassigned DNA
ccgggacgagggcgcgtgggtgaggaaggtcaggtctaggaactctaactccttgccactcaagaaatgtcctccctttcagaatatgccttccgcatgtctcgtctcagtgcccggctatttggtgaagtcaccaggcctactaattccaagtctatgaaagtggtgaaactgtttagtgaactgcccttggccaagaagaaggagacttatgattggtatccaaatcaccacacttacgctgaactcatgcagacgctccgatttcttggactctacagagatgagcatcaggattttatggatgagcaaaaacgactaaagaagcttcgtggaaaggagaaaccaaagaaaggagaagggaaaagagcagcaaaaagaaaaaaaaaaaaaaaaaagaga

SEQ ID NO: 18430 - DNA, 1040 bp, Homo sapiens
  source 1..1040: mol_type = unassigned DNA
ccggccggaccgctgaggacgcggacccgccatggcgcggaagaaggtgcgtccgcggctgatcgcggagctggcccgccgcgtgcgcgccctgcgggagcaactgaacaggccgcgcgactcccagctctacgcggtggactacgagaccttgacgcggccgttctctggacgccggctgccggtccgggcctgggccgacgtgcgccgcgagagccgcctcttgcagctgctcggccgcctcccgctcttcggcctgggccgcctggtcacgcgcaagtcctggctgtggcagcacgacgagccgtgctactggcgcctcacgcgggtgcggcccgactacacggcgcagaacttggaccacgggaaggcctggggcatcctgaccttcaaagacgcctctttttcttcatcagggaagactgagagcgaggcgcgggagatcgaacacgtcatgtaccatgactggcggctggtgcccaagcacgaggaggaggccttcaccgcgttcacgccggcgccggaagacagcctggcctccgtgccgtacccgcctctcctccgggccatgattatcgcagaacgacagaaaaatggagacacaagcaccgaggagcccatgctgaatgtgcagaggatacgcatggaaccctgggattaccctgcaaaacaggaagacaaaggaagggccaagggcacccccgtctagaatgccagaaccagcgggtggccttaggggctgtgaggcagtggggaccttattgatgaaagaaaccgtctttgcgttacacccgagtctgcctctcggagcagggagctcaccttccgcgacgtgttctgagggtctgcatcttaggggggagggctggggcaaatcgccacctgtgcctttcctctggccctgctgcccccacacccaactccgagggcccacgctggggaaagcgggaagcgctcgctccctttcccccattagtgctctctctgcctggatcccggcagaagctatgaaagggaataaagagaaaagaagtacccag

SEQ ID NO: 18431 - DNA, 1024 bp, Homo sapiens
  source 1..1024: mol_type = unassigned DNA
gacttccggccggaccgctgaggacgcggacccgccatggcgcggaagaaggtgcgtccgcggctgatcgcggagctggcccgccgcgtgcgcgccctgcgggagcaactgaacaggccgcgcgactcccagctctacgcggtggactacgagaccttgacgcggccgttctctggacgccggctgccggtccgggcctgggccgacgtgcgccgcgagagccgcctcttgcagctgctcggccgcctcccgctcttcggcctgggccgcctggtcacgcgcaagtcctggctgtggcagcacgacgagccgtgctactggcgcctcacgcgggtgcggcccgactacacggcgcagaacttggaccacgggaaggcctggggcatcctgaccttcaaagggaagactgagagcgaggcgcgggagatcgaacacgtcatgtaccatgactggcggctggtgcccaagcacgaggaggaggccttcaccgcgttcacgccggcgccggaagacagcctggcctccgtgccgtacccgcctctcctccgggccatgattatcgcagaacgacagaaaaatggagacacaagcaccgaggagcccatgctgaatgtgcagaggatacgcatggaaccctgggattaccctgcaaaacaggaagacaaaggaagggccaagggcacccccgtctagaatgccagaaccagcgggtggccttaggggctgtgaggcagtggggaccttattgatgaaagaaaccgtctttgcgttacacccgagtctgcctctcggagcagggagctcaccttccgcgacgtgttctgagggtctgcatcttaggggggagggctggggcaaatcgccacctgtgcctttcctctggccctgctgcccccacacccaactccgagggcccacgctggggaaagcgggaagcgctcgctccctttcccccattagtgctctctctgcctggatcccggcagaagctatgaaagggaataaagagaaaagaagtacccag

SEQ ID NO: 18432 - DNA, 1888 bp, Homo sapiens
  source 1..1888: mol_type = unassigned DNA
gcttagcggccccaggcccgcccctgacactgaacgccgcttgtcccctccggcttgccgtcctcgcagccatggcggccgccgcgctcccagcatggctgtctctgcagtcgagggcaaggactctgcgtgcattctccactgccgtctactcggccactccggtcccgacacctagcctgccggaaagaacacccggaaatgaaaggccaccaagaagaaaggcactacctcctaggacagagaaaatggctgttgaccaggactggcctagtgtttacccagttgcagcaccatttaaaccctctgcagtacctcttcctgttcgaatgggttatccagtaaaaaagggcgtgcccatggcaaaggagggaaatctagaacttttaaagattcccaattttctgcatttgactcctgtagcaattaaaaagcactgtgaagcccttaaagatttttgcactgagtggccagccgcactggacagtgacgagaaatgtgagaagcattttccaattgaaattgacagcactgattatgtttcatcaggaccatctgttcggaaccccagagcacgagtagtagtcttaagagtaaagctttccagtttgaatttagatgatcacgcaaagaagaaattaattaaacttgtaggagagcgatactgcaagaccacagatgtgcttaccatcaaaacagataggtgccctttaaggaggcagaattacgattatgcagtgtatctactaacagtgttataccatgagtcttggaatactgaagaatgggaaaaaagtaagactgaagcagacatggaagagtatatatgggaaaatagctcatcagaaagaaatatcctggaaacgcttctccagatgaaagctgctgagaaaaatatggaaataaataaagaagagctccttggtactaaagaaattgaagagtacaaaaagtctgttgttagtcttaaaaatgaggaggaaaatgaaaattccatttctcagtacaaagaatccgtgaagagactattaaatgtgacatgaattatggagtagaaaaatctgcttgatttattaattttatgatatatgtgatcagtatctaatttgatataaaattgaaaatgttaaaaaatcattttttttcctcagagttaaaattatttccctcatactaatgcttaatggcaatgattactccagagttttttaatttttacactggggcaatagactaggaggtctctgatttcttcttggtctaaagtgttttgattttatttctacataatagctttggtattcatgtatatacatgcatttaattgtgattttatcacctttcccatttctttccccacaagctggcatttcagtagttgcttttgaataatggttttggttacctgggaaggcaggcccagaacccatttccttgacttgcagttccgggctgtgttcacatgactgctgtctagctgatgcatttttcacatttgtcaactctggttagaaacaggtcctcaggagtattctctaacctgatattttctaaaaagatatgttgattcaactttgtttagcatcctactttctagattgtggggctcattttgccagggccaagctaccagaaaagtagaagtggagattacctggtatgtatctctctgggtgccccagttagagctgccacagctcaggaaaaagatgaggcataacgaccttgaatgtaattggagtaagtgacaaaataagaactaccctgggaaaccctgcattcaatgtagctgtcaattcagtatttttaagtacacctgtcagctgtttcttaccacttcgatggttgtgattaatttaaaatcaaaataaaggaattactgagttta

SEQ ID NO: 18433 - DNA, 1720 bp, Homo sapiens
  source 1..1720: mol_type = unassigned DNA
gtcctcgcagccatggcggccgccgcgctcccagcatggctgtctctgcagtcgagggcaaggactctgcgtgcattctccactgccgtctactcggccactccggtcccgacacctagcctgccggaaagaacacccggaaatgaaaggccaccaagaagaaaggcactacctcctaggacagagaaaatggctgttgaccaggactggcctagtgtttacccagttgcagcaccatttaaaccctctgcagtacctcttcctgttcgaatgggttatccagtaaaaaagggcgtgcccatggcaaaggagggaaatctagaacttttaaagattcccaattttctgcatttgactcctgtagcaattaaaaagcactgtgaagcccttaaagatttttgcactgagtggccagccgcactggacagtgacgagaaatgtgagaagcattttccaattgaaattgacagcactgattatgtttcatcaggaccatctgttcggaaccccagagcacgagtagtagtcttaagaaggtgccctttaaggaggcagaattacgattatgcagtgtatctactaacagtgttataccatgagtcttggaatactgaagaatgggaaaaaagtaagactgaagcagacatggaagagtatatatgggaaaatagctcatcagaaagaaatatcctggaaacgcttctccagatgaaagctgctgagaaaaatatggaaataaataaagaagagctccttggtactaaagaaattgaagagtacaaaaagtctgttgttagtcttaaaaatgaggaggaaaatgaaaattccatttctcagtacaaagaatccgtgaagagactattaaatgtgacatgaattatggagtagaaaaatctgcttgatttattaattttatgatatatgtgatcagtatctaatttgatataaaattgaaaatgttaaaaaatcattttttttcctcagagttaaaattatttccctcatactaatgcttaatggcaatgattactccagagttttttaatttttacactggggcaatagactaggaggtctctgatttcttcttggtctaaagtgttttgattttatttctacataatagctttggtattcatgtatatacatgcatttaattgtgattttatcacctttcccatttctttccccacaagctggcatttcagtagttgcttttgaataatggttttggttacctgggaaggcaggcccagaacccatttccttgacttgcagttccgggctgtgttcacatgactgctgtctagctgatgcatttttcacatttgtcaactctggttagaaacaggtcctcaggagtattctctaacctgatattttctaaaaagatatgttgattcaactttgtttagcatcctactttctagattgtggggctcattttgccagggccaagctaccagaaaagtagaagtggagattacctggtatgtatctctctgggtgccccagttagagctgccacagctcaggaaaaagatgaggcataacgaccttgaatgtaattggagtaagtgacaaaataagaactaccctgggaaaccctgcattcaatgtagctgtcaattcagtatttttaagtacacctgtcagctgtttcttaccacttcgatggttgtgattaatttaaaatcaaaataaaggaattactgagttt

SEQ ID NO: 18434 - DNA, 1715 bp, Homo sapiens
  source 1..1715: mol_type = unassigned DNA
ctcgcagccatggcggccgccgcgctcccagcatggctgtctctgcagtcgagggcaaggactctgcgtgcattctccactgccgtctactcggccactccggtcccgacacctagcctgccggaaagaacacccggaaatgaaaggccaccaagaagaaaggcactacctcctaggacagagaaaatggctgttgaccaggactggcctagtgtttacccagttgcagcaccatttaaaccctctgcagtacctcttcctgttcgaatgggttatccagtaaaaaagggcgtgcccatggcaaaggagggaaatctagaacttttaaagattcccaattttctgcatttgactcctgtagcaattaaaaagcactgtgaagcccttaaagatttttgcactgagtggccagccgcactggacagtgacgagaaatgtgagaagcattttccaattgaaattgacagcactgattatgtttcatcaggaccatctgttcggaaccccagagcacgagtagtagtcttaagagtgccctttaaggaggcagaattacgattatgcagtgtatctactaacagtgttataccatgagtcttggaatactgaagaatgggaaaaaagtaagactgaagcagacatggaagagtatatatgggaaaatagctcatcagaaagaaatatcctggaaacgcttctccagatgaaagctgctgagaaaaatatggaaataaataaagaagagctccttggtactaaagaaattgaagagtacaaaaagtctgttgttagtcttaaaaatgaggaggaaaatgaaaattccatttctcagtacaaagaatccgtgaagagactattaaatgtgacatgaattatggagtagaaaaatctgcttgatttattaattttatgatatatgtgatcagtatctaatttgatataaaattgaaaatgttaaaaaatcattttttttcctcagagttaaaattatttccctcatactaatgcttaatggcaatgattactccagagttttttaatttttacactggggcaatagactaggaggtctctgatttcttcttggtctaaagtgttttgattttatttctacataatagctttggtattcatgtatatacatgcatttaattgtgattttatcacctttcccatttctttccccacaagctggcatttcagtagttgcttttgaataatggttttggttacctgggaaggcaggcccagaacccatttccttgacttgcagttccgggctgtgttcacatgactgctgtctagctgatgcatttttcacatttgtcaactctggttagaaacaggtcctcaggagtattctctaacctgatattttctaaaaagatatgttgattcaactttgtttagcatcctactttctagattgtggggctcattttgccagggccaagctaccagaaaagtagaagtggagattacctggtatgtatctctctgggtgccccagttagagctgccacagctcaggaaaaagatgaggcataacgaccttgaatgtaattggagtaagtgacaaaataagaactaccctgggaaaccctgcattcaatgtagctgtcaattcagtatttttaagtacacctgtcagctgtttcttaccacttcgatggttgtgattaatttaaaatcaaaataaaggaattactgagttt

SEQ ID NO: 18435 - DNA, 1286 bp, Homo sapiens
  source 1..1286: mol_type = unassigned DNA
acagctgcccgggactccagtgatcgccgcggctcgctcgcgccccggaaactgccccttctcgggggtcatgatgggcagcaagatggcgtctgctagtagggtcgttcaggtagtcaaaccacacactccattaataaggtttcctgacagaagagacaatcctaaacccaatgtatcagaagctttgagatcagcagggctaccatctcactcttctgtaatttcacaacattctaaaggaagtaaatcaccagatttgctgatgtatcagggtccaccagacactgcagaaataataaaaacattacctcagaaatacagaaggaaacttgtgtctcaagaagaaatggaatttatccaacgtggaggtcctgaataaccatggtggctgctgtttgtcatcagacaatagaattgtctttacaataaaggacttccaaaatgacagatgagaaactgtatattaaacacctttaataaatattatgaaaaaaatgaaatatagaaaatttagatggacacttgtatttcctaatttatgtatcttggtcagcttctccacaagcttacctaattgtttatatactttatacttattaaagtatacatttttaaatgttagcctattaatttactcttgattatcaaacattaccagtgttgaactattaaaagcacacaatgtgtagtaaactatcataggattcccataatttcactttactttctgtttaggcatggaaaaatttatcagtcagaattgctgttttagggacatgattttcctgaaattgggtgaggatcagtgaaataattactctattacttgttcttaattctctgttctctaatgttttttcattcacaagtttactggagtataactggcttagtaagtatatcctactctgaatgataaaaatatagtcaagctaaaataggtgactatactattaagatagagatcatacaaaagattccaaagaaagtcaaaaagtgtaaaatggaaaataagagatcaaaatgaatatagcataggaataaagatttcactagaaattgcaatttattatgttttggaggttgtaaggaagtcttgttttttggtttattttactgttttgtgatcttgtatgcaaatcctgataaccattaaccttctcaaacttaatgtctgagagcctcataaaatcaacatatttacttattaagcagtttatgaaactttaatggggcccctcctgtgccaagggtacgtatattgtgaagtaaagcctcacaaa

SEQ ID NO: 18436 - DNA, 1652 bp, Homo sapiens
  source 1..1652: mol_type = unassigned DNA
cgcccgcggggctgtccgcggtcgcgccgggctccgcctgcagtgtggcccgtccggacagtccctcaccccggcctgcgctgctgcgtggactcgggcctcaggaattccgctgcggcccaaggcttgccgtttgacgaggagcagtcgcggtaggcggtgggcaaggctgccctgggcggaggccgaggcgcggctcggactccagcatggcgaccgcggtgcgcgctgtgggctgcctccccgtgctgtgtagcgggacggcaggtcatttattggggaggcagtgttccctaaacaccttaccagcagcttccattttggcatggaagagtgttctcggcaatggccatttgtcatcactgggaaccagagacacccatccctacgccagcttgagccgtgcactgcagacacaatgctgtatttcttctcccagtcacctgatgagccagcagtatagaccatatagtttcttcactaaattgactgcagatgagctgtggaaaggcgctttagcagagactggtgctggagcaaaaaaaggaagaggcaaaagaactaaaaagaagaaaagaaaggatctgaacaggggtcagatcattggtgaagggcgttatggttttctatggcccggactgaatgtccctcttatgaaaaatggagcagtgcagaccattgcccaaagaagcaaggaagagcaggagaaggtggaggcagacatgatccagcagagagaagagtgggaccgaaagaagaagatgaaggttaaacgggagcgaggatggagtggaaactcatggggaggcatcagtcttggcccccctgaccctggtccctgtggagaaacatatgaggattttgataccaggatacttgaggtaagaaacgttttcactatgactgcgaaagagggaagaaagaaatcgatccgtgtcttggtggctgtggggaacggaaaaggagctgcaggtttttctattgggaaagctactgatcggatggatgctttcaggaaagcaaagaacagagcagttcaccatttgcattatatagaacgatatgaagaccatacaatattccatgatatttcattaagatttaaaaggacgcatatcaagatgaagaaacaacccaaaggttacggcctccgctgccacagggccatcatcaccatctgccggctcattggcatcaaagacatgtatgccaaggtctctgggtccattaatatgctcagcctcacccagggcctcttccgtgggctctccagacaggaaacccatcaacagctggctgataagaagggcctccatgttgtggaaatccgggaggaatgtggccctctgcccattgtggttgcgtccccccgggggcccttgaggaaggatccagagccagaagatgaggttccagacgtcaaactggactgggaagatgtgaagactgcacagggaatgaagcgctctgtgtggtctaatttgaagagagccgccacgtaacctctctggccttgtgcagccagttcctgtgctgccctgcacctaggagagactcagcccctcacagcttgggatgttaccttgccttttgtttgttttgagggaagtttaatctttaaactctttggaaataaataattatagctttca

SEQ ID NO: 18437 - DNA, 990 bp, Homo sapiens
  source 1..990: mol_type = unassigned DNA
cggcgtctgcgcagctgccagcgcctttaagcccgggctcgcgctctcggaccgtgctttcgccgcctgggagccgtccggcgcagcagtttctaggtccccactgtccccgccgtcccgccccttcgcgtcccgggaaccggctggcttccgagccgcactcgccgatcctccaggcatgccccgctacgagctggctttaatcctgaaagccatgcagcggccagagactgctgctactttgaaacgtacgatagaggccctgatggacagaggagcaatagtgagggacttggaaaacctgggtgaacgagcgcttccttataggatctctgcccacagtcagcagcacaacagaggcgggtatttcttggtggatttttatgcacccaccgcagctgttgaaagcatggtggagcacttgtctcgagatatagatgtgattagagggaatattgtcaaacaccctctgacccaggaactaaaagaatgtgaagggattgtcccagtcccactcgcagaaaaattatattccacaaagaagaggaagaagtgagaagattcgccagattttagccttatatgtaattccttcacatttgggcagcatggacgagaaggaagaatttgcaagtttggcctttatataagcatgtgttgcaggtgctgtttgatttttctaaggtatttttagcccttgatcccctttgcttgcgagaggtggggaactgctcactgacagcttctctgtaacctgcagtaccagtggatcgttcttgattttgttttcattagtgtcatttctttgtcattgaggacttttccccttacaacagtaacaccattttttgaagagcaaaacttataatacctcctgggattgtgagctagtcattcagcctgtgtaaccatgtggaaataaaaattgacgaccaatgtattatatggacaacttttgctttgagtaataaacttgattgtaggaatgtg

SEQ ID NO: 18438 - DNA, 1414 bp, Homo sapiens
  source 1..1414: mol_type = unassigned DNA
ctgagaggagtgagtgccgtcaccgagggccgcgccagactgcgacggatacagggagggcaagggtttccttttggcgctcccctttggaccccggagtgaaaaactctaacgtccagatcagtggagagaaacgcagatttaggaccctgaggagtctttttcacccgtttcccgtcactcgctcaggcgcgccgagggcagtccttgtggggtcctcgtggccagccaagatggctgcccccgcagtgaaggttgcccgaggatggtcgggcctggcgttgggcgtgcggcgggctgtcttgcagcttccagggctaactcaggtgagatggagccgctatagtcctgaattcaaggatcccttgattgacaaggaatattatcgcaagccagtggaggagctaactgaggaggagaaatatgttcgggagctcaagaagactcagctcatcaaagctgctccagcagggaaaacaagttctgtgtttgaagacccagtcatcagtaaattcaccaacatgatgatgataggaggaaacaaagtactggccagatccctcatgattcagactctggaagctgtgaaaaggaagcagtttgagaagtaccatgccgcttctgcagaggaacaggcaaccatcgaacgcaacccctacaccatcttccatcaagcactgaaaaactgtgagcctatgattgggctggtacccatcctcaagggaggccgtttctaccaggtccctgtacccctacccgaccggcgtcgccgcttcctagccatgaagtggatgatcactgagtgccgggataaaaagcaccagcggacactgatgccggagaagctgtcacacaagctgctggaggctttccataaccagggccccgtgatcaagaggaagcatgacttgcacaagatggcagaggccaaccgtgccctggcccactaccgctggtggtagagtctccaggaggagcccagggccctctgccgcaagaaacagtgtgagctactgccacgctgaaaactacctgtgggttaaggatgtagttcctttgtaagggtgggcaggcctcgtaagaaagatgtagcagcatattcactatccgttaatccttctttctttgaggctggaacttgctctctctgcccctatttccttgtaaagagggagcacattgacttgggaatttcctccaggaaactcagggctgttttctcttcccttaggttggggcggacctttggatatataaaggaagcagttttagtatcagaaaagatttattagaaaattctcacgctgaactggtgtagcatgtggtgcagcattcagtgaaactggctggaggaaataggcttgtttccagagttgtccttatacaaaatgtataaaaagcagtttctggtgtg

SEQ ID NO: 18439 - DNA, 1500 bp, Homo sapiens
  source 1..1500: mol_type = unassigned DNA
ccgagaagctcttgcacaggacagcctctggaaccccgcgccattagcgcctgcgccgtctctaggccccgccccctcacccctccggtcctggagctcccacagctaacatggcggcgccctgtgtgtcctacggcggagcagtttcgtaccggcttcttctctggggtaggggtagcctcgcccggaagcaaggcctctggaaaaccgcggcccctgagttgcaaacaaatgtcagatcccagatattaaggctaagacatactgcatttgtaataccaaagaaaaacgttcctacctcaaaacgtgaaacttacacagaggattttattaaaaagcagattgaagagttcaacataggaaagagacatttagccaacatgatgggagaagatccagaaactttcactcaagaagatattgacagagctattgcttaccttttcccaagtggtttgtttgagaaacgagccaggccagtaatgaagcatcctgaacagatttttccaagacaaagagcaatccagtggggagaagatggccgtccatttcactatctcttctatactggcaaacagtcatactattcattaatgcatgatgtatatggaatgttactcaatttagaaaaacatcaaagtcacttgcaagccaaaagtctgctcccagaaaaaactgtaaccagagacgtgattggcagcagatggctgattaaggaggaactagaagaaatgttagtggaaaaactgtcagatctagattatatgcagttcattcggctgctagaaaagttattgacatcgcagtgtggtgctgctgaggaagaatttgtgcagaggtttcgaagaagtgtaactcttgaatcaaaaaaacagctgattgaacctgtacagtatgatgagcaaggaatggcctttagcaaaagtgaaggtaaaagaaagactgcaaaagcagaagcaattgtttataaacatggaagtggaagaataaaagtaaatggaattgattaccagctttacttcccgatcacacaggacagagaacagctgatgttccctttccactttgttgaccggctgggaaagcacgacgtgacctgcacagtctcagggggcgggaggtcagcgcaggctggagcaatacgactggcaatggcaaaagccttgtgcagctttgtcaccgaggacgaggtcgagtggatgagacaagctggactacttactactgatccacgtgtgagggaacggaagaagccaggccaagagggagcccgcagaaagtttacgtggaagaaacgctaagggtttgctcccaggaaaggagaggaagagctatatatatgtgccgacatgtggcagacacacagtaaataatggctgaccagcatgagggcagtactgtcagaaatttctttgagctgtgagatggatttatttttaaatgctactttgtaaaggtgacctttaaaaaataaaaggaaaataaagaatgttagtttca

SEQ ID NO: 18440 - DNA, 1353 bp, Homo sapiens
  source 1..1353: mol_type = unassigned DNA
caggctctgtgttggttggagcgagcatgtgggtctgcagtaccctgtggcgggtgcgaacccccgcccggcagtggcgggggctgctcccagcttctggctgtcacggacctgccgcctcctcctactccgcatccgccgagcctgcccgggtccgggcgcttgtctatgggcaccacggggatccagccaaggtcgtcgaactcaagaacctggagctagctgctgtgagaggatcagatgtccgtgtgaagatgctggcggcccctatcaatccatctgacataaatatgatccaaggaaactacggattccttcctgaactgcctgctgttggagggaacgaaggtgttgcacaggtggtagcggtgggcagcaatgtgaccgggctgaagccaggagactgggtgattccagcaaatgctggtttaggaacctggcggaccgaggctgtgttcagcgaggaagcactgatccaagttccgagtgacatccctcttcagagcgctgccaccctgggtgtcaatccctgcacagcctacaggatgttgatggacttcgagcaactgcagccaggggattctgtcatccagaatgcatccaacagcggagtggggcaagcagtcatccagatcgccgcagccctgggcctaagaaccatcaatgtggtccgagacagacctgatatccagaagctgagtgacagactgaagagtctgggggctgagcatgtcatcacagaagaggagctaagaaggcccgaaatgaaaaacttctttaaggacatgccccagccacggcttgctctcaactgtgttggtgggaaaagctccacagagctgctgcggcagttagcgcgtggaggaaccatggtaacctatggggggatggccaagcagcccgtcgtagcctctgtgagcctgctcatttttaaggatctcaaacttcgaggcttttggttgtcccagtggaagaaggatcacagtccagaccagttcaaggagctgatcctcacactgtgcgatctcatccgccgaggccagctcacagcccctgcctgctcccaggtcccgctgcaggactaccagtctgccttggaagcctccatgaagcccttcatatcttcaaagcagattctcaccatgtgatcatcccaaaagagctggagtgacatgggaggggaggcggatctgaggggctgggtgcaggcccctcagttggggctcccaccttccccagactactgttctcctcactgcctcttcctattaggaggatggtgaagccagccacggttttccccagggccagccttaaggtatctaataaagtctgaactctcccttccaaaaa

SEQ ID NO: 18441 - DNA, 2416 bp, Homo sapiens
  source 1..2416: mol_type = unassigned DNA
gtgttggttggagcgagcatgtgggtctgcagtaccctgtggcgggtgcgaacccccgcccggcagtggcgggggctgctcccagcttctggctgtcacggacctgccgcctcctcctactccgcatccgccgagcctgcccgggtccgggcgcttgtctatgggcaccacggggatccagccaaggtcgtcgaaaccgtaattcctgggcacacatggcagctcagaaatgttgcctgacctactttgaggagatgatttgagcgaaacacccattctagcctggatgacatgaacatctccgtttggctttgtgcttagactcaagaacctggagctagctgctgtgagaggatcagatgtccgtgtgaagatgctggcggcccctatcaatccatctgacataaatatgatccaaggaaactacggattccttcctgaactgcctgctgttggagggaacgaaggtgttgcacaggtggtagcggtgggcagcaatgtgaccgggctgaagccaggagactgggtgattccagcaaatgctggtttaggaacctggcggaccgaggctgtgttcagcgaggaagcactgatccaagttccgagtgacatccctcttcagagcgctgccaccctgggtgtcaatccctgcacagcctacaggatgttgatggacttcgagcaactgcagccaggggattctgtcatccagaatgcatccaacagcggagtggggcaagcagtcatccagatcgccgcagccctgggcctaagaaccatcaatgtggtccgagacagacctgatatccagaagctgagtgacagactgaagagtctgggggctgagcatgtcatcacagaagaggagctaagaaggcccgaaatgaaaaacttctttaaggacatgccccagccacggcttgctctcaactgtgttggtgggaaaagctccacagagctgctgcggcagttagcgcgtggaggaaccatggtaacctatggggggatggccaagcagcccgtcgtagcctctgtgagcctgctcatttttaaggatctcaaacttcgaggcttttggttgtcccagtggaagaaggatcacagtccagaccagttcaaggagctgatcctcacactgtgcgatctcatccgccgaggccagctcacagcccctgcctgctcccaggtcccgctgcaggactaccagtctgccttggaagcctccatgaagcccttcatatcttcaaagcagattctcaccatgtgatcatcccaaaagagctggagtgacatgggaggggaggcggatctgaggggctgggtgcaggcccctcagttggggctcccaccttccccagactactgttctcctcactgcctcttcctattaggaggatggtgaagccagccacggttttccccagggccagccttaaggtatctaataaagtctgaactctcccttccaaaaagtagaagtcatccctgtcgagaaggaccaacactgtgcactggtcagctcacagcaccaagaggcccccttcctgcttttctgtcatgtgttcccccagtaatcattttctgaccaccctgaaagcaaagcctgggtgggtactggcagtgcaaaggccagtaggccaccatccctggccccaagctgcacaagcccacagacgagggtcctgtagaacaaacgctttgatgtgcttctcaggtagcctgcggcccagtccagggcttggggaggatcagctgcatggaagagtgaatgccaggctgaggtcatcagggccctgaggaacttggacgtggggtcttcactctcatggaactgcccttctaactggagacatagacaatataccagtggttctcaaccagaggcaattttacccccaggagacatttgacaatgtctggggatatttctggctatcacagcttatgaaggaggttgctactggcatctagcaggcagagtgagtgctgctgttaaacccaccacaggacacagaacagtctactgcaacaaagaattacccaaggcctggcgcggtggctcacacctgtaatcccagcactttgggaagccaaggcaagcggatcacttgagcccaggagttcaaggtcaacctaggtaacgtggtgaaacaccatctctacaaaaaatacaaacattagccaggtatggtgctgtgcacctgtagtcccagctactcgggaggttgaggtgggaggatcacctgagcctgggaggtctagactgcagtgagccatgatcatgccactgcattccagcctaggcaacagagcaagaccctatatcaaaaaaaaaaaaaaaatctagccccaaatgttcaatgttcatgaggtcgttgataaaccgtgcattaaacaatctcacagtaattaccat

SEQ ID NO: 18442 - DNA, 1490 bp, Homo sapiens
  source 1..1490: mol_type = unassigned DNA
gctctgtgttggttggagcgagcatgtgggtctgcagtaccctgtggcgggtgcgaacccccgcccggcagtggcgggggctgctcccagcttctggctgtcacggacctgccgcctcctcctactccgcatccgccgagcctgcccgggtccgggcgcttgtctatgggcaccacggggatccagccaaggtcgtcgaactcaagaacctggagctagctgctgtgagaggatcagatgtccgtgtgaagatgctggcggcccctatcaatccatctgacataaatatgatccaaggaaactacggattccttcctgaactgcctgctgttggagggaacgaaggtgttgcacaggtggtagcggtgggcagcaatgtgaccgggctgaagccaggagactgggtgattccagcaaatgctggtttaggaacctggcggaccgaggctgtgttcagcgaggaagcactgatccaagttccgagtgacatccctcttcagagcgctgccaccctgggtgtcaatccctgcacagcctacaggatgttgatggacttcgagcaactgcagccaggggattctgtcatccagaatgcatccaacagcggagtggggcaagcagtcatccagatcgccgcagccctgggcctaagaaccatcaatgtggtccgagacagacctgatatccagaagctgagtgacagactgaagagtctgggggctgagcatgtcatcacagaagaggagctaagaaggcccgaaatgaaaaacttctttaagattaggaaactaagactcagaaaagaggaaatgcttaaccaaaatcatatagtttataagggctccagagagtcagagctggcctcagtctctccgaactcaaagcctcttaaccttccagaacctccaccccacaacatgcctagacatgccccagccacggcttgctctcaactgtgttggtgggaaaagctccacagagctgctgcggcagttagcgcgtggaggaaccatggtaacctatggggggatggccaagcagcccgtcgtagcctctgtgagcctgctcatttttaaggatctcaaacttcgaggcttttggttgtcccagtggaagaaggatcacagtccagaccagttcaaggagctgatcctcacactgtgcgatctcatccgccgaggccagctcacagcccctgcctgctcccaggtcccgctgcaggactaccagtctgccttggaagcctccatgaagcccttcatatcttcaaagcagattctcaccatgtgatcatcccaaaagagctggagtgacatgggaggggaggcggatctgaggggctgggtgcaggcccctcagttggggctcccaccttccccagactactgttctcctcactgcctcttcctattaggaggatggtgaagccagccacggttttccccagggccagccttaaggtatctaataaagtctgaactctcccttcc

SEQ ID NO: 18443 - DNA, 623 bp, Homo sapiens
  source 1..623: mol_type = unassigned DNA
gccaccctgggtgtcaatccctgcacagcctacaggatgttgatggacttcgagcaactgcagccaggggattctgtcatccagaatgcatccaacagcggagtggggcaagcagtcatccagatcgccgcagccctgggcctaagaaccatcaatgtggtccgagacagacctgatatccagaagctgagtgacagactgaagagtctgggggctgagcatgtcatcacagaagaggagctaagaaggcccgaaatgaaaaacttctttaagattaggaaactaagactcagaaaagaggaaatgcttaaccaaaatcatatagtttataagggctccagagagtcagagctggcctcagtctctccgaactcaaagcctcttaaccttccagaacctccaccccacaacatgcctagacatgccccagccacggcttgctctcaactgtgttggtgggaaaagctccacagagctgctgcggcagttagcgcgtggaggaaccatggtaacctatggggggatggccaagcagcccgtcgtagcctctgtgagcctgctcatttttaaggatctcaaacttcgaggcttttggttgtcccagtggaagaaggatcacagtc

SEQ ID NO: 18444 - DNA, 1997 bp, Homo sapiens
  source 1..1997: mol_type = unassigned DNA
ctagccgctccggaccccagaggcggaagtaaaagcgaactacagtggatgggtgcagttcaggagatagctgttctccagcctttctggagggatgcagagcctttccttaggacaaacaagcatttcaaaaggtttgaactacctaaccattatggcaccaggaaacctctggcatatgagaaataactttctctttggttcaagatgttggatgactcgattttcagcagaaaacatcttcaaatcagtttcatttaggctttttggtgtgaagtgtcataatacagacagtgagcctttgaaaaatgaggacctactgaaaaacttacttactatgggagtagatattgacatggcaaggaaacgacagcctggagtttttcataggatgattaccaatgagcaggacctgaagatgttccttctttccaaaggagctagcaaagaagtgatcgctagcatcatatcaagatatccacgagcaataacacgtactcccgagaatctttcaaaacggtgggatctgtggagaaagattgtgacatcagaccttgaaattgtaaatattttggaacgttctcctgaatccttttttcggtccaataacaacctaaacttagagaataatataaagttcctctactcagttggattgacccgtaaatgcctttgtcgattgttgaccaatgcccctcgtaccttctccaatagtcttgatctgaataaacagatggttgaatttttgcaggcagccggtttgtcattgggtcacaatgatcccgcagattttgtcagaaagataatttttaaaaacccttttatcttaattcagagcaccaagcgggtgaaagctaacattgaattcttacggtcaactttcaatttgaacagtgaggaactgctggttctgatatgtggtccaggagctgaaatcctagacctttccaatgactatgccagaagaagctacgcaaacatcaaagagaagctgttttctcttggatgtactgaagaagaggtacagaagtttgtcttaagctatccagatgtgatcttcttggcagagaaaaagtttaatgataaaatagactgcctcatggaagaaaacattagcatttcacaaataatcgaaaatcctcgggttctggattcaagcataagtactttaaaaagtcgaatcaaagaattggtaaatgctggctgtaacttgagtactttaaacatcactcttctatcttggagtaaaaaaagatatgaagctaaattgaaaaagttaagcagatttgcctaaggatgccaatgtttttaattctcaggaactgtgaatatgttatgccacattgcaaaagaattttgcagaagtgattaatttaaaatgttattaagggccttgagatggggagattatcctgaattactttggagggcctaatataattgtagggatctttaaaagttgaagagggaggcaaaagaggaggtcagagtgatcctgtataagaaagacaactacttttgaaggaagttaaaaggtggctttgaaggaggaagacaccttgagccaaggaatgaagggggcctgtaaaaaaagattgaaaaggcaaggaaacagattctccattagagtccccagaaaggaatgcagccttgctggcacctttttagcccagtgagatcaatgtcaaacttctgacccacagaaccataagatggtaaatttgtgttgttttaaaccactgagtcagtgataatttgctgaagaagcaaatagattaacatagcaactaagtagatgattagttgcattataggtgaagtcaaaaatacagtcctttagtaaagtctctatttcttccttttataagagtaattatatttaaaaaatctacctacccttctggaattgctaatgttagtgtttataaagtcttaaatgtgtgcataaaaaactaaatgtgaatataaaatctaaataaaggaatatgtttgcctaa

SEQ ID NO: 18445 - DNA, 554 bp, Homo sapiens
  source 1..554: mol_type = unassigned DNA
aaaagcgaactacagtggatgggtgcagttcagggtgagattgggaagagatagctgttctccagcctttctggagggatgcagagcctttccttaggacaaacaagcatttcaaaaggtttgaactacctaaccattatggcaccaggaaacctctggcatatgagaaataactttctctttggttcaagatgttggatgactcgattttcagcagaaaacatcttcaaatcagtttcatttaggctttttggtgtgaagtgtcataatacagacagtgagcctttgaaaaatgaggacctactgaaaaacttacttactatgggagtagatattgacatggcaaggaaacgacagcctggagtttttcataggatgattaccaatgagcaggacctgaagatgttccttctttccaaaggagctagcaaagaagtgatcgctagcatcatatcaagatatccacgagcaataacacgtactcccgagaatctttcaaaacggtgggatctgtggagaaagattgtgacatcagaccttgaaattgtaaatat

SEQ ID NO: 18446 - DNA, 2528 bp, Homo sapiens
  source 1..2528: mol_type = unassigned DNA
ggactgacctaccgaccattcttccgggtccagaaggtgatctccgcccgtgctcagaatccaggggcccggggctgtagattccttgacaaggatatcctagcggcgaaacaacaccgtactgggagtcagaacgtctgggttctagtcttgactgccattaactagcggtatgacattggagaagcttttttgacccttctggatttccgtttccttttctgtaaaatgaggagcttggaagatccggaaaatgaggcccataggaaacaagtgacttgctgagtccagataacactgactgtcagagagaaacatgaaccagaagctactgaagttggagaacttgctacgatttcacactatttataggcaactgcacagtctgtgtcaaagaagagcattaagacagtggaggcatgggttttcatctgcttaccctgtgtggacagctcaactgtgtgcctggccctggccaacagatgtgctcactggggctgctttatctcagtataggcttctagtaacaaaaaaggaagaaggaccatggaaatctcagttatcttcaacaaaatctaaaaaggtggtagaagtatggattggaatgactattgaggaactggccagggcaatggaaaaaaacacagattatgtatatgaagctttattgaacactgatattgacatagattcactggaagcagactcacatttagatgaagtctggatcaaagaagtgataacgaaggcagggatgaagttaaagtggagtaaattaaaacaggacaaagtcagaaaaaataaagatgctgtaagaaggccccaggcagatccagctttattaaccccaaggtccccagttgttactataatgggccatgttgatcacgggaaaacgacattacttgacaaatttcgaaaaactcaagtggcagcagtggaaactggaggcatcactcagcacattggtgcctttcttgtctctctgccttctggggaaaagataacttttcttgatactccaggacatgctgctttctcagcaatgagagccagaggtgctcaggtcactgacattgtcgtattggttgtagctgcagatgatggagtgatgaaacaaactgtagaatctattcagcatgccaaagatgcacaggttcctattatccttgccgtaaataaatgtgacaaagctgaggctgatcctgagaaagtgaaaaaagagctgctggcttacgatgtggtatgtgaagattatggaggtgatgttcaagcagtgcctgtctccgcacttacgggcgataatctgatggctttggcagaagcaacagttgctcttgcagaaatgttagaattgaaagcagatcccaatggtccagtggaaggaacagtaatagagtctttcacagacaaaggaagaggtcttgttactacagctataattcaaagaggaactttaagaaaaggctctgttctggttgctggaaaatgttgggcaaaagtacgcttaatgtttgatgaaaatggaaaaacaattgatgaggcctatcccagcatgccagtgggaattacaggctggagagaccttccttctgcaggagaagaaattcttgaagtagaatctgagccaagggcacgtgaagttgttgactggaggaaatatgaacaagaacaggagaaaggtcaggaggatctgaaaataatagaagaaaagcgaaaggaacacaaagaagcacatcagaaagcccgtgagaagtatggccatctactgtggaagaagagatcaattctacggtttttagaaagaaaagaacaaatacccttaaagccaaaagagaaaagggaaagagattcaaatgtactttctgtgattattaaaggtgatgttgatggttctgttgaggccattttgaacattatagatacctatgatgcttcacacgagtgtgaactagaattagtacattttggagtgggtgatgtaagtgcaaatgatgttaaccttgctgaaacatttgatggtgttatatatggctttaatgtgaatgcaggcaatgttatccaacagtcagctgcaaaaaaaggagtaaaaattaaacttcacaaaataatttaccgtcttgttgaagatttgcaagaggaactgagcagcagattaccctgtgctgtggaagagcacccagtaggtgaggcatctatactagctaccttctctgtaacagaagggaagaaaaaagttcctgtggctggctgcagagtccaaaagggacagttagaaaaacaaaaaaaatttaaactaacccgtaatggacatgtaatttggaagggctcattaacctcattgaaacaccataaagatgacatttcaattgtcaaaacgggaatggattgtggtctcagtttagatgaagacaatatggaatttcaagtgggagacagaattgtttgttatgaagaaaagcaaattcaagccaagacttcttgggatccaggattttaaaattacattaaaaatgtaaataactcaa

SEQ ID NO: 18447 - DNA, 955 bp, Homo sapiens
  source 1..955: mol_type = unassigned DNA
cggggctgtaggtaggagttaagtgggtaggatcccttaaccagggttgtccggtgcaggtggtgtgtgttgtttcgcctaacgtgtcagtggcacaaatcacgcgaacttcataaacattgtgcgttcggaagcctttccaagatgcatttaatccctgcgtgagcccacgttaggcattcacgaaggcatgtgcactgttctctcggaagcggctggccggcttcccctcctcgcgcgcggctgtgggtgcaggtcctcacttcccagcctcccatgggcccaaggccttctgggctccaatttgaggcgagccaccccagatccgtaatttttctgcagtgatttatttttacctttctgattccttgacaaggatatcctagcggcgaaacaacaccgtactgggagtcagaacgtctgggttctagtcttgactgccattaactagcggtatgacattggagaagcttttttgacccttctggatttccgtttccttttctgtaaaatgaggagcttggaagatccggaaaatgaggcccataggaaacaagtgacttgctgagtccagataacactgactgtcagaagtctcgctctgtctccccggctggagtgcagtggcgtgatcttggctcactgcaacctctgtctcccgggttcaagaaattctcctgcctcagcctcccaagtagctgggactacaggcatgtgccaccacgcccaggagaaacatgaaccagaagctactgaagttggagaacttgctacgatttcacactatttataggcaactgcacagtctgtgtcaaagaagagcattaagacagtggaggcatgggttttcatctgcttaccctgtgtggacagctcaactgtgtgcctggccctggccaacagatgtgctcactggggctgctttatctcagtataggcttctagtaacaaaaaa

SEQ ID NO: 18448 - DNA, 2947 bp, Homo sapiens
  source 1..2947: mol_type = unassigned DNA
cggggctgtaggtaggagttaagtgggtaggatcccttaaccagggttgtccggtgcaggtggtgtgtgttgtttcgcctaacgtgtcagtggcacaaatcacgcgaacttcataaacattgtgcgttcggaagcctttccaagatgcatttaatccctgcgtgagcccacgttaggcattcacgaaggcatgtgcactgttctctcggaagcggctggccggcttcccctcctcgcgcgcggctgtgggtgcaggtcctcacttcccagcctcccatgggcccaaggccttctgggctccaatttgaggcgagccaccccagatccgtaatttttctgcagtgatttatttttacctttctgattccttgacaaggatatcctagcggcgaaacaacaccgtactgggagtcagaacgtctgggttctagtcttgactgccattaactagcggtatgacattggagaagcttttttgacccttctggatttccgtttccttttctgtaaaatgaggagcttggaagatccggaaaatgaggcccataggaaacaagtgacttgctgagtccagataacactgactgtcagaagtctcgctctgtctccccggctggagtgcagtggcgtgatcttggctcactgcaacctctgtctcccgggttcaagaaattctcctgcctcagcctcccaagtagctgggactacaggcatgtgccaccacgcccaggagaaacatgaaccagaagctactgaagttggagaacttgctacgatttcacactatttataggcaactgcacagtctgtgtcaaagaagagcattaagacagtggaggcatgggttttcatctgcttaccctgtgtggacagctcaactgtgtgcctggccctggccaacagatgtgctcactggggctgctttatctcagtataggcttctagtaacaaaaaaggaagaaggaccatggaaatctcagttatcttcaacaaaatctaaaaaggtggtagaagtatggattggaatgactattgaggaactggccagggcaatggaaaaaaacacagattatgtatatgaagctttattgaacactgatattgacatagattcactggaagcagactcacatttagatgaagtctggatcaaagaagtgataacgaaggcagggatgaagttaaagtggagtaaattaaaacaggacaaagtcagaaaaaataaagatgctgtaagaaggccccaggcagatccagctttattaaccccaaggtccccagttgttactataatgggccatgttgatcacgggaaaacgacattacttgacaaatttcgaaaaactcaagtggcagcagtggaaactggaggcatcactcagcacattggtgcctttcttgtctctctgccttctggggaaaagataacttttcttgatactccaggacatgctgctttctcagcaatgagagccagaggtgctcaggtcactgacattgtcgtattggttgtagctgcagatgatggagtgatgaaacaaactgtagaatctattcagcatgccaaagatgcacaggttcctattatccttgccgtaaataaatgtgacaaagctgaggctgatcctgagaaagtgaaaaaagagctgctggcttacgatgtggtatgtgaagattatggaggtgatgttcaagcagtgcctgtctccgcacttacgggcgataatctgatggctttggcagaagcaacagttgctcttgcagaaatgttagaattgaaagcagatcccaatggtccagtggaaggaacagtaatagagtctttcacagacaaaggaagaggtcttgttactacagctataattcaaagaggaactttaagaaaaggctctgttctggttgctggaaaatgttgggcaaaagtacgcttaatgtttgatgaaaatggaaaaacaattgatgaggcctatcccagcatgccagtgggaattacaggctggagagaccttccttctgcaggagaagaaattcttgaagtagaatctgagccaagggcacgtgaagttgttgactggaggaaatatgaacaagaacaggagaaaggtcaggaggatctgaaaataatagaagaaaagcgaaaggaacacaaagaagcacatcagaaagcccgtgagaagtatggccatctactgtggaagaagagatcaattctacggtttttagaaagaaaagaacaaatacccttaaagccaaaagagaaaagggaaagagattcaaatgtactttctgtgattattaaaggtgatgttgatggttctgttgaggccattttgaacattatagatacctatgatgcttcacacgagtgtgaactagaattagtacattttggagtgggtgatgtaagtgcaaatgatgttaaccttgctgaaacatttgatggtgttatatatggctttaatgtgaatgcaggcaatgttatccaacagtcagctgcaaaaaaaggagtaaaaattaaacttcacaaaataatttaccgtcttgttgaagatttgcaagaggaactgagcagcagattaccctgtgctgtggaagagcacccagtaggtgaggcatctatactagctaccttctctgtaacagaagggaagaaaaaagttcctgtggctggctgcagagtccaaaagggacagttagaaaaacaaaaaaaatttaaactaacccgtaatggacatgtaatttggaagggctcattaacctcattgaaacaccataaagatgacatttcaattgtcaaaacgggaatggattgtggtctcagtttagatgaagacaatatggaatttcaagtgggagacagaattgtttgttatgaagaaaagcaaattcaagccaagacttcttgggatccaggattttaaaattacattaaaaatgtaaataactc

SEQ ID NO: 18449 - DNA, 2386 bp, Homo sapiens
  source 1..2386: mol_type = unassigned DNA
gacctaccgaccattcttccgggtccagaaggtgatctccgcccgtgctcagaatccaggggcccggggctgtagagatccggaaaatgaggcccataggaaacaagtgacttgctgagtccagataacactgactgtcagagagaaacatgaaccagaagctactgaagttggagaacttgctacgatttcacactatttataggcaactgcacagtctgtgtcaaagaagagcattaagacagtggaggcatgggttttcatctgcttaccctgtgtggacagctcaactgtgtgcctggccctggccaacagatgtgctcactggggctgctttatctcagtataggcttctagtaacaaaaaaggaagaaggaccatggaaatctcagttatcttcaacaaaatctaaaaaggtggtagaagtatggattggaatgactattgaggaactggccagggcaatggaaaaaaacacagattatgtatatgaagctttattgaacactgatattgacatagattcactggaagcagactcacatttagatgaagtctggatcaaagaagtgataacgaaggcagggatgaagttaaagtggagtaaattaaaacaggacaaagtcagaaaaaataaagatgctgtaagaaggccccaggcagatccagctttattaaccccaaggtccccagttgttactataatgggccatgttgatcacgggaaaacgacattacttgacaaatttcgaaaaactcaagtggcagcagtggaaactggaggcatcactcagcacattggtgcctttcttgtctctctgccttctggggaaaagataacttttcttgatactccaggacatgctgctttctcagcaatgagagccagaggtgctcaggtcactgacattgtcgtattggttgtagctgcagatgatggagtgatgaaacaaactgtagaatctattcagcatgccaaagatgcacaggttcctattatccttgccgtaaataaatgtgacaaagctgaggctgatcctgagaaagtgaaaaaagagctgctggcttacgatgtggtatgtgaagattatggaggtgatgttcaagcagtgcctgtctccgcacttacgggcgataatctgatggctttggcagaagcaacagttgctcttgcagaaatgttagaattgaaagcagatcccaatggtccagtggaaggaacagtaatagagtctttcacagacaaaggaagaggtcttgttactacagctataattcaaagaggaactttaagaaaaggctctgttctggttgctggaaaatgttgggcaaaagtacgcttaatgtttgatgaaaatggaaaaacaattgatgaggcctatcccagcatgccagtgggaattacaggctggagagaccttccttctgcaggagaagaaattcttgaagtagaatctgagccaagggcacgtgaagttgttgactggaggaaatatgaacaagaacaggagaaaggtcaggaggatctgaaaataatagaagaaaagcgaaaggaacacaaagaagcacatcagaaagcccgtgagaagtatggccatctactgtggaagaagagatcaattctacggtttttagaaagaaaagaacaaatacccttaaagccaaaagagaaaagggaaagagattcaaatgtactttctgtgattattaaaggtgatgttgatggttctgttgaggccattttgaacattatagatacctatgatgcttcacacgagtgtgaactagaattagtacattttggagtgggtgatgtaagtgcaaatgatgttaaccttgctgaaacatttgatggtgttatatatggctttaatgtgaatgcaggcaatgttatccaacagtcagctgcaaaaaaaggagtaaaaattaaacttcacaaaataatttaccgtcttgttgaagatttgcaagaggaactgagcagcagattaccctgtgctgtggaagagcacccagtaggtgaggcatctatactagctaccttctctgtaacagaagggaagaaaaaagttcctgtggctggctgcagagtccaaaagggacagttagaaaaacaaaaaaaatttaaactaacccgtaatggacatgtaatttggaagggctcattaacctcattgaaacaccataaagatgacatttcaattgtcaaaacgggaatggattgtggtctcagtttagatgaagacaatatggaatttcaagtgggagacagaattgtttgttatgaagaaaagcaaattcaagccaagacttcttgggatccaggattttaaaattacattaaaaatgtaaataactcaacgtgttgtttgtttgaaggtagaaa

SEQ ID NO: 18450 - DNA, 437 bp, Homo sapiens
  source 1..437: mol_type = unassigned DNA
atcctcaaagcttataagcgagtatcaagacatgtgatatggttttaaaatagctgatgataaagtatatacatcatctcattttctcctcttagtcttgtaataggaaggacagatattcaaacacttatttatttatttatttttaacagagatccggaaaatgaggcccataggaaacaagtgacttgctgagtccagataacactgactgtcagagagaaacatgaaccagaagctactgaagttggagaacttgctacgatttcacactatttataggcaactgcacagtctgtgtcaaagaagagcattaagacagtggaggcatgggttttcatctgcttaccctgtgtggacagctcaactgtgtgcctggccctggccaacagatgtgctcactggggctgctttatctcagtataggcttctagtaa

SEQ ID NO: 18451 - DNA, 580 bp, Homo sapiens
  source 1..580: mol_type = unassigned DNA
cagggttgtccggtgcaggtggtgtgtgttgtttcgcctaacgtgtcagtggcacaaatcacgcgaacttcataaacattgtgcgttcggaagcctttccaagatgcatttaatccctgcgtgagcccacgttaggcattcacgaaggcatgtgcactgttctctcggaagcggctggccggcttcccctcctcgcgcgcggctgtgggtgcaggtcctcacttcccagcctcccatgggcccaaggccttctgggctccaatttgaggcgagccaccccagatccgtaatttttctgcagtgatttatttttacctttctgattccttgacaaggatatcctagcggcgaaacaacaccgtactgggagtcagaacgtctgggttctagtcttgactgccattaactagcggtatgacattggagaagcttttttgacccttctggatttccgtttccttttctgtaaaatgaggagcttggaagatccggaaaatgaggcccataggaaacaagtgacttgctgagtccagataacactgactgtcagagagaaacatgaaccagaagctactgaagt

SEQ ID NO: 18452 - DNA, 566 bp, Homo sapiens
  source 1..566: mol_type = unassigned DNA
aagatgcatttaatccctgcgtgagcccacgttaggcattcacgaaggcatgtgcactgttctctcggaagcggctggccggcttcccctcctcgcgcgcggctgtgggtgcaggtcctcacttcccagcctcccatgggcccaaggccttctgggctccaatttgaggcgagccaccccagatccgtaatttttctgcagtgatttatttttacctttctggtaagttccaaagcttccagctcacattcagacgttttccctaacgcaactacgtatttgcaacatacttttttcagattccttgacaaggatatcctagcggcgaaacaacaccgtactgggagtcagaacgtctgggttctagtcttgactgccattaactagcggtatgacattggagaagcttttttgacccttctggatttccgtttccttttctgtaaaatgaggagcttggaagatccggaaaatgaggcccataggaaacaagtgacttgctgagtccagataacactgactgtcagagagaaacatgaaccagaagctactgaagttggagaact

SEQ ID NO: 18453 - DNA, 517 bp, Homo sapiens
  source 1..517: mol_type = unassigned DNA
agaatccaggggcccggggctgtaggtaggagttaagtgggtaggatcccttaaccagggttgtccggtgcaggtggtgtgtgttgtttcgcctaacgtgtcagtggcacaaatcacgcgaacttcataaacattgtgcgttcggaagcctttccaagatgcatttaatccctgcgtgagcccacgttaggcattcacgaagattccttgacaaggatatcctagcggcgaaacaacaccgtactgggagtcagaacgtctgggttctagtcttgactgccattaactagcggtatgacattggagaagcttttttgacccttctggatttccgtttccttttctgtaaaatgaggagcttggaagatccggaaaatgaggcccataggaaacaagtgacttgctgagtccagataacactgactgtcagagagaaacatgaaccagaagctactgaagttggagaacttgctacgatttcacactatttataggcaactgcacagtctgtgtcaaa

SEQ ID NO: 18454 - DNA, 583 bp, Homo sapiens
  source 1..583: mol_type = unassigned DNA
gcagacagtcccacccccagcggcgacagcaactctctgaattccggaaagaaccttttccagcgggaccggaagcccggcggggaccgtagcggggacggactgacctaccgaccattcttccgggtccagaagattccttgacaaggatatcctagcggcgaaacaacaccgtactgggagtcagaacgtctgggttctagtcttgactgccattaactagcggtatgacattggagaagcttttttgacccttctggatttccgtttccttttctgtaaaatgaggagcttggaagatccggaaaatgaggcccataggaaacaagtgacttgctgagtccagataacactgactgtcagagagaaacatgaaccagaagctactgaagttggagaacttgctacgatttcacactatttataggcaactgcacagtctgtgtcaaagaagagcattaagacagtggaggcatgggttttcatctgcttaccctgtgtggacagctcaactgtgtgcctggccctggccaacagatgtgctcactggggctgctttatctcagtataggcttctagtaac

SEQ ID NO: 18455 - DNA, 1675 bp, Homo sapiens
  source 1..1675: mol_type = unassigned DNA
gtgatctccgcccgtgctcagaatccaggggcccggggctgtagattccttgacaaggatatcctagcggcgaaacaacaccgtactgggagtcagaacgtctgggttctagtcttgactgccattaactagcggtatgacattggagaagcttttttgacccttctggatttccgtttccttttctgtaaaatgaggagcttggaagatccggaaaatgaggcccataggaaacaagtgacttgctgagtccagataacactgactgtcagagagaaacatgaaccagaagctactgaagttggagaacttgctacgatttcacactatttataggcaactgcacagtctgtgtcaaagaagagcattaagacagtggaggcatgggttttcatctgcttaccctgtgtggacagctcaactgtgtgcctggccctggccaacagatgtgctcactggggctgctttatctcagtataggcttctagtaacaaaaaaggaagaaggaccatggaaatctcagttatcttcaacaaaatctaaaaaggtggtagaagtatggattggaatgactattgaggaactggccagggcaatggaaaaaaacacagattatgtatatgaagctttattgaacactgatattgacatagattcactggaagcagactcacatttagatgaagtctggatcaaagaagtgataacgaaggcagggatgaagttaaagtggagtaaattaaaacaggacaaagtcagaaaaaataaagatgctgtaagaaggccccaggcagatccagctttattaaccccaaggtccccagttgttactataatgggccatgttgatcacgggaaaacgacattacttgacaaatttcgaaaaactcaagtggcagcagtggaaactggaggcatcactcagcacattggtgcctttcttgtctctctgccttctggggaaaagataacttttcttgatactccaggacatgctgctttctcagcaatgagagccagaggtgctcaggtcactgacattgtcgtattggttgtagctgcagatgatggagtgatgaaacaaactgtagaatctattcagcatgccaaagatgcacaggttcctattatccttgccgtaaataaatgtgacaaagctgaggctgatcctgagaaagtgaaaaaagagctgctggcttacgatgtggtatgtgaagattatggaggtgatgttcaagcagtgcctgtctccgcacttacgggcgataatctgatggctttggcagaagcaacagttgctcttgcagaaatgttagaattgaaagcagatcccaatggtccagtggaaggaacagtaatagagtctttcacagacaaaggaagaggtcttgttactacagctataattcaaagaggaactttaagaaaaggctctgttctggttgctggaaaatgttgggcaaaagtacgcttaatgtttgatgaaaatggaaaaacaattgatgaggcctatcccagcatgccagtgggaattacaggctggagagaccttccttctgcaggagaagaaattcttgaagtagaatctgagccaagggcacgtgaagttgttgactggaggaaatatgaacaagaacaggagaaaggtcaggaggatctgaaaaaagaaaagaac

SEQ ID NO: 18456 - DNA, 1558 bp, Homo sapiens
  source 1..1558: mol_type = unassigned DNA
cgggtttgtcgggctgaaatgtggcgggtctcggaaggttccgacctcagtaaagagagctaacgtgtattcttctttttcttagcgtgttgctttgtcgcccacgctggttgcagtggtgcgatctcagttcactgcaaccttcgcctcccaggttcaagcgattatcctgcctcagcttcccgagcagctaggactacaggtgtgtgccatcacgctcagctaatttttttggtatttttagtagagatggggttttcccatgttggccaggctggtctcgaactcctgacctcagatgatctgcccgcctcggcctcccaaagtggtaggattacaggcgtgagccactgtgctcggcacattttgatgctgagatgaatcgtcacctgtgtgtttggctttttagacatccatctcttaatggttacctccagtgtcacatccagctccattctcatcaatttagacagatacatcttgatacaaggctgcaagtttttagacaaaacaggaattgcattcttcatctgttaagtaagaattggtccaggagatattgccatcaagacaccaagatgctctggaagcataaagcactacagaaatatatggagaacctgagtaaggagtaccaaacacttgagcaatgtctgcagcatatccctgtgaatgaggaaaaccgaaggtccttgaacagaaggcatgctgagttggcacctcttgcagccatttaccaagaaattcaggagactgaacaagcaattgaagaattagaatcaatgtgtaaaaagacagagtcttgctctgtggcccaggctggaatgcagtagtgtaatcatagctcactttaaccttgaactcctggactcaagcaatcctccaacctcagcctcccaagtagctgggactacaggcctaaataaacaagatgaaaagcagttacaagaacttgcactggaagaaaggcaaaccattgatcaaaaaatcaacatgttgtacaatgagcttttccagagccttgtgccaaaggagaaatatgacaaaaatgatgttattttagaggtgacagctggaaggactactggaggtgacatctgccaacaatttacccgagaaatatttgacatgtaccagaattattcgtgctataaacactggcaatttgaacttctgaattatacaccagcagattatggtaggcatattgaggaatttgcctgtaggagatactgaaaattattttacctctgatcttgattagaaccatattgtcccatttttttttgaaacttttggtgtatatctactaaacactgtggcataggctcatcaatcacagtggcttactattatagcagagttgttagctaggagaagacagtagaaaggagggaagcatttgcttagggagaaatatgtgaattagagaaaattcccctgaggaacttagatacgtatcttgcctcaaaatcatttttctctattattgaaagcaaaggtatattaaggtttttactttaaataactttataaaataatataagtattactaatt

SEQ ID NO: 18457 - DNA, 1948 bp, Homo sapiens
  source 1..1948: mol_type = unassigned DNA
gtactcacagttctttcctgatcttccccgccgcctcctgtattgcctctttatggaatcactccatatactgagttacacagcatggtttgcccgtgctgctgccccgcgggctgtcgcttctgacctgcctacactcagaactttccccaaagcatcagagtaatactgttactgtgatgggtaatggagaagtcgtgctgttctcagcgtgttgctttgtcgcccacgctggttgcagtggtgcgatctcagttcactgcaaccttcgcctcccaggttcaagcgattatcctgcctcagcttcccgagcagctaggactacaggatctcagctaaacgggaagcatttttgaaaagtgattgcacaattgagagtgaaaattactgagtcctgaacaggcaacttacattctaataccagctctgtctccatccagccgactgaatagtcgtgattaaatgctgagatgaatcgtcacctgtgtgtttggctttttagacatccatctcttaatggttacctccagtgtcacatccagctccattctcatcaatttagacagatacatcttgatacaaggctgcaagtttttagacaaaacaggaattgcattcttcatctgttaagtaagaattggtccaggagatattgccatcaagacaccaagatgctctggaagcataaagcactacagaaatatatggagaacctgagtaaggagtaccaaacacttgagcaatgtctgcagcatatccctgtgaatgaggaaaaccgaaggtccttgaacagaaggcatgctgagttggcacctcttgcagccatttaccaagaaattcaggagactgaacaagcaattgaagaattagaatcaatgtgtaaaagcctaaataaacaagatgaaaagcagttacaagaacttgcactggaagaaaggcaaaccattgatcaaaaaatcaacatgttgtacaatgagcttttccagagccttgtgccaaaggagaaatatgacaaaaatgatgttattttagaggtgacagctggaaggactactggaggtgacatctgccaacaatttacccgagaaatatttgacatgtaccagaattattcgtgctataaacactggcaatttgaacttctgaattatacaccagcagattatggtggactacatcatgcagccgcccgaatttccggtgacggtgtctataagcatttgaagtatgagggtgggattcaccgagttcagcgcatccccgaggtgggcctgtcctcaaggatgcagcgcattcacacaggaacgatgtcggttattgtccttcctcagccagatgaggtggatgtgaaattggaccccaaggatttgcgaatagatacatttcgagccaaaggagcaggagggcagcatgttaataaaactgatagtgccgtcagacttgtccacatccccacagggctagtagtagaatgccaacaagaaagatcacagataaaaaataaagaaatagcctttcgtgtgttgagagctagactctaccagcagattattgagaaagacaagcgtcagcaacaaagtgctagaaaactgcaggtgggaacaagagcccagtcagagcgaattcggacatataatttcacccaggatagagtcagtgaccacaggatagcatatgaagttcgtgatattaaggaatttttatgtggtgggaagggcctggatcagctaattcagagactgcttcaatcagcagatgaagaagccattgctgaacttttggatgaacaccttaaatcagcaaaataaatactaacttattattatttatgattatataaatgaaatggacctatatcaagaggcagactgaagcttggaaatcattatgaatatttgtaaattacagctttaagaacacattacacataaatatatgttttgtaatt

SEQ ID NO: 18458 - DNA, 1865 bp, Homo sapiens
  source 1..1865: mol_type = unassigned DNA
cgtgatctcgggtttgtcgggctgaaatgtggcgggtctcggaaggttccgacctcagtaaagagagctaacgtgtattcttctttttcttagatgctgagatgaatcgtcacctgtgtgtttggctttttagacatccatctcttaatggttacctccagtgtcacatccagctccattctcatcaatttagacagatacatcttgatacaaggctgcaagtttttagacaaaacaggaattgcattcttcatctgttaagtaagaattggtccaggagatattgccatcaagacaccaagatgctctggaagcataaagcactacagaaatatatggagaacctgagtaaggagtaccaaacacttgagcaatgtctgcagcatatccctgtgaatgaggaaaaccgaaggtccttgaacagaaggcatgctgagttggcacctcttgcagccatttaccaagaaattcaggagactgaacaagcaattgaagaattagaatcaatgtgtaaaagcctaaataaacaagatgaaaagcagttacaagaacttgcactggaagaaaggcaaaccattgatcaaaaaatcaacatgttgtacaatgagcttttccagagccttgtgccaaaggagaaatatgacaaaaatgatgttattttagaggtgacagctggaaggactactggaggtgacatctgccaacaatttacccgagaaatatttgacatgtaccagaattattcgtgctataaacactggcaatttgaacttctgaattatacaccagcagattatggtggactacatcatgcagccgcccgaatttccggtgacggtgtctataagcatttgaagtatgagggtgggattcaccgagttcagcgcatccccgaggtgggcctgtcctcaaggatgcagcgcattcacacaggaacgatgtcggttattgtccttcctcagccagatgaggtggatgtgaaattggaccccaaggatttgcgaatagatacatttcgagccaaaggagcaggagggcagcatgttaataaaactgatagtgccgtcagacttgtccacatccccacagggctagtagtagaatgccaacaagaaagatcacagataaaaaataaagaaatagcctttcgtgtgttgagagctagactctaccagcagattattgagaaagacaagcgtcagcaacaaagtgctagaaaactgcaggtgggaacaagagcccagtcagagcgaattcggacatataatttcacccaggatagagtcagtgaccacaggatagcatatgaagttcgtgatattaaggaatttttatgtggtgggaagggcctggatcagctaattcagagactgcttcaatcagcagatgaagaagccattgctgaacttttggatgaacaccttaaatcagcaaaataaatactaacttattattatttatgattatataaatgaaatggacctatatcaagaggcagactgaagcttggaaatcattatgaatatttgtaaattacagctttaagaacacattacacataaatatatgttttgtaattaatcgaagtcacatttcctgacctaagaatttattttaggtttcctgtaaagtacaatccaactcatcaagtagaaaataagcatgcatcattgaaaagagaaagtattgagaattgattgtgtcatttaggacaagtcacttgttctctttatatgccttttttccccagccatctatgaattaatttaaatatatttttaatctactacttcaggaaaatatggtaaaatttagtaaaatatgaattttagacttccttataaaccttttatttaaatacaaag

SEQ ID NO: 18459 - DNA, 1740 bp, Homo sapiens
  source 1..1740: mol_type = unassigned DNA
aacccggaagaagtgaaccaggaagtgaacgtgatctcgggtactcacagttctttcctgatcttccccgccgcctcctgtattgcctctttatggaatcactccatatactgagttacacagcatggtttgcccgtgctgctgccccgcgggctgtcgcttctgacctgcctacactcagaactttccccaaagcatcagagtaatactgttactgtgatgggtaatggagaagtcgtgctgttctcagatgctgagatgaatcgtcacctgtgtgtttggctttttagacatccatctcttaatggttacctccagtgtcacatccagctccattctcatcaatttagacagatacatcttgatacaaggctgcaagtttttagacaaaacaggaattgcattcttcatctgttaagtaagaattggtccaggagatattgccatcaagacaccaagatgctctggaagcataaagcactacagaaatatatggagaacctgagtaaggagtaccaaacacttgagcaatgtctgcagcatatccctgtgaatgaggaaaaccgaaggtccttgaacagaaggcatgctgagttggcacctcttgcagccatttaccaagaaattcaggagactgaacaagcaattgaagaattagaatcaatgtgtaaaagcctaaataaacaagatgaaaagcagttacaagaacttgcactggaagaaaggcaaaccattgatcaaaaaatcaacatgttgtacaatgagcttttccagagccttgtgccaaaggagaaatatgacaaaaatgatgttattttagaggtgacagctggaaggactactggaggtgacatctgccaacaatttacccgagaaatatttgacatgtaccagaattattcgtgctataaacactggcaatttgaacttctgaattatacaccagcagattatggtggactacatcatgcagccgcccgaatttccggtgacggtgtctataagcatttgaagtatgagggtgggattcaccgagttcagcgcatccccgaggtgggcctgtcctcaaggatgcagcgcattcacacaggaacgatgtcggttattgtccttcctcagccagatgaggtggatgtgaaattggaccccaaggatttgcgaatagatacatttcgagccaaaggagcaggagggcagcatgttaataaaactgatagtgccgtcagacttgtccacatccccacagggctagtagtagaatgccaacaagaaagatcacagataaaaaataaagaaatagcctttcgtgtgttgagagctagactctaccagcagattattgagaaagacaagcgtcagcaacaaagtgctagaaaactgcaggtgggaacaagagcccagtcagagcgaattcggacatataatttcacccaggatagagtcagtgaccacaggatagcatatgaagttcgtgatattaaggctcagtctcattccacgggtggtagtcgtgaccctgcacattccacattcctatccttggattctgtgagatcacctggtattctcattatgacttcttctgttaggaatttttatgtggtgggaagggcctggatcagctaattcagagactgcttcaatcagcagatgaagaagccattgctgaacttttggatgaacaccttaaatcagcaaaataaatactaacttattattatttatgattatataaatgaa

SEQ ID NO: 18460 - DNA, 4539 bp, Homo sapiens
  source 1..4539: mol_type = unassigned DNA
gtaggcggggcgagccggctgggctcagggtccaccagctcacccgggtcgaggggcaatctgaggcgactggtgacgcgcttatccacttccctcctcccgcctccccctggggtggcgctcgctggtgacgtagtgagtgtgatggccgccgcgaggccgggaaggtgaagtcaggactggtggagtcaacacagtcaatcaatagccaacctcaacctgagacaggacagaagagaactcagaatctttttgtcttttggacttcagccatgtccatgatgcctaccctgtgaagatctctcaccatccaaaaaacgcaatgtccctgctcttctctcgatgcaactctatcgtcacagtcaagaaaaataagagacacatggctgaggtgaatgcatccccacttaagcactttgtcactgccaagaagaagatcaatggcatttttgagcagctgggggcctacatccaggagagcgccaccttccttgaagacacgtacaggaatgcagaactggaccccgttaccacagaagaacaggttctggacgtcaaaggttacctatccaaagtgagaggcatcagtgaggtgctggctcggaggcacatgaaagtggctttttttggccggacgagcaatgggaagagcaccgtgatcaatgccatgctctgggacaaagttctgccctctgggattggccacaccaccaattgcttcctgcgggtagagggcacagatggccatgaggcctttctccttaccgagggctcagaggaaaagaggagtgccaagactgtgaaccagctggcccatgccctccaccaggacaagcagctccatgccggcagcctagtgagtgtgatgtggcccaactctaagtgcccacttctgaaggatgacctcgttttgatggacagccctggtattgatgtcaccacagagctggacagctggattgacaagttttgtctggatgctgatgtgtttgtgctggtggccaactcagagtccaccctgatgcagacggaaaagcacttcttccacaaggtgagtgagcgtctctcccggccaaacatcttcatcctgaacaaccgctgggatgcatctgcctcagagcccgagtacatggaggaggtgcggcggcagcacatggagcgttgtaccagcttcctggtggatgagctgggcgtggtggatcgatcccaggccggggaccgcatcttctttgtgtctgctaaggaggtgctcaacgccaggattcagaaagcccagggcatgcctgaaggagggggcgctctcgcagaaggctttcaagtgaggatgtttgagtttcagaattttgagaggagatttgaggagtgcatctcccagtctgcagtgaagaccaagtttgagcagcacacggtccgggccaagcagattgcagaggcggttcgactcatcatggactccctgcacatggcggctcgggagcagcaggtttactgcgaggaaatgcgtgaagagcggcaagaccgactgaaatttattgacaaacagctggagctcttggctcaagactataagctgcgaattaagcagattacggaggaagtggagaggcaggtgtcgactgcaatggccgaggagatcaggcgcctctctgtactggtggacgattaccagatggacttccacccttctccagtagtcctcaaggtttataagaatgagctgcaccgccacatagaggaaggactgggtcgaaacatgtctgaccgctgctccacggccatcaccaactccctgcagaccatgcagcaggacatgatagatggcttgaaacccctccttcctgtgtctgtgcggagtcagatagacatgctggtcccacgccagtgcttctccctcaactatgacctaaactgtgacaagctgtgtgctgacttccaggaagacattgagttccatttctctctcggatggaccatgctggtgaataggttcctgggccccaagaacagccgtcgggccttgatgggctacaatgaccaggtccagcgtcccatccctctgacgccagccaaccccagcatgcccccactgccacagggctcgctcacccaggaggagttcatggtttccatggttaccggcctggcctccttgacatccaggacctccatgggcattcttgttgttggaggagtggtgtggaaggcagtgggctggcggctcattgccctctcctttgggctctatggcctcctctacgtctatgagcgtctgacctggaccaccaaggccaaggagagggccttcaagcgccagtttgtggagcatgccagcgagaagctgcagcttgtcatcagctacactggctccaactgcagccaccaagtccagcaggaactgtctgggacctttgctcatctgtgtcagcaagttgacgtcacccgggagaacctggagcaggaaattgccgccatgaacaagaaaattgaggttcttgactcacttcagagcaaagcaaagctgctcaggaataaagccggttggttggacagtgagctcaacatgttcacacaccagtacctgcagcccagcagatagtgggcacctgaggcggagtctgcgtggagaggggcggtgctgccagccctaagtgccatgtgggctcccccaggggcacgtgtggctcctgccccctggccactgccaagagaatgaagcacccagtctcgtaccattttgagccctccagcactacttattttcccccacctttgcctgctgttgctggaagagctggctcatacccccaaaggacactttcagcgacagctatggacagcatggtaccaaggagttaagttgaggctttttccagctttctctggttcatttgattgcttgataaggcctcaggatctcagcattgcacaatgcctcatggaagcctttgagggtatcacacagacacccccaccttcctccagcctgtgcgcacctgccctccttgcagcccagcacacctgcaggtgtaagggacgattggagtttcttcccagagagtctgtcccagaaggactgtggcttgtgtgtgtccatctcgcctgttggctcagtgcttcatcccatttgcagagcctcagacacgtcttggtggtgaggctcagttacccctgggcttaggctgaggcgggccctgtgctgggggtggtagaaaggatgctgctgaggcagctggaggagtgggagtagctcagaggggagggctgttggatgtatggggagctggcagagcaggtggcagtcactgggacaaggagggacttgcctctcttctcattattgtgtcctttgctttagtgtcagtcctggacttgtgcaggcctgttttgtgtagatctgttttggaagatggcatggtctaggtggttgaaggatgtagtagaaggatggatggtggaaggtggggacgttggtggctggctgaggtgcatgggccccacacaggacagctggagaatgggccgtccacttggcctcgttctgcgaggggctcatgggtctgagagcccccacccactaggcttgattgcatccctgttgtgccctttaagagacatgtttccaccccacccccaaccttgtcccaagtgccctggactaaatttcctgtgccagtgactgcagttggccaagggacaatgtggaaaacccagtgtccatctttccaccctccctgatctccagaaccttcgactgacccccttgtctttatgctgatgttgagttttgggattgttactggttgaagtgggggcagatgcctgtcaccaaggtgttgactgtgtgagaaaagcagtttgggtgacaaatcctgtgtggcacaagttggatcgcttcctagaaataagcaacacctctcccaaaaagcagcccacaaggcaggggcccagcagcccagccatcactcatctttgaggaaatgagttggtagcctctgtgcactgtttggtggccacatcacaggtgatgtcctgttcacatacctgcttgtatttaaagccctcagtctgtcctgttgtgtggggcgaagtgatggactctgccaggtggacatgctgtgggtggatgttcccggcgtgtgccgggcctgaatggacaggggccacttcacagcatgtcagggaaaatcactgtcacacaattccaatggattttgtgctctttttgaaaaaaaaaaattctttagcgtaaacatgaattttttttcaatgtagcccctggggaatgaatgaaattttgagcttcttcaatacgtaaaattaaatttataccactgagggagagaccctttctgaaagaagtatggccaaaagcactttaatgctgctgacattgttgtttttatgttcatttgctggagcgcaagacgtgctgacacagtgagttttctctgatgtatttaaggtgatgtatttgcttgagttactcctgtatcattgctcataatattggaaactaaaataaaacctagttggaaatcc

SEQ ID NO: 18461 - DNA, 1806 bp, Homo sapiens
  source 1..1806: mol_type = unassigned DNA
gtaggcggggcgagccggctgggctcagggtccaccagctcacccgggtcgaggggcaatctgaggcgactggtgacgcgcttatccacttccctcctcccgcctccccctggggtggcgctcgctggtgacgtagtgagtgtgatggccgccgcgaggccgggaaggtgaagtcaggactggtggagtcaacacagtcaatcaatagccaacctcaacctgagacaggacagaagagaactcagaatctttttgtcttttggacttcagccatgtccatgatgcctaccctgtgaagatctctcaccatccaaaaaacgcaatgtccctgctcttctctcgatgcaactctatcgtcacagtcaagaaaaataagagacacatggctgaggtgaatgcatccccacttaagcactttgtcactgccaagaagaagatcaatggcatttttgagcagctggggcgctctcgcagaaggctttcaagtgaggatgtttgagtttcagaattttgagaggagatttgaggagtgcatctcccagtctgcagtgaagaccaagtttgagcagcacacggtccgggccaagcagattgcagaggcggttcgactcatcatggactccctgcacatggcggctcgggagcagcaggtttactgcgaggaaatgcgtgaagagcggcaagaccgactgaaatttattgacaaacagctggagctcttggctcaagactataagctgcgaattaagcagattacggaggaagtggagaggcaggtgtcgactgcaatggccgaggagatcaggcgcctctctgtactggtggacgattaccagatggacttccacccttctccagtagtcctcaaggtttataagaatgagctgcaccgccacatagaggaaggactgggtcgaaacatgtctgaccgctgctccacggccatcaccaactccctgcagaccatgcagcaggacatgatagatggcttgaaacccctccttcctgtgtctgtgcggagtcagatagacatgctggtcccacgccagtgcttctccctcaactatgacctaaactgtgacaagctgtgtgctgacttccaggaagacattgagttccatttctctctcggatggaccatgctggtgaataggttcctgggccccaagaacagccgtcgggccttgatgggctacaatgaccaggtccagcgtcccatccctctgacgccagccaaccccagcatgcccccactgccacagggctcgctcacccaggaggagttcatggtttccatggttaccggcctggcctccttgacatccaggacctccatgggcattcttgttgttggaggagtggtgtggaaggcagtgggctggcggctcattgccctctcctttgggctctatggcctcctctacgtctatgagcgtctgacctggaccaccaaggccaaggagagggccttcaagcgccagtttgtggagcatgccagcgagaagctgcagcttgtcatcagctacactggctccaactgcagccaccaagtccagcaggaactgtctgggacctttgctcatctgtgtcagcaagttgacggagagaccctttctgaaagaagtatggccaaaagcactttaatgctgctgacattgttgtttttatgttcatttgctggagcgcaagacgtgctgacacagtgagttttctctgatgtatttaaggtgatgtatttgcttgagttactcctgtatcattgctcataatattggaaactaaaataaaacctagttggaaatcctt

SEQ ID NO: 18462 - DNA, 489 bp, Homo sapiens
  source 1..489: mol_type = unassigned DNA
agtcaatcaatagccaacctcaacctgagacaggacagaagagaactcagaatctttttgtcttttggacttcagccatgtccatgatgcctaccctgtgaagatctctcaccatccaaaaaattgtgccagcagacgatccgtggatccattttattttccctgctaggagttgctgtacataacactggcgcaatgtccctgctcttctctcgatgcaactctatcgtcacagtcaagaaaaataagagacacatggctgaggtgaatgcatccccacttaagcactttgtcactgccaagaagaagatcaatggcatttttgagcagctgggggcctacatccaggagagcgccaccttccttgaagacacgtacaggaatgcagaactggaccccgttaccacagaagaacaggttctggacgtcaaaggttacctatccaaagtgagaggcatcagtgaggtgctggctcggaggcacatgaaa

SEQ ID NO: 18463 - DNA, 4531 bp, Homo sapiens
  source 1..4531: mol_type = unassigned DNA
atgatgcagtgggagtccgagcctctgcgtcgtccgcttgggacgcgccggcggaggagtggcgcgcggaggagtggcgcgctgagacgccgctcgaagcgccgagtcgcggggcagcagaggcgtaaggagtaggcggggcgagccggctgggctcagggtccaccagctcacccgggtcgaggggcaatctgaggcgactggtgacgcgcttatccacttccctcctcccgcctccccctggggtggcgctcgctggtgacgtagtgagtgtgatggccgccgcgaggccgggaaggtgaagcgcaatgtccctgctcttctctcgatgcaactctatcgtcacagtcaagaaaaataagagacacatggctgaggtgaatgcatccccacttaagcactttgtcactgccaagaagaagatcaatggcatttttgagcagctgggggcctacatccaggagagcgccaccttccttgaagacacgtacaggaatgcagaactggaccccgttaccacagaagaacaggttctggacgtcaaaggttacctatccaaagtgagaggcatcagtgaggtgctggctcggaggcacatgaaagtggctttttttggccggacgagcaatgggaagagcaccgtgatcaatgccatgctctgggacaaagttctgccctctgggattggccacaccaccaattgcttcctgcgggtagagggcacagatggccatgaggcctttctccttaccgagggctcagaggaaaagaggagtgccaagactgtgaaccagctggcccatgccctccaccaggacaagcagctccatgccggcagcctagtgagtgtgatgtggcccaactctaagtgcccacttctgaaggatgacctcgttttgatggacagccctggtattgatgtcaccacagagctggacagctggattgacaagttttgtctggatgctgatgtgtttgtgctggtggccaactcagagtccaccctgatgcagacggaaaagcacttcttccacaaggtgagtgagcgtctctcccggccaaacatcttcatcctgaacaaccgctgggatgcatctgcctcagagcccgagtacatggaggaggtgcggcggcagcacatggagcgttgtaccagcttcctggtggatgagctgggcgtggtggatcgatcccaggccggggaccgcatcttctttgtgtctgctaaggaggtgctcaacgccaggattcagaaagcccagggcatgcctgaaggagggggcgctctcgcagaaggctttcaagtgaggatgtttgagtttcagaattttgagaggagatttgaggagtgcatctcccagtctgcagtgaagaccaagtttgagcagcacacggtccgggccaagcagattgcagaggcggttcgactcatcatggactccctgcacatggcggctcgggagcagcaggtttactgcgaggaaatgcgtgaagagcggcaagaccgactgaaatttattgacaaacagctggagctcttggctcaagactataagctgcgaattaagcagattacggaggaagtggagaggcaggtgtcgactgcaatggccgaggagatcaggcgcctctctgtactggtggacgattaccagatggacttccacccttctccagtagtcctcaaggtttataagaatgagctgcaccgccacatagaggaaggactgggtcgaaacatgtctgaccgctgctccacggccatcaccaactccctgcagaccatgcagcaggacatgatagatggcttgaaacccctccttcctgtgtctgtgcggagtcagatagacatgctggtcccacgccagtgcttctccctcaactatgacctaaactgtgacaagctgtgtgctgacttccaggaagacattgagttccatttctctctcggatggaccatgctggtgaataggttcctgggccccaagaacagccgtcgggccttgatgggctacaatgaccaggtccagcgtcccatccctctgacgccagccaaccccagcatgcccccactgccacagggctcgctcacccaggaggagttcatggtttccatggttaccggcctggcctccttgacatccaggacctccatgggcattcttgttgttggaggagtggtgtggaaggcagtgggctggcggctcattgccctctcctttgggctctatggcctcctctacgtctatgagcgtctgacctggaccaccaaggccaaggagagggccttcaagcgccagtttgtggagcatgccagcgagaagctgcagcttgtcatcagctacactggctccaactgcagccaccaagtccagcaggaactgtctgggacctttgctcatctgtgtcagcaagttgacgtcacccgggagaacctggagcaggaaattgccgccatgaacaagaaaattgaggttcttgactcacttcagagcaaagcaaagctgctcaggaataaagccggttggttggacagtgagctcaacatgttcacacaccagtacctgcagcccagcagatagtgggcacctgaggcggagtctgcgtggagaggggcggtgctgccagccctaagtgccatgtgggctcccccaggggcacgtgtggctcctgccccctggccactgccaagagaatgaagcacccagtctcgtaccattttgagccctccagcactacttattttcccccacctttgcctgctgttgctggaagagctggctcatacccccaaaggacactttcagcgacagctatggacagcatggtaccaaggagttaagttgaggctttttccagctttctctggttcatttgattgcttgataaggcctcaggatctcagcattgcacaatgcctcatggaagcctttgagggtatcacacagacacccccaccttcctccagcctgtgcgcacctgccctccttgcagcccagcacacctgcaggtgtaagggacgattggagtttcttcccagagagtctgtcccagaaggactgtggcttgtgtgtgtccatctcgcctgttggctcagtgcttcatcccatttgcagagcctcagacacgtcttggtggtgaggctcagttacccctgggcttaggctgaggcgggccctgtgctgggggtggtagaaaggatgctgctgaggcagctggaggagtgggagtagctcagaggggagggctgttggatgtatggggagctggcagagcaggtggcagtcactgggacaaggagggacttgcctctcttctcattattgtgtcctttgctttagtgtcagtcctggacttgtgcaggcctgttttgtgtagatctgttttggaagatggcatggtctaggtggttgaaggatgtagtagaaggatggatggtggaaggtggggacgttggtggctggctgaggtgcatgggccccacacaggacagctggagaatgggccgtccacttggcctcgttctgcgaggggctcatgggtctgagagcccccacccactaggcttgattgcatccctgttgtgccctttaagagacatgtttccaccccacccccaaccttgtcccaagtgccctggactaaatttcctgtgccagtgactgcagttggccaagggacaatgtggaaaacccagtgtccatctttccaccctccctgatctccagaaccttcgactgacccccttgtctttatgctgatgttgagttttgggattgttactggttgaagtgggggcagatgcctgtcaccaaggtgttgactgtgtgagaaaagcagtttgggtgacaaatcctgtgtggcacaagttggatcgcttcctagaaataagcaacacctctcccaaaaagcagcccacaaggcaggggcccagcagcccagccatcactcatctttgaggaaatgagttggtagcctctgtgcactgtttggtggccacatcacaggtgatgtcctgttcacatacctgcttgtatttaaagccctcagtctgtcctgttgtgtggggcgaagtgatggactctgccaggtggacatgctgtgggtggatgttcccggcgtgtgccgggcctgaatggacaggggccacttcacagcatgtcagggaaaatcactgtcacacaattccaatggattttgtgctctttttgaaaaaaaaaaattctttagcgtaaacatgaattttttttcaatgtagcccctggggaatgaatgaaattttgagcttcttcaatacgtaaaattaaatttataccactgagggagagaccctttctgaaagaagtatggccaaaagcactttaatgctgctgacattgttgtttttatgttcatttgctggagcgcaagacgtgctgacacagtgagttttctctgatgtatttaaggtgatgtatttgcttgagttactcctgtatcattgctcataatattggaaactaaaataaaacctagttggaaatcctttgtg

SEQ ID NO: 18464 - DNA, 2672 bp, Homo sapiens
  source 1..2672: mol_type = unassigned DNA
ggtaggttccacaatggtacaggcagcatcacgctgcacaatggtttccaggcagtgaaagagggtgattcagcaagccactcttcttctattttctttaacctccccttcactttttatttttatgggggtgggtggtgcttgctatatgcttacctttttcttttcttttttcatttttacaaatttccttttttgtcctcacccctcaattcctaggggcttgagtgagtttaagattgggttttcttggaaatcacctgtccatcgttaattttaaacaatctccatatctccaaagaatctcttccatgttagtctggaatgtggttaatgaaaaacaagtagggaggatttctggggcaaacactgccggatcaggatcgtagttctcaggcacggaatggctagtgtgagaaacaccaacagcaggcccatctcagatcttcactatggcaacttatgcaagaaactgttgaattagacccgtttcctatagatgagaaaccatacaagctgtggtatttatgagcctccatttcttatactactgcagtgaaccaacattggatgtgaaaattgccttttgtcagggattcgataaacaagtggatgtgtcatatattgccaaacattacaacatgagcaaaagcaaagttgacaaccagttctacagtgtggaagtgggagactcaaccttcacagttctcaagcgctaccagaatctaaagcctattggctctggggctcagggcatagtttgtgccgcgtatgatgctgtccttgacagaaatgtggccattaagaagctcagcagaccctttcagaaccaaacacatgccaagagagcgtaccgggagctggtcctcatgaagtgtgtgaaccataaaaacattattagtttattaaatgtcttcacaccccagaaaacgctggaggagttccaagatgtttacttagtaatggaactgatggatgccaacttatgtcaagtgattcagatggaattagaccatgagcgaatgtcttacctgctgtaccaaatgttgtgtggcattaagcacctccattctgctggaattattcacagggatttaaaaccaagtaacattgtagtcaagtctgattgcacattgaaaatcctggactttggactggccaggacagcaggcacaagcttcatgatgactccatatgtggtgacacgttattacagagcccctgaggtcatcctggggatgggctacaaggagaacgtggatatatggtctgtgggatgcattatgggagaaatggttcgccacaaaatcctctttccaggaagggactatattgaccagtggaataaggtaattgaacaactaggaacaccatgtccagaattcatgaagaaattgcaacccacagtaagaaactatgtggagaatcggcccaagtatgcgggactcaccttccccaaactcttcccagattccctcttcccagcggactccgagcacaataaactcaaagccagccaagccagggacttgttgtcaaagatgctagtgattgacccagcaaaaagaatatcagtggacgacgccttacagcatccctacatcaacgtctggtatgacccagccgaagtggaggcgcctccacctcagatatatgacaagcagttggatgaaagagaacacacaattgaagaatggaaagaacttatctacaaggaagtaatgaattcagaagaaaagactaaaaatggtgtagtaaaaggacagccttctccttcaggtgcagcagtgaacagcagtgagagtctccctccatcctcgtctgtcaatgacatctcctccatgtccaccgaccagaccctggcatctgacactgacagcagcctggaagcctcggcaggacccctgggttgttgcaggtgactagccgcctgcctgcgaaacccagcgttcttcaggagatgatgtgatggaacacacacacacgcagacacacacacacacacaaatgcagacacacaacatcaagaaaacagcaagggagagaatccaagcctaaaattaaataaatctttcagcctgcttcttccccagggttctgtattgcagctaagctcaaatgtatatttaacttctagttgctcttgctttggtcttcttccaatgatgcttactacagaaagcaaatcagacacaattagagaagccttttccataaagtgtaattttaatggctgcaaaaccggcaacctgtaactgcccttttaaatggcatgacaaggtgtgcagtggccccatccagcatgtgtgtgtctctatcttgcatctacctgctccttggcctagtcagatggatgtagatacagatccgcatgtgtctgtattcatacagcactacttacttagagatgctactgtcagtgtcctcagggctctaccaagacataatgcactggggtaccacatggtccatttcatgtgatctattactctgacataaacccatctgtaatatattgccagtatataagctgtttagtttgttaattgattaaactgtatgtcttataagaaaacatgtaaagggggaatatatggggggagtgagctctctcagacccttgaagatgtagcttccaaatttgaatggattaaatggcacctgtataccaa

SEQ ID NO: 18465 - DNA, 2371 bp, Homo sapiens
  source 1..2371: mol_type = unassigned DNA
agaaatggcgtggcaggggacccagcgagcccagagggattttgccgctgcttcctctacccctgtatttcacgcagctctctaaattgactcagctccaggctagtgtgagaaacaccaacagcaggcccatctcagatcttcactatggcaacttatgcaagaaactgttgaattagacccgtttcctatagatgagaaaccatacaagctgtggtatttatgagcctccatttcttatactactgcagtgaaccaacattggatgtgaaaattgccttttgtcagggattcgataaacaagtggatgtgtcatatattgccaaacattacaacatgagcaaaagcaaagttgacaaccagttctacagtgtggaagtgggagactcaaccttcacagttctcaagcgctaccagaatctaaagcctattggctctggggctcagggcatagtttgtgccgcgtatgatgctgtccttgacagaaatgtggccattaagaagctcagcagaccctttcagaaccaaacacatgccaagagagcgtaccgggagctggtcctcatgaagtgtgtgaaccataaaaacattattagtttattaaatgtcttcacaccccagaaaacgctggaggagttccaagatgtttacttagtaatggaactgatggatgccaacttatgtcaagtgattcagatggaattagaccatgagcgaatgtcttacctgctgtaccaaatgttgtgtggcattaagcacctccattctgctggaattattcacagggatttaaaaccaagtaacattgtagtcaagtctgattgcacattgaaaatcctggactttggactggccaggacagcaggcacaagcttcatgatgactccatatgtggtgacacgttattacagagcccctgaggtcatcctggggatgggctacaaggagaacgtggatatatggtctgtgggatgcattatgggagaaatggttcgccacaaaatcctctttccaggaagggactatattgaccagtggaataaggtaattgaacaactaggaacaccatgtccagaattcatgaagaaattgcaacccacagtaagaaactatgtggagaatcggcccaagtatgcgggactcaccttccccaaactcttcccagattccctcttcccagcggactccgagcacaataaactcaaagccagccaagccagggacttgttgtcaaagatgctagtgattgacccagcaaaaagaatatcagtggacgacgccttacagcatccctacatcaacgtctggtatgacccagccgaagtggaggcgcctccacctcagatatatgacaagcagttggatgaaagagaacacacaattgaagaatggaaagaacttatctacaaggaagtaatgaattcagaagaaaagactaaaaatggtgtagtaaaaggacagccttctccttcagcacaggtgcagcagtgaacagcagtgagagtctccctccatcctcgtctgtcaatgacatctcctccatgtccaccgaccagaccctggcatctgacactgacagcagcctggaagcctcggcaggacccctgggttgttgcaggtgactagccgcctgcctgcgaaacccagcgttcttcaggagatgatgtgatggaacacacacacacgcagacacacacacacacacaaatgcagacacacaacatcaagaaaacagcaagggagagaatccaagcctaaaattaaataaatctttcagcctgcttcttccccagggttctgtattgcagctaagctcaaatgtatatttaacttctagttgctcttgctttggtcttcttccaatgatgcttactacagaaagcaaatcagacacaattagagaagccttttccataaagtgtaattttaatggctgcaaaaccggcaacctgtaactgcccttttaaatggcatgacaaggtgtgcagtggccccatccagcatgtgtgtgtctctatcttgcatctacctgctccttggcctagtcagatggatgtagatacagatccgcatgtgtctgtattcatacagcactacttacttagagatgctactgtcagtgtcctcagggctctaccaagacataatgcactggggtaccacatggtccatttcatgtgatctattactctgacataaacccatctgtaatatattgccagtatataagctgtttagtttgttaattgattaaactgtatgtcttataagaaaacatgtaaagggggaatatatggggggagtgagctctctcagacccttgaagatgtagcttccaaatttgaatggattaaatggcacctgtatacca

SEQ ID NO: 18466 - DNA, 1828 bp, Homo sapiens
  source 1..1828: mol_type = unassigned DNA
gacagaaatgtggccattaagaagctcagcagaccctttcagaaccaaacacatgccaagagagcgtaccgggagctggtcctcatgaagtgtgtgaaccataaaaacttacttagtaatggaactgatggatgccaacttatgtcaagtgattcagatggaattagaccatgagcgaatgtcttacctgctgtaccaaatgttgtgtggcattaagcacctccattctgctggaattattcacagggatttaaaaccaagtaacattgtagtcaagtctgattgcacattgaaaatcctggactttggactggccaggacagcaggcacaagcttcatgatgactccatatgtggtgacacgttattacagagcccctgaggtcatcctggggatgggctacaaggagaacgtggatatatggtctgtgggatgcattatgggagaaatggttcgccacaaaatcctctttccaggaagggactatattgaccagtggaataaggtaattgaacaactaggaacaccatgtccagaattcatgaagaaattgcaacccacagtaagaaactatgtggagaatcggcccaagtatgcgggactcaccttccccaaactcttcccagattccctcttcccagcggactccgagcacaataaactcaaagccagccaagccagggacttgttgtcaaagatgctagtgattgacccagcaaaaagaatatcagtggacgacgccttacagcatccctacatcaacgtctggtatgacccagccgaagtggaggcgcctccacctcagatatatgacaagcagttggatgaaagagaacacacaattgaagaatggaaagaacttatctacaaggaagtaatgaattcagaagaaaagactaaaaatggtgtagtaaaaggacagccttctccttcaggtgcagcagtgaacagcagtgagagtctccctccatcctcgtctgtcaatgacatctcctccatgtccaccgaccagaccctggcatctgacactgacagcagcctggaagcctcggcaggacccctgggttgttgcaggtgactagccgcctgcctgcgaaacccagcgttcttcaggagatgatgtgatggaacacacacacacgcagacacacacacacacacaaatgcagacacacaacatcaagaaaacagcaagggagagaatccaagcctaaaattaaataaatctttcagcctgcttcttccccagggttctgtattgcagctaagctcaaatgtatatttaacttctagttgctcttgctttggtcttcttccaatgatgcttactacagaaagcaaatcagacacaattagagaagccttttccataaagtgtaattttaatggctgcaaaaccggcaacctgtaactgcccttttaaatggcatgacaaggtgtgcagtggccccatccagcatgtgtgtgtctctatcttgcatctacctgctccttggcctagtcagatggatgtagatacagatccgcatgtgtctgtattcatacagcactacttacttagagatgctactgtcagtgtcctcagggctctaccaagacataatgcactggggtaccacatggtccatttcatgtgatctattactctgacataaacccatctgtaatatattgccagtatataagctgtttagtttgttaattgattaaactgtatgtcttataagaaaacatgtaaagggggaatatatggggggagtgagctctctcagacccttgaagatgtagcttccaaatttgaatggattaaatggcacctgtataccaa

SEQ ID NO: 18467 - DNA, 2154 bp, Homo sapiens
  source 1..2154: mol_type = unassigned DNA
aattatatgctatattcttggcaagatctttttcttctcctttgccctcttctactccttccccccttctcctgtttctccttcttcccttcctccaactcttcttcatcctcctagcatgtagaatattcttatgccagtcactcatatctttacttaaagcctgattggcatgtgaccagagtagacagtatctaagattccgaaatagcattttctttaccagtatccttaatcaagtaggcaagagttctaaggaatcttttgttcttaattctgagttgctcttggatctctacagtgccgcgtatgatgctgtccttgacagaaatgtggccattaagaagctcagcagaccctttcagaaccaaacacatgccaagagagcgtaccgggagctggtcctcatgaagtgtgtgaaccataaaaacttacttagtaatggaactgatggatgccaacttatgtcaagtgattcagatggaattagaccatgagcgaatgtcttacctgctgtaccaaatgttgtgtggcattaagcacctccattctgctggaattattcacagggatttaaaaccaagtaacattgtagtcaagtctgattgcacattgaaaatcctggactttggactggccaggacagcaggcacaagcttcatgatgactccatatgtggtgacacgttattacagagcccctgaggtcatcctggggatgggctacaaggagaacgtggatatatggtctgtgggatgcattatgggagaaatggttcgccacaaaatcctctttccaggaagggactatattgaccagtggaataaggtaattgaacaactaggaacaccatgtccagaattcatgaagaaattgcaacccacagtaagaaactatgtggagaatcggcccaagtatgcgggactcaccttccccaaactcttcccagattccctcttcccagcggactccgagcacaataaactcaaagccagccaagccagggacttgttgtcaaagatgctagtgattgacccagcaaaaagaatatcagtggacgacgccttacagcatccctacatcaacgtctggtatgacccagccgaagtggaggcgcctccacctcagatatatgacaagcagttggatgaaagagaacacacaattgaagaatggaaagaacttatctacaaggaagtaatgaattcagaagaaaagactaaaaatggtgtagtaaaaggacagccttctccttcagcacaggtgcagcagtgaacagcagtgagagtctccctccatcctcgtctgtcaatgacatctcctccatgtccaccgaccagaccctggcatctgacactgacagcagcctggaagcctcggcaggacccctgggttgttgcaggtgactagccgcctgcctgcgaaacccagcgttcttcaggagatgatgtgatggaacacacacacacgcagacacacacacacacacaaatgcagacacacaacatcaagaaaacagcaagggagagaatccaagcctaaaattaaataaatctttcagcctgcttcttccccagggttctgtattgcagctaagctcaaatgtatatttaacttctagttgctcttgctttggtcttcttccaatgatgcttactacagaaagcaaatcagacacaattagagaagccttttccataaagtgtaattttaatggctgcaaaaccggcaacctgtaactgcccttttaaatggcatgacaaggtgtgcagtggccccatccagcatgtgtgtgtctctatcttgcatctacctgctccttggcctagtcagatggatgtagatacagatccgcatgtgtctgtattcatacagcactacttacttagagatgctactgtcagtgtcctcagggctctaccaagacataatgcactggggtaccacatggtccatttcatgtgatctattactctgacataaacccatctgtaatatattgccagtatataagctgtttagtttgttaattgattaaactgtatgtcttataagaaaacatgtaaagggggaatatatggggggagtgagctctctcagacccttgaagatgtagcttccaaatttgaatggattaaatggcacctgtatacc

SEQ ID NO: 18468 - DNA, 1955 bp, Homo sapiens
  source 1..1955: mol_type = unassigned DNA
ttcaccggaaaacacagtagctgtagctgcacatagacgcttcctctttctgtttccccctcatccccctccctagacctctctgggctttgacgtcatgtgtgctcctttcggttgccatagcaaccccattccccaagccctctgtccgtctcctctggtaggttccacaatggtacaggcagcatcacgctgcacaatggtttccaggcagtgaaagagggtgattcagcaagccactcttcttctattttctttaacctccccttcactttttatttttatgggggtgggtggtgcttgctatatgcttacctttttcttttcttttttcatttttacaaatttccttttttgtcctcacccctcaattcctaggggcttgagtgagtttaagattgggttttcttggaaatcacctgtccatcgttaattttaaacaatctccatatctccaaagaatctcttccatgttagtctggaatgtggttaatgaaaaacaagtagggaggatttctggggcaaacactgccggatcaggatcgtagttctcaggcacggaatggctagtgtgagaaacaccaacagcaggcccatctcagatcttcactatggcaacttatgcaagaaactgttgaattagacccgtttcctatagatgagaaaccatacaagctgtggtatttatgagcctccatttcttatactactgcagtgaaccaacattggatgtgaaaattgccttttgtcagggattcgataaacaagtggatgtgtcatatattgccaaacattacaacatgagcaaaagcaaagttgacaaccagttctacagtgtggaagtgggagactcaaccttcacagttctcaagcgctaccagaatctaaagcctattggctctggggctcagggcatagtttgtgccgcgtatgatgctgtccttgacagaaatgtggccattaagaagctcagcagaccctttcagaaccaaacacatgccaagagagcgtaccgggagctggtcctcatgaagtgtgtgaaccataaaaacattattagtttattaaatgtcttcacaccccagaaaacgctggaggagttccaagatgtttacttagtaatggaactgatggatgccaacttatgtcaagtgattcagatggaattagaccatgagcgaatgtcttacctgctgtaccaaatgttgtgtggcattaagcacctccattctgctggaattattcacagggatttaaaaccaagtaacattgtagtcaagtctgattgcacattgaaaatcctggactttggactggccaggacagcaggcacaagcttcatgatgactccatatgtggtgacacgttattacagagcccctgaggtcatcctggggatgggctacaaggagaacgtggatatatggtctgtgggatgcattatgggagaaatggttcgccacaaaatcctctttccaggaagggactatattgaccagtggaataaggtaattgaacaactaggaacaccatgtccagaattcatgaagaaattgcaacccacagtaagaaactatgtggagaatcggcccaagtatgcgggactcaccttccccaaactcttcccagattccctcttcccagcggactccgagcacaataaactcaaagccagccaagccagggacttgttgtcaaagatgctagtgattgacccagcaaaaagaatatcagtggacgacgccttacagcatccctacatcaacgtctggtatgacccagccgaagtggaggcgcctccacctcagatatatgacaagcagttggatgaaagagaacacacaattgaagaatggaaagaacttatctacaaggaagtaatgaattcagaagaaaagactaaaaatggtgtagtaaaaggacagccttctccttcagcacaggtgcagcagtga

SEQ ID NO: 18469 - DNA, 3081 bp, Homo sapiens
  source 1..3081: mol_type = unassigned DNA
attctgtgctgggatactgtgtcccctgcaaatgtcagagctcttttgaaaaaaaaatcagaaataagtatggcagtatatttgttagaatctatgtatttgtgccttcaacaaaataaatgtaatttactggaaaatctgtaagtaaatcaggctatagatattacaagaaaactatctatccatatatttttctcaccctccccaaacatttaaatctagagacctagtctctgcttttacccccttaaacagataacttcccagggtactgcaatttagccacagaaaaagaatggcttatgccacagcagtaggctctgaagcaatcacaaggttgtttacatgggctgcctttggtgcagagcctgacagtgtctgtacagcagccctgcctgcttctggccatgttgatgataacttttatgaacaaactgcaaggaagcaggctaagtcatatgggatagactacagttcaggtggaaggaaaacgagtgtaagtgcaccaggcattgccagcacaacatccaatatctccttctatccctcatcggctagttgtcggaccctggaagataacacagaatgcttatcaacatatttaaaatagttgcagtaaggaccatttctctcagagaagcttctgtgaattttctactttaggtgagcatatatgttacaaatatataacaaataaatatataagtatatcacaagcttctgactccacttcagaaccattagattttaggggctggatgctttggatgtagcggtttggctgcctctggctagtgtgagaaacaccaacagcaggcccatctcagatcttcactatggcaacttatgcaagaaactgttgaattagacccgtttcctatagatgagaaaccatacaagctgtggtatttatgagcctccatttcttatactactgcagtgaaccaacattggatgtgaaaattgccttttgtcaggtgtgtgttccttacaggtaaaacaagggattcgataaacaagtggatgtgtcatatattgccaaacattacaacatgagcaaaagcaaagttgacaaccagttctacagtgtggaagtgggagactcaaccttcacagttctcaagcgctaccagaatctaaagcctattggctctggggctcagggcatagtttgtgccgcgtatgatgctgtccttgacagaaatgtggccattaagaagctcagcagaccctttcagaaccaaacacatgccaagagagcgtaccgggagctggtcctcatgaagtgtgtgaaccataaaaacattattagtttattaaatgtcttcacaccccagaaaacgctggaggagttccaagatgtttacttagtaatggaactgatggatgccaacttatgtcaagtgattcagatggaattagaccatgagcgaatgtcttacctgctgtaccaaatgttgtgtggcattaagcacctccattctgctggaattattcacagggatttaaaaccaagtaacattgtagtcaagtctgattgcacattgaaaatcctggactttggactggccaggacagcaggcacaagcttcatgatgactccatatgtggtgacacgttattacagagcccctgaggtcatcctggggatgggctacaaggagaacgtggatatatggtctgtgggatgcattatgggagaaatggttcgccacaaaatcctctttccaggaagggactatattgaccagtggaataaggtaattgaacaactaggaacaccatgtccagaattcatgaagaaattgcaacccacagtaagaaactatgtggagaatcggcccaagtatgcgggactcaccttccccaaactcttcccagattccctcttcccagcggactccgagcacaataaactcaaagccagccaagccagggacttgttgtcaaagatgctagtgattgacccagcaaaaagaatatcagtggacgacgccttacagcatccctacatcaacgtctggtatgacccagccgaagtggaggcgcctccacctcagatatatgacaagcagttggatgaaagagaacacacaattgaagaatggaaagaacttatctacaaggaagtaatgaattcagaagaaaagactaaaaatggtgtagtaaaaggacagccttctccttcaggtgcagcagtgaacagcagtgagagtctccctccatcctcgtctgtcaatgacatctcctccatgtccaccgaccagaccctggcatctgacactgacagcagcctggaagcctcggcaggacccctgggttgttgcaggtgactagccgcctgcctgcgaaacccagcgttcttcaggagatgatgtgatggaacacacacacacgcagacacacacacacacacaaatgcagacacacaacatcaagaaaacagcaagggagagaatccaagcctaaaattaaataaatctttcagcctgcttcttccccagggttctgtattgcagctaagctcaaatgtatatttaacttctagttgctcttgctttggtcttcttccaatgatgcttactacagaaagcaaatcagacacaattagagaagccttttccataaagtgtaattttaatggctgcaaaaccggcaacctgtaactgcccttttaaatggcatgacaaggtgtgcagtggccccatccagcatgtgtgtgtctctatcttgcatctacctgctccttggcctagtcagatggatgtagatacagatccgcatgtgtctgtattcatacagcactacttacttagagatgctactgtcagtgtcctcagggctctaccaagacataatgcactggggtaccacatggtccatttcatgtgatctattactctgacataaacccatctgtaatatattgccagtatataagctgtttagtttgttaattgattaaactgtatgtcttataagaaaacatgtaaagggggaatatatggggggagtgagctctctcagacccttgaagatgtagcttccaaatttgaatggattaaatggcacctgtatacc

SEQ ID NO: 18470 - DNA, 4107 bp, Homo sapiens
  source 1..4107: mol_type = unassigned DNA
cctttcggttgccatagcaaccccattccccaagccctctgtccgtctcctctggtaggttccacaatggtacaggcagcatcacgctgcacaatggtttccaggcagtgaaagagggtgattcagcaagccactcttcttctattttctttaacctccccttcactttttatttttatgggggtgggtggtgcttgctatatgcttacctttttcttttcttttttcatttttacaaatttccttttttgtcctcacccctcaattcctaggggcttgagtgagtttaagattgggttttcttggaaatcacctgtccatcgttaattttaaacaatctccatatctccaaagaatctcttccatgttagtctggaatgtggttaatgaaaaacaagtagggaggatttctggggcaaacactgccggatcaggatcgtagttctcaggcacggaatggctagtgtgagaaacaccaacagcaggcccatctcagatcttcactatggcaacttatgcaagaaactgttgaattagacccgtttcctatagatgagaaaccatacaagctgtggtatttatgagcctccatttcttatactactgcagtgaaccaacattggatgtgaaaattgccttttgtcaggtgtgtgttccttacaggtaaaacaagggattcgataaacaagtggatgtgtcatatattgccaaacattacaacatgagcaaaagcaaagttgacaaccagttctacagtgtggaagtgggagactcaaccttcacagttctcaagcgctaccagaatctaaagcctattggctctggggctcagggcatagtttgtgccgcgtatgatgctgtccttgacagaaatgtggccattaagaagctcagcagaccctttcagaaccaaacacatgccaagagagcgtaccgggagctggtcctcatgaagtgtgtgaaccataaaaacattattagtttattaaatgtcttcacaccccagaaaacgctggaggagttccaagatgtttacttagtaatggaactgatggatgccaacttatgtcaagtgattcagatggaattagaccatgagcgaatgtcttacctgctgtaccaaatgttgtgtggcattaagcacctccattctgctggaattattcacagggatttaaaaccaagtaacattgtagtcaagtctgattgcacattgaaaatcctggactttggactggccaggacagcaggcacaagcttcatgatgactccatatgtggtgacacgttattacagagcccctgaggtcatcctggggatgggctacaaggagaacgtggatatatggtctgtgggatgcattatgggagaaatggttcgccacaaaatcctctttccaggaagggactatattgaccagtggaataaggtaattgaacaactaggaacaccatgtccagaattcatgaagaaattgcaacccacagtaagaaactatgtggagaatcggcccaagtatgcgggactcaccttccccaaactcttcccagattccctcttcccagcggactccgagcacaataaactcaaagccagccaagccagggacttgttgtcaaagatgctagtgattgacccagcaaaaagaatatcagtggacgacgccttacagcatccctacatcaacgtctggtatgacccagccgaagtggaggcgcctccacctcagatatatgacaagcagttggatgaaagagaacacacaattgaagaatggaaagaacttatctacaaggaagtaatgaattcagaagaaaagactaaaaatggtgtagtaaaaggacagccttctccttcaggtgcagcagtgaacagcagtgagagtctccctccatcctcgtctgtcaatgacatctcctccatgtccaccgaccagaccctggcatctgacactgacagcagcctggaagcctcggcaggacccctgggttgttgcaggtgactagccgcctgcctgcgaaacccagcgttcttcaggagatgatgtgatggaacacacacacacgcagacacacacacacacacaaatgcagacacacaacatcaagaaaacagcaagggagagaatccaagcctaaaattaaataaatctttcagcctgcttcttccccagggttctgtattgcagctaagctcaaatgtatatttaacttctagttgctcttgctttggtcttcttccaatgatgcttactacagaaagcaaatcagacacaattagagaagccttttccataaagtgtaattttaatggctgcaaaaccggcaacctgtaactgcccttttaaatggcatgacaaggtgtgcagtggccccatccagcatgtgtgtgtctctatcttgcatctacctgctccttggcctagtcagatggatgtagatacagatccgcatgtgtctgtattcatacagcactacttacttagagatgctactgtcagtgtcctcagggctctaccaagacataatgcactggggtaccacatggtccatttcatgtgatctattactctgacataaacccatctgtaatatattgccagtatataagctgtttagtttgttaattgattaaactgtatgtcttataagaaaacatgtaaagggggaatatatggggggagtgagctctctcagacccttgaagatgtagcttccaaatttgaatggattaaatggcacctgtataccaatttgtagaaagaacatatgtgatacttatgtaaagtgtggggcgagtgggtaacagttttcaggcacaaaatggtttggccttctgaaggcaggtgtgaataaaagctgagagtcttttctgtgacagtaaagagtaggagagactggagggtagtgtgtggtgtggactaagactgaaaggaggttattacccagatactaggagacactggtgtccctgttttagagatttggctctatacccatttgtcatttctcaattactggtcacaacaagaggccactggagaaagtggcaggtggtgaagcaaggttattgtgtgtgcttttgatgataagaatctctctctggaactgagcagaattgcctccatgtgaattccttcaacaaaaaaatgagcctgcctagactactttcagattgtggattgtgttttccatgtgtgggctgcttccctgattcatactctgccaaagttttattttgagaaataatattactttcctcttctgaaataaaataataataataataatgaaacccccaaaccacagtgtgagtctcaggttagcatttgaaaacatctccagagacattgttattcctcaggagtttccctgactccttaatgtggctgatgtttcatgtttatttatttattttaataagtatgagcaatcgaagggctgatcatctgagttttgtactgcagtagatgtaagagcaataactctgcccataaatttactgctgccaaatagttttagcaatatgagtttgtcttaaaagccatgaagcattaatgtcaatgtttagcaaaatctccagaatttagcttaaattaaattaaatgaaagtgctttcctgagcacttaaggaggcactgtgaaacatcttggttatgtacaaggcaataccaaggtgatctcagcaataatcaggcttcccttcttattcacttcgaagtatccatcacagttatttgcactctgaccatgttggtgctcactagagtggtgatatttcacctgaagaagtgaaagacaggaagtggatggttgatgagtgtgaactgattggcaaatagaatatccccaaaacagagcaaacaagaatgccagtgctctgaaaactgccttaaatataataatagggaactttctttctctcttcaagcaatagagaccacagggaactgcacccacctgcaccatcgccatgccagtggtgctgccattctgagattatttcacacagtcagattcagtacacgcagtcatttgtttaaaataaatagaagaacattcctttgtgcagcttgtcccctggaataaaaatggcccattttctcta

SEQ ID NO: 18471 - DNA, 2382 bp, Homo sapiens
  source 1..2382: mol_type = unassigned DNA
ctctcttttccattttgttacagaaccataattatcatgtgatctagacctgatacattgtagatgaagaaacatgtcgacagagccactatctgcccaacatctgatgggtagtcatagtcacagtggaactgagactaaggtttccatttttatttgactatgcttcttcccaaggctagtgtgagaaacaccaacagcaggcccatctcagatcttcactatggcaacttatgcaagaaactgttgaattagacccgtttcctatagatgagaaaccatacaagctgtggtatttatgagcctccatttcttatactactgcagtgaaccaacattggatgtgaaaattgccttttgtcagggattcgataaacaagtggatgtgtcatatattgccaaacattacaacatgagcaaaagcaaagttgacaaccagttctacagtgtggaagtgggagactcaaccttcacagttctcaagcgctaccagaatctaaagcctattggctctggggctcagggcatagtttgtgccgcgtatgatgctgtccttgacagaaatgtggccattaagaagctcagcagaccctttcagaaccaaacacatgccaagagagcgtaccgggagctggtcctcatgaagtgtgtgaaccataaaaacttacttagtaatggaactgatggatgccaacttatgtcaagtgattcagatggaattagaccatgagcgaatgtcttacctgctgtaccaaatgttgtgtggcattaagcacctccattctgctggaattattcacagggatttaaaaccaagtaacattgtagtcaagtctgattgcacattgaaaatcctggactttggactggccaggacagcaggcacaagcttcatgatgactccatatgtggtgacacgttattacagagcccctgaggtcatcctggggatgggctacaaggagaacgttgacatgtggtcagtagggtgcatcatgggagaaatgataaaaggtgcagtgctgtttcctggcactgatcatattgaccagtggaataaggtaattgaacaactaggaacaccatgtccagaattcatgaagaaattgcaacccacagtaagaaactatgtggagaatcggcccaagtatgcgggactcaccttccccaaactcttcccagattccctcttcccagcggactccgagcacaataaactcaaagccagccaagccagggacttgttgtcaaagatgctagtgattgacccagcaaaaagaatatcagtggacgacgccttacagcatccctacatcaacgtctggtatgacccagccgaagtggaggcgcctccacctcagatatatgacaagcagttggatgaaagagaacacacaattgaagaatggaaagaacttatctacaaggaagtaatgaattcagaagaaaagactaaaaatggtgtagtaaaaggacagccttctccttcaggtgcagcagtgaacagcagtgagagtctccctccatcctcgtctgtcaatgacatctcctccatgtccaccgaccagaccctggcatctgacactgacagcagcctggaagcctcggcaggacccctgggttgttgcaggtgactagccgcctgcctgcgaaacccagcgttcttcaggagatgatgtgatggaacacacacacacgcagacacacacacacacacaaatgcagacacacaacatcaagaaaacagcaagggagagaatccaagcctaaaattaaataaatctttcagcctgcttcttccccagggttctgtattgcagctaagctcaaatgtatatttaacttctagttgctcttgctttggtcttcttccaatgatgcttactacagaaagcaaatcagacacaattagagaagccttttccataaagtgtaattttaatggctgcaaaaccggcaacctgtaactgcccttttaaatggcatgacaaggtgtgcagtggccccatccagcatgtgtgtgtctctatcttgcatctacctgctccttggcctagtcagatggatgtagatacagatccgcatgtgtctgtattcatacagcactacttacttagagatgctactgtcagtgtcctcagggctctaccaagacataatgcactggggtaccacatggtccatttcatgtgatctattactctgacataaacccatctgtaatatattgccagtatataagctgtttagtttgttaattgattaaactgtatgtcttataagaaaacatgtaaagggggaatatatggggggagtgagctctctcagacccttgaagatgtagcttccaaatttgaatggattaaatggcacctgtatacc

SEQ ID NO: 18472 - DNA, 563 bp, Homo sapiens
  source 1..563: mol_type = unassigned DNA
agtgccttgggcctggcttttcgcgttcttcggactagccagaggctcaggttggtgaccgagcggcagagttcctagcgcctgcagtgtggtgaactccaacttttaggccaagttgaaaatgcagccgacgacccccacacttctaacttcagaatcaaaactatgaccctagggagtgaggaggagagtgaaaaatgcgctagtgtgagaaacaccaacagcaggcccatctcagatcttcactatggcaacttatgcaagaaactgttgaattagacccgtttcctatagatgagaaaccatacaagctgtggtatttatgagcctccatttcttatactactgcagtgaaccaacattggatgtgaaaattgccttttgtcaggtgtgtgttccttacaggtaaaacaagggattcgataaacaagtggatgtgtcatatattgccaaacattacaacatgagcaaaagcaaagttgacaaccagttctacagtgtggaagtgggagactcaaccttcacagttctcaagcgctaccagaatctaaagcctattggct

SEQ ID NO: 18473 - DNA, 581 bp, Homo sapiens
  source 1..581: mol_type = unassigned DNA
agctttcccagtgcctccagcagccctcctcaaggacccctgtgaggccaggcagaaatggcgtggcaggggacccagcgagcccagagggattttgccgctgcttcctctacccctgtatttcacgcagctctctaaattgactcagctccagagacaggatctagttctgtcacccaggctggatggagtgcagtggcattatcatagctcattgcagccagaaactcctgtgcttgagtgatcctcctgcctcagccttcccaatggctgggactacaggttcaaaccactaggacagcatttgccacattattgttccactaatgaaccacctcagtggctatggagatgaaattagaggcgcagggttggtgtgtggagatgggtattgacagtcaattctcccagataatataacaggtatttatgagcctccatttcttatactactgcagtgaaccaacattggatgtgaaaattgccttttgtcagggattcgataaacaagtggatgtgtcatatattgccaaacattacaacatgagcaaaagcaaagttgacaaccagttctacagtgt

SEQ ID NO: 18474 - DNA, 562 bp, Homo sapiens
  source 1..562: mol_type = unassigned DNA
gtaagtgcaccaggcattgccagcacaacatccaatatctccttctatccctcatcggctagttgtcggaccctggaagataacacagaatgcttatcaacatatttaaaatagttgcagtaaggaccatttctctcagagaagcttctgtgaattttctactttaggctagtgtgagaaacaccaacagcaggcccatctcagatcttcactatggcaacttatgcaagaaactgttgaattagacccgtttcctatagatgagaaaccatacaagctgtggtatttatgagcctccatttcttatactactgcagtgaaccaacattggatgtgaaaattgccttttgtcagggattcgataaacaagtggatgtgtcatatattgccaaacattacaacatgagcaaaagcaaagttgacaaccagttctacagtgtggaagtgggagactcaaccttcacagttctcaagcgctaccagaatctaaagcctattggctctggggctcagggcatagtttgtgccgcgtatgatgctgtccttgacagaaatgtggcca

SEQ ID NO: 18475 - DNA, 550 bp, Homo sapiens
  source 1..550: mol_type = unassigned DNA
atgctggaaggggatgtttatgaacagatcccagaggggctgagtgtgtttttgctgtcattgtctggctagtgtgagaaacaccaacagcaggcccatctcagatcttcactatggcaacttatgcaagaaactgttgaattagacccgtttcctatagatgagaaaccatacaagctgtggtatttatgagcctccatttcttatactactgcagtgaaccaacattggatgtgaaaattgccttttgtcaggtgtgtgttccttacaggtaaaacaagggattcgataaacaagtggatgtgtcatatattgccaaacattacaacatgagcaaaagcaaagttgacaaccagttctacagtgtggaagtgggagactcaaccttcacagttctcaagcgctaccagaatctaaagcctattggctctggggctcagggcatagtttgtgccgcgtatgatgctgtccttgacagaaatgtggccattaagaagctcagcagaccctttcagaaccaaacacatgccaagagagcgtaccgggagct

SEQ ID NO: 18476 - DNA, 743 bp, Homo sapiens
  source 1..743: mol_type = unassigned DNA
ttcctctgctgttgcaaagtgtctttaatttgaggggctcctgttcttaaaaaatcctcacagtttcagtaaaacgattctggatagtgaggcagtaagaaattatatgtagagtgggaaaatcagctgcctccagcttcctgcctgctagccccagaacagcatctgctgttgagaggagtgtgtttgccatgctggaaggggatgtttatgaacagatcccagaggggctgagtgtgtttttgctgtcattgtctggctagtgtgagaaacaccaacagcaggcccatctcagatcttcactatggcaacttatgcaagaaactgttgaattagacccgtttcctatagatgagaaaccatacaagctgtggtatttatgagcctccatttcttatactactgcagtgaaccaacattggatgtgaaaattgccttttgtcagggattcgataaacaagtggatgtgtcatatattgccaaacattacaacatgagcaaaagcaaagttgacaaccagttctacagtgtggaagtgggagactcaaccttcacagttctcaagcgctaccagaatctaaagcctattggctctggggctcagggcatagtttgtgccgcgtatgatgctgtccttgacagaaatgtggccattaagaagctcagcagaccctttcagaaccaaacacatgccaagagagcgtaccgggagctggtcctcatgaagtgtgtgaaccataaaa

SEQ ID NO: 18477 - DNA, 569 bp, Homo sapiens
  source 1..569: mol_type = unassigned DNA
tttcccagtgcctccagcagccctcctcaaggacccctgtgaggccaggcagaaatggcgtggcaggggacccagcgagcccagagggattttgccgctgcttcctctacccctgtatttcacgcagctctctaaattgactcagctccaggttcaaaccactaggacagcatttgccacattattgttccactaatgaaccacctcagtggtatttatgagcctccatttcttatactactgcagtgaaccaacattggatgtgaaaattgccttttgtcagggattcgataaacaagtggatgtgtcatatattgccaaacattacaacatgagcaaaagcaaagttgacaaccagttctacagtgtggaagtgggagactcaaccttcacagttctcaagcgctaccagaatctaaagcctattggctctggggctcagggcatagtttgtgccgcgtatgatgctgtccttgacagaaatgtggccattaagaagctcagcagaccctttcagaaccaaacacatgccaagagagcgtaccgggagctggtcctcatgaagtgtg

SEQ ID NO: 18478 - DNA, 595 bp, Homo sapiens
  source 1..595: mol_type = unassigned DNA
attagattttaggggctggatgctttggatgtagcggtttggctgcctctggctagtgtgagaaacaccaacagcaggcccatctcagatcttcactatggcaacttatgcaagaaactgttgaattagacccgtttcctatagatgagaaaccatacaagctgtggtatttatgagcctccatttcttatactactgcagtgaaccaacattggatgtgaaaattgccttttgtcagggattcgataaacaagtggatgtgtcatatattgccaaacattacaacatgagcaaaagcaaagttgacaaccagttctacagtgtggaagtgggagactcaaccttcacagttctcaagcgctaccagaatctaaagcctattggctctggggctcagggcatagtttgtgccgcgtatgatgctgtccttgacagaaatgtggccattaagaagctcagcagaccctttcagaaccaaacacatgccaagagagcgtaccgggagctggtcctcatgaagtgtgtgaaccataaaaacattattagtttattaaatgtcttcacaccccagaaaacgctggaggagttccaagat

SEQ ID NO: 18479 - DNA, 564 bp, Homo sapiens
  source 1..564: mol_type = unassigned DNA
ttagattttaggggctggatgctttggatgtagcggtttggctgcctctggctagtgtgagaaacaccaacagcaggcccatctcagatcttcactatggcaacttatgcaagaaactgttgaattagacccgtttcctatagatgagaaaccatacaagctgtggtatttatgagcctccatttcttatactactgcagtgaaccaacattggatgtgaaaattgccttttgtcaggtgtgtgttccttacaggtaaaacaagggattcgataaacaagtggatgtgtcatatattgccaaacattacaacatgagcaaaagcaaagttgacaaccagttctacagtgtggaagtgggagactcaaccttcacagttctcaagcgctaccagaatctaaagcctattggctctggggctcagggcatagtttgtgccgcgtatgatgctgtccttgacagaaatgtggccattaagaagctcagcagaccctttcagaaccaaacacatgccaagagagcgtaccgggagctggtcctcatgaagtgtgtgaaccataaaaac

SEQ ID NO: 18480 - DNA, 722 bp, Homo sapiens
  source 1..722: mol_type = unassigned DNA
ggtgcagagcctgacagtgtctgtacagcagccctgcctgcttctggccatgttgatgataacttttatgaacaaactgcaaggaagcaggctaagtcatatgggatagactacagttcaggtggaaggaaaacgagtgtaagtgcaccaggcattgccagcacaacatccaatatctccttctatccctcatcggctagttgtcggaccctggaagataacacagaatgcttatcaacatatttaaaatagttgcagtaaggaccatttctctcagagaagcttctgtgaattttctactttaggctagtgtgagaaacaccaacagcaggcccatctcagatcttcactatggcaacttatgcaagaaactgttgaattagacccgtttcctatagatgagaaaccatacaagctgtggtatttatgagcctccatttcttatactactgcagtgaaccaacattggatgtgaaaattgccttttgtcaggtgtgtgttccttacaggtaaaacaagggattcgataaacaagtggatgtgtcatatattgccaaacattacaacatgagcaaaagcaaagttgacaaccagttctacagtgtggaagtgggagactcaaccttcacagttctcaagcgctaccagaatctaaagcctattggctctggggctcagggcatagtttgtgccgcgtatgatgctgtccttgacagaaatgt

SEQ ID NO: 18481 - DNA, 489 bp, Homo sapiens
  source 1..489: mol_type = unassigned DNA
gccccggttgccatgacaaccagtgccttgggcctggcttttcgcgttcttcggactagccagaggctcaggttggtgaccgagcggcagagttcctagcgcctgcagtgtggtgaactccaacttttaggccaagttgaaaatgcagccgacgacccccacacttctaacttcagaatcaaaactatgaccctagggagtgaggaggagagtgaaaaatgcgctagtgtgagaaacaccaacagcaggcccatctcagatcttcactatggcaacttatgcaagaaactgttgaattagacccgtttcctatagatgagaaaccatacaagctgtggtatttatgagcctccatttcttatactactgcagtgaaccaacattggatgtgaaaattgccttttgtcagggattcgataaacaagtggatgtgtcatatattgccaaacattacaacatgagcaaaagcaaagttgacaaccagttcta

SEQ ID NO: 18482 - DNA, 1331 bp, Homo sapiens
  source 1..1331: mol_type = unassigned DNA
aaatgtggccattaagaagctcagcagaccctttcagaaccaaacacatgccaagagagcgtaccgggagctggtcctcatgaagtgtgtgaaccataaaaacattattagtttattaaatgtcttcacaccccagaaaacgctggaggagttccaagatgtttacttagtaatggaactgatggatgccaacttatgtcaagtgattcagatggaattagaccatgagcgaatgtcttacctgctgtaccaaatgttgtgtggcattaagcacctccattctgctggaattattcacagggatttaaaaccaagtaacattgtagtcaagtctgattgcacattgaaaatcctggactttggactggccaggacagcaggcacaagcttcatgatgactccatatgtggtgacacgttattacagagcccctgaggtcatcctggggatgggctacaaggagaacgttgacatgtggtcagtagggtgcatcatgggagaaatgataaaaggtgcagtgctgtttcctggcactgatcatattgaccagtggaataaggtaattgaacaactaggaacaccatgtccagaattcatgaagaaattgcaacccacagtaagaaactatgtggagaatcggcccaagtatgcgggactcaccttccccaaactcttcccagattccctcttcccagcggactccgagcacaataaactcaaagccagccaagccagggacttgttgtcaaagatgctagtgattgacccagcaaaaagaatatcagtggacgacgccttacagcatccctacatcaacgtctggtatgacccagccgaagtggaggcgcctccacctcagatatatgacaagcagttggatgaaagagaacacacaattgaagaatggaaagaacttatctacaaggaagtaatgaattcagaagaaaagactaaaaatggtgtagtaaaaggacagccttctccttcagcacaggtgcagcagtgaacagcagtgagagtctccctccatcctcgtctgtcaatgacatctcctccatgtccaccgaccagaccctggcatctgacactgacagcagcctggaagcctcggcaggacccctgggttgttgcaggtgactagccgcctgcctgcgaaacccagcgttcttcaggagatgatgtgatggaacacacacacacgcagacacacacacacacacaaatgcagacacacaacatcaagaaaacagcaagggagagaatccaagcctaaaattaaataaatctttcagcctgcttcttccccagggttctgtattgcagctaagctc

SEQ ID NO: 18483 - DNA, 4736 bp, Homo sapiens
  source 1..4736: mol_type = unassigned DNA
gctgtcggggcgaccgcgggagctcgccgtgcgccgtggctgggaccggcctggccgagcgcgccggcgccgcggccgcagacaaagggcggctcgcgcccgggccgccacgctctcgggctctgcctcgggaaggagacttggtctgaaagatgccacattcctgcagcctctcttggtgcagtggaatacagtcttgggcgaggtggcgtggatgagctggtgaaagaggatgctgcccacatccaaaggctccagaggatcctggcctggcagctgagctcccctgcatttggaacctcaggcgtaacttggtgtagagctcatgaaaggtgcttgtgtttctccagcttttttcaccagtgcttaccagactggctcaggttttggaatctaaggtgagctggtagaaacaggagaggtagaaagaagcccctggatgcctccagaattcattgatgggatccctgcatactgcttggaacacagaaagaggctgtgacacagctgagctttggagcatcttaaggagctcagctcagcaaacaactcttgcatttcagccagaaagagcctcttgtaacaaagtattcaaaggggagagtttctgcatcttttactttgcagtccactatggtagaaaacttgacattccatagataatgatactgggttttctttccaagatgccagctttaaaagaaatatgagccattctaagctttaagaagggttcaggaaacacaggaattagtagacagccctcccaatgcaggttaagacgacagcctgcgcccccaactagcacagctcagcgagcatgaccatatgccattctcgtctccagagagctggtggcagtgacctcactaggagaaaacacatccctcagccgtgggacttgacagaatgaggtgcgcgagggaggccgctagccgagacttggcctttcctgactgcccctgtgttacctgggcagctccagatcactgagcccacaatggctgagaagggtgactgcatcgccagtgtctatgggtatgacctcggtgggcgctttgttgacttccaacccctgggcttcggtgtcaatggtttggtgctgtcggccgtggacagccgggcctgccggaaggtcgctgtgaagaagattgccctgagcgatgcccgcagcatgaagcacgcgctccgagagatcaagatcattcggcgcctggaccacgacaacatcgtcaaagtgtacgaggtgctcggtcccaagggcactgacctgcagggtgagctgttcaagttcagcgtggcgtacatcgtccaggagtacatggagaccgacctggcacgcctgctggagcagggcacgctggcagaagagcatgccaagctgttcatgtaccagctgctccgcgggctcaagtacatccactccgccaacgtgctgcacagggacctgaagcccgccaacatcttcatcagcacagaggacctcgtgctcaagattggggatttcgggttggcaaggatcgttgatcagcattactcccacaagggttatctgtcagaagggttggtaacaaagtggtaccgttccccacgactgctcctttcccccaataactacaccaaagccatcgacatgtgggccgccggctgcatcctggctgagatgcttacggggagaatgctctttgctggggcccatgagctggagcagatgcaactcatcctggagaccatccctgtaatccgggaggaagacaaggacgagctgctcagggtgatgccttcctttgtcagcagcacctgggaggtgaagaggcctctgcgcaagctgctccctgaagtgaacagtgaagccatcgactttctggagaagatcctgacctttaaccccatggatcgcctaacagctgagatggggctgcaacacccctacatgagcccatactcgtgccctgaggacgagcccacctcacaacaccccttccgcattgaggatgagatcgacgacatcgtgctgatggccgctaaccagagccagctgtccaactgggacacgtgcagttccaggtaccctgtgagcctgtcgtcggacctggagtggcggcctgaccggtgccaggacgccagcgaggtacagcgcgacccgcgcgcgggttcggcgccactggctgaggacgtgcaggtggacccgcgcaaggactcgcacagcagctccgagcgcttcctagagcagtcgcactcgtccatggagcgcgccttcgaggccgactacgggcgctcctgcgactacaaggtggggtcgccgtcctacctggacaagctgctgtggcgcgacaacaagccgcaccactactcggagcccaagctcatcctggacctgtcgcactggaagcaggcggccggcgcgccccccacggccacggggctggcggacacgggggcgcgcgaggacgagccggccagcctcttcctggagatcgcgcagtgggtcaagagcacgcagggcggcccagagcacgccagcccgcccgccgacgaccccgagcgccgcttgtctgcctcgccccccggccgcccggccccggtggacggcggcgccagcccccagttcgacctggacgtgttcatctcccgcgccctgaagctctgcaccaagcccgaggacctgccggacaataaactgggcgacctcaatggtgcgtgcatccccgagcaccctggcgacctcgtgcagaccgaggccttctccaaagaaaggtggtgagggcggaggggccgctccaggccccacagagcaggagacccccagagaaagccggggctggcaggaggcggccgcccttcccgcccctctctgctgccttggggttggcagaacacgtgaaggatccgaggagcgagaggaatgtccatttcttaaactgccttaataactagcctttaacctgtgggagcgggtttgaacaggaccctggcttaggggttgatcactttcctagcaaaggggagaccacatgtggtgcacagggaagaaacggctttagacagcagtctgcgggccccacctgggtggcaggatgccgagaaatcttgcagaggtagctccgaaaccatctggcccaactagcctcaactgacagctgaggaaaggcaattaggcccagagaggcagagacactcgcttaagatcacaggcttagtgtgaggacgagcttgaaatcccagtctcctggcccccaggccagggtctgtccaccatagaatgtcttcctctactggggtcgttctggctttttgttagaaacttggtctgagatgtttcttccctgtccattaccattcgatgttcttttattcagagcaatgtttcttgtattctgaaactggaaactgaaccagtttgtttctcctagtcaccaagcatactttcctggctccccaagtacttaaatgttctcatctgtcgcacccctgtatttgcctcacccctgcatggtcggaaatcttcgtttcaggtcagaacagcctggggtctgtgggtaaaatcagcccttctcccaggcctgtgcacacaccccctcagcactccctatgcactttcctgacacgcaaagacacagccctctttccccactgggcgtcctaccccagtgaggttgaaggcaccaattccaagaatccctccaacctccctgccagcactcccccttcaccccacacccggcccccccacctaaccacagcgcctctccagacctacctcgggacctaatgttctctacatgaactgctcatttggaggacagcagtgaggtcctgccatagagcaaatgtgttaggagagaaggtttcacatgggacccaacatccttcatcaatactttcctgagtttgatcatccatttagccttgacaaacagcagaccctacagagatgtgttggagagcacgtcgtgaccttgggggcaaggaatccagaaaggtaggaagatatgaaaagagaggtgtcaacagcaagggctcttaggggtcaggcaccagcatggagacctcatgacaaaggaagggactcaaagcagcaatgcccctcatagtgtaggctaaggtgagtttggtgcatgcaaacctgtgtgctcacccacagagcatggggtaatggtgtgtagacacaggccctctgcagaagcgtggggtggggacactgacagcccctatctggtccccaggaacattctaccatttctgccactggtgttcagctccttctcttcccccaacactcccaaagatacccacaggaagtccagccagtttccaggtagaggattccaccagttggtcttgggctgcgttcaccctcacatcacagcaccttaaatctaatcagcaaactataatttgtacgttgaaacctgcaacacattagaaacttatatttaaaaacagaattaatcacactgaccaacttttaaatggaaaatatgtaaataggaagtgtttgggttttgttttttctttaagaaaaagaaatgtacaccactcctcatgtgccattttgtcctcagagggcggctttacttttttggtaaaggaacaagctgctggccttgaccaggagttcatatataactgttattacagaggaattgttataactactaatgtttttaaaaaatttattaaacattattaaacttgatcaggtcaggccaaataaagttttattggaacacaga

SEQ ID NO: 18484 - DNA, 1576 bp, Homo sapiens
  source 1..1576: mol_type = unassigned DNA
gagctcgccgtgcgccgtggctgggaccggcctggccgagcgcgccggcgccgcggccgcagacaaagggcggctcgcgcccgggccgccacgctctcgggctctgcctcgggttatctgtcagaagggttggtaacaaagtggtaccgttccccacgactgctcctttcccccaataactacaccaaagccatcgacatgtgggccgccggctgcatcctggctgagatgcttacggggagaatgctctttgctggggcccatgagctggagcagatgcaactcatcctggagaccatccctgtaatccgggaggaagacaaggacgagctgctcagggtgatgccttcctttgtcagcagcacctgggaggtgaagaggcctctgcgcaagctgctccctgaagtgaacagtgaagccatcgactttctggagaagatcctgacctttaaccccatggatcgcctaacagctgagatggggctgcaacacccctacatgagcccatactcgtgccctgaggacgagcccacctcacaacaccccttccgcattgaggatgagatcgacgacatcgtgctgatggccgctaaccagagccagctgtccaactgggacacgtgcagttccaggtaccctgtgagcctgtcgtcggacctggagtggcggcctgaccggtgccaggacgccagcgaggtacagcgcgacccgcgcgcgggttcggcgccactggctgaggacgtgcaggtggacccgcgcaaggactcgcacagcagctccgagcgcttcctagagcagtcgcactcgtccatggagcgcgccttcgaggccgactacgggcgctcctgcgactacaaggtggggtcgccgtcctacctggacaagctgctgtggcgcgacaacaagccgcaccactactcggagcccaagctcatcctggacctgtcgcactggaagcaggcggccggcgcgccccccacggccacggggctggcggacacgggggcgcgcgaggacgagccggccagcctcttcctggagatcgcgcagtgggtcaagagcacgcagggcggcccagagcacgccagcccgcccgccgacgaccccgagcgccgcttgtctgcctcgccccccggccgcccggccccggtggacggcggcgccagcccccagttcgacctggacgtgttcatctcccgcgccctgaagctctgcaccaagcccgaggacctgccggacaataaactgggcgacctcaatggtgcgtgcatccccgagcaccctggcgacctcgtgcagaccgaggccttctccaaagaaaggtggtgagggcggaggggccgctccaggccccacagagcaggagacccccagagaaagccggggctggcaggaggcggccgcccttcccgcccctctctgctgccttggggttggcagaacacgtgaaggatccgaggagcgagaggaatgtccatttcttaaactgccttaataactagcctttaacctgtgggagcgggtttgaacaggaccctggcttaggggttgatcactttcctagcaaaggggagac

SEQ ID NO: 18485 - DNA, 2746 bp, Homo sapiens
  source 1..2746: mol_type = unassigned DNA
acagctcggttccagcgagggctccgcccacccgcgggctccgcagaggagcagaggttgggcggccgcctcggttaactccgctgcagcccaaagcacgggaatcgcgggacagacaaacgagcggagggaagatacctagaagccaggaaaccgcgagctgcagtccaacttggccggaagctgcggagaggctcagccaccggaagtcagtggagggttcggccggacgctctagaatcccggaggaccgggatctctgtggttggccgtgacgggcaccctctaccggggatgacacattcccagagctcctgggaccaagcaaatggcggacacaattccctgggcggaaggggacttcgggagccagtagccaagctacgtggtcctggacctgatggaaagcgacctgcaccagatcatccactcctcacagcccctcacactggaacacgtgcgctacttcctgtaccaactgctgcggggcctgaagtacatgcactcggctcaggtcatccaccgtgacctgaagccctccaacctattggtgaatgagaactgtgagctcaagattggtgactttggtatggctcgtggcctgtgcacctcgcccgctgaacatcagtacttcatgactgagtatgtggccacgcgctggtaccgtgcgcccgagctcatgctctctttgcatgagtatacacaggctattgacctctggtctgtgggctgcatctttggtgagatgctggcccggcgccagctcttcccaggcaaaaactatgtacaccagctacagctcatcatgatggtgctgggtaccccatcaccagccgtgattcaggctgtgggggctgagagggtgcgggcctatatccagagcttgccaccacgccagcctgtgccctgggagacagtgtacccaggtgccgaccgccaggccctatcactgctgggtcgcatgctgcgttttgagcccagcgctcgcatctcagcagctgctgcccttcgccaccctttcctggccaagtaccatgatcctgatgatgagcctgactgtgccccgccctttgactttgcctttgaccgcgaagccctcactcgggagcgcattaaggaggccattgtggctgaaattgaggacttccatgcaaggcgtgagggcatccgccaacagatccgcttccagccttctctacagcctgtggctagtgagcctggctgtccagatgttgaaatgcccagtccctgggctcccagtggggactgtgccatggagtctccaccaccagccccgccaccatgccccggccctgcacctgacaccattgatctgaccctgcagccacctccaccagtcagtgagcctgccccaccaaagaaagatggtgccatctcagacaatactaaggctgcccttaaagctgccctgctcaagtctttgaggagccggctcagagatggccccagcgcacccctggaggctcctgagcctcggaagccggtgacagcccaggagcgccagcgggagcgggaggagaagcggcggaggcggcaagaacgagccaaggagcgggagaaacggcggcaggagcgggagcgaaaggaacggggggctggggcctctgggggcccctccactgaccccttggctggactagtgctcagtgacaatgacagaagcctgttggaacgctggactcgaatggcccggcccgcagccccagccctcacctctgtgccggcccctgccccagcgccaacgccaaccccaaccccagtccaacctaccagtcctcctcctggccctgtagcccagcccactggcccgcaaccacaatctgcgggctctacctctggccctgtaccccagcctgcctgcccaccccctggccctgcaccccaccccactggccctcctgggcccatccctgtccccgcgccaccccagattgccacctccaccagcctcctggctgcccagtcacttgtgccaccccctgggctgcctggctccagcaccccaggagttttgccttacttcccacctggcctgccgcccccagacgccgggggagcccctcagtcttccatgtcagagtcacctgatgtcaaccttgtgacccagcagctatctaagtcacaggtggaggaccccctgccccctgtgttctcaggcacaccaaagggcagtggggctggctacggtgttggctttgacctggaggaattcttaaaccagtctttcgacatgggcgtggctgatgggccacaggatggccaggcagattcagcctctctctcagcctccctgcttgctgactggctcgaaggccatggcatgaaccctgccgatattgagtccctgcagcgtgagatccagatggactccccaatgctgctggctgacctgcctgacctccaggacccctgaggcccccagcctgtgccttgctgccacagtagacctagttccaggatccatgggagcattctcaaaggctttagccctggacccagcaggtgaggctcggcttggattattctgcaggttcatctcagacccacctttcagccttaagcagccacctgagccaccaccgagccatggcaggatcgggagaccccaactccccctgaacaatccttttcagtattatatttttattattattatgttattattacactgtctttttgccatcaaaatgaggcctgtgaaatacaaggttcccttctgcacctg

SEQ ID NO: 18486 - DNA, 3149 bp, Homo sapiens
  source 1..3149: mol_type = unassigned DNA
acagctcggttccagcgagggctccgcccacccgcgggctccgcagaggagcagaggttgggcggccgcctcggttaactccgctgcagcccaaagcacgggaatcgcgggacagacaaacgagcggagggaagatacctagaagccaggaaaccgcgagctgcagtccaacttggccggaagctgcggagaggctcagccaccggaagtcagtggagggttcggccggacgctctagaatcccggaggaccgggatctctgtggttggccgtgacgggcaccctctaccggggatgacacattcccagagctcctgggaccaagcaaatggcggacacaattccctgggcggaaggggacttcgggagccagtagccaagacaccatggccgagcctctgaaggaggaagacggcgaggacggctctgcggagccccccgggcccgtgaaggccgaacccgcccacaccgctgcctctgtagcggccaagaacctggccctgcttaaagcccgctccttcgatgtgacctttgacgtgggcgacgagtacgagatcatcgagaccataggcaacggggcctatggagtggtgtcctccgcccgccgccgcctcaccggccagcaggtggccatcaagaagatccctaatgctttcgatgtggtgaccaatgccaagcggaccctcagggagctgaagatcctcaagcactttaaacacgacaacatcatcgccatcaaggacatcctgaggcccaccgtgccctatggcgaattcaaatctgtctacgtggtcctggacctgatggaaagcgacctgcaccagatcatccactcctcacagcccctcacactggaacacgtgcgctacttcctgtaccaactgctgcggggcctgaagtacatgcactcggctcaggtcatccaccgtgacctgaagccctccaacctattggtgaatgagaactgtgagctcaagattggtgactttggtatggctcgtggcctgtgcacctcgcccgctgaacatcagtacttcatgactgagtatgtggccacgcgctggtaccgtgcgcccgagctcatgctctctttgcatgagtatacacaggctattgacctctggtctgtgggctgcatctttggtgagatgctggcccggcgccagctcttcccaggcaaaaactatgtacaccagctacagctcatcatgatggtgctgggtaccccatcaccagccgtgattcaggctgtgggggctgagagggtgcgggcctatatccagagcttgccaccacgccagcctgtgccctgggagacagtgtacccaggtgccgaccgccaggccctatcactgctgggtcgcatgctgcgttttgagcccagcgctcgcatctcagcagctgctgcccttcgccaccctttcctggccaagtaccatgatcctgatgatgagcctgactgtgccccgccctttgactttgcctttgaccgcgaagccctcactcgggagcgcattaaggaggccattgtggctgaaattgaggacttccatgcaaggcgtgagggcatccgccaacagatccgcttccagccttctctacagcctgtggctagtgagcctggctgtccagatgttgaaatgcccagtccctgggctcccagtggggactgtgccatggagtctccaccaccagccccgccaccatgccccggccctgcacctgacaccattgatctgaccctgcagccacctccaccagtcagtgagcctgccccaccaaagaaagatggtgccatctcagacaatactaaggctgcccttaaagctgccctgctcaagtctttgaggagccggctcagagatggccccagcgcacccctggaggctcctgagcctcggaagccggtgacagcccaggagcgccagcgggagcgggaggagaagcggcggaggcggcaagaacgagccaaggagcgggagaaacggcggcaggagcgggagcgaaaggaacggggggctggggcctctgggggcccctccactgaccccttggctggactagtgctcagtgacaatgacagaagcctgttggaacgctggactcgaatggcccggcccgcagccccagccctcacctctgtgccggcccctgccccagcgccaacgccaaccccaaccccagtccaacctaccagtcctcctcctggccctgtagcccagcccactggcccgcaaccacaatctgcgggctctacctctggccctgtaccccagcctgcctgcccaccccctggccctgcaccccaccccactggccctcctgggcccatccctgtccccgcgccaccccagattgccacctccaccagcctcctggctgcccagtcacttgtgccaccccctgggctgcctggctccagcaccccaggagttttgccttacttcccacctggcctgccgcccccagacgccgggggagcccctcagtcttccatgtcagagtcacctgatgtcaaccttgtgacccagcagctatctaagtcacaggtggaggaccccctgccccctgtgttctcaggcacaccaaagggcagtggggctggctacggtgttggctttgacctggaggaattcttaaaccagtctttcgacatgggcgtggctgatgggccacaggatggccaggcagattcagcctctctctcagcctccctgcttgctgactggctcgaaggccatggcatgaaccctgccgatattgagtccctgcagcgtgagatccagatggactccccaatgctgctggctgacctgcctgacctccaggacccctgaggcccccagcctgtgccttgctgccacagtagacctagttccaggatccatgggagcattctcaaaggctttagccctggacccagcaggtgaggctcggcttggattattctgcaggttcatctcagacccacctttcagccttaagcagccacctgagccaccaccgagccatggcaggatcgggagaccccaactccccctgaacaatccttttcagtattatatttttattattattatgttattattacactgtctttttgccatcaaaatgaggcctgtgaaatacaaggttcccttctgcacctg

SEQ ID NO: 18487 - DNA, 2845 bp, Homo sapiens
  source 1..2845: mol_type = unassigned DNA
gccttgggaggcggggcggagggggacggacagggcagctcaagacgctgaggtggtggctgcggcctttgaacaaacaccatggccgagcctctgaaggaggaagacggcgaggacggctctgcggagccccccgggcccgtgaaggccgaacccgcccacaccgctgcctctgtagcggccaagaacctggccctgcttaaagcccgctccttcgatgtgacctttgacgtgggcgacgagtacgagatcatcgagaccataggcaacggggcctatggagtggtgtcctccgcccgccgccgcctcaccggccagcaggtggccatcaagaagatccctaatgctttcgatgtggtgaccaatgccaagcggaccctcagggagctgaagatcctcaagcactttaaacacgacaacatcatcgccatcaaggacatcctgaggcccaccgtgccctatggcgaattcaaatctgtctacgtggtcctggacctgatggaaagcgacctgcaccagatcatccactcctcacagcccctcacactggaacacgtgcgctacttcctgtaccaactgctgcggggcctgaagtacatgcactcggctcaggtcatccaccgtgacctgaagccctccaacctattggtgaatgagaactgtgagctcaagattggtgactttggtatggctcgtggcctgtgcacctcgcccgctgaacatcagtacttcatgactgagtatgtggccacgcgctggtaccgtgcgcccgagctcatgctctctttgcatgagtatacacaggctattgacctctggtctgtgggctgcatctttggtgagatgctggcccggcgccagctcttcccaggcaaaaactatgtacaccagctacagctcatcatgatggtgctgggtaccccatcaccagccgtgattcaggctgtgggggctgagagggtgcgggcctatatccagagcttgccaccacgccagcctgtgccctgggagacagtgtacccaggtgccgaccgccaggccctatcactgctgggtcgcatgctgcgttttgagcccagcgctcgcatctcagcagctgctgcccttcgccaccctttcctggccaagtaccatgatcctgatgatgagcctgactgtgccccgccctttgactttgcctttgaccgcgaagccctcactcgggagcgcattaaggaggccattgtggctgaaattgaggacttccatgcaaggcgtgagggcatccgccaacagatccgcttccagccttctctacagcctgtggctagtgagcctggctgtccagatgttgaaatgcccagtccctgggctcccagtggggactgtgccatggagtctccaccaccagccccgccaccatgccccggccctgcacctgacaccattgatctgaccctgcagccacctccaccagtcagtgagcctgccccaccaaagaaagatggtgccatctcagacaatactaaggctgcccttaaagctgccctgctcaagtctttgaggagccggctcagagatggccccagcgcacccctggaggctcctgagcctcggaagccggtgacagcccaggagcgccagcgggagcgggaggagaagcggcggaggcggcaagaacgagccaaggagcgggagaaacggcggcaggagcgggagcgaaaggaacggggggctggggcctctgggggcccctccactgaccccttggctggactagtgctcagtgacaatgacagaagcctgttggaacgctggactcgaatggcccggcccgcagccccagccctcacctctgtgccggcccctgccccagcgccaacgccaaccccaaccccagtccaacctaccagtcctcctcctggccctgtagcccagcccactggcccgcaaccacaatctgcgggctctacctctggccctgtaccccagcctgcctgcccaccccctggccctgcaccccaccccactggccctcctgggcccatccctgtccccgcgccaccccagattgccacctccaccagcctcctggctgcccagtcacttgtgccaccccctgggctgcctggctccagcaccccaggagttttgccttacttcccacctggcctgccgcccccagacgccgggggagcccctcagtcttccatgtcagagtcacctgatgtcaaccttgtgacccagcagctatctaagtcacaggtggaggaccccctgccccctgtgttctcaggcacaccaaagggcagtggggctggctacggtgttggctttgacctggaggaattcttaaaccagtctttcgacatgggcgtggctgatgggccacaggatggccaggcagattcagcctctctctcagcctccctgcttgctgactggctcgaaggccatggcatgaaccctgccgatattgagtccctgcagcgtgagatccagatggactccccaatgctgctggctgacctgcctgacctccaggacccctgaggcccccagcctgtgccttgctgccacagtagacctagttccaggatccatgggagcattctcaaaggctttagccctggacccagcaggtgaggctcggcttggattattctgcaggttcatctcagacccacctttcagccttaagcagccacctgagccaccaccgagccatggcaggatcgggagaccccaactccccctgaacaatccttttcagtattatatttttattattattatgttattattacactgtctttttgccatcaaaatgaggcctgtgaaatacaaggttcccttctgcacctga

SEQ ID NO: 18488 - DNA, 3077 bp, Homo sapiens
  source 1..3077: mol_type = unassigned DNA
cggctcccgccggcgagctggacagcggcgcgcgccaggcgtggctttctcggccggtgggctaggattggacgcagtaggtagaaggggcaggaccctccgcagcagtagctcagcgattggccaggagctggagggagcgtggccttgggaggcggggcggagggggacggacagggcagctcaagacgctgaggtggtggctgcggcctttgaacaagtaagtgagccaccctcggagacccccgcgctggggacgggaggccggcgagcctcgggacctctgaaagccttgaggaggcgcggggacaccatggccgagcctctgaaggaggaagacggcgaggacggctctgcggagccccccgggcccgtgaaggccgaacccgcccacaccgctgcctctgtagcggccaagaacctggccctgcttaaagcccgctccttcgatgtgacctttgacgtgggcgacgagtacgagatcatcgagaccataggcaacggggcctatggagtggtgtcctccgcccgccgccgcctcaccggccagcaggtggccatcaagaagatccctaatgctttcgatgtggtgaccaatgccaagcggaccctcagggagctgaagatcctcaagcactttaaacacgacaacatcatcgccatcaaggacatcctgaggcccaccgtgccctatggcgaattcaaatctgtctacgtggtcctggacctgatggaaagcgacctgcaccagatcatccactcctcacagcccctcacactggaacacgtgcgctacttcctgtaccaactgctgcggggcctgaagtacatgcactcggctcaggtcatccaccgtgacctgaagccctccaacctattggtgaatgagaactgtgagctcaagattggtgactttggtatggctcgtggcctgtgcacctcgcccgctgaacatcagtacttcatgactgagtatgtggccacgcgctggtaccgtgcgcccgagctcatgctctctttgcatgagtatacacaggctattgacctctggtctgtgggctgcatctttggtgagatgctggcccggcgccagctcttcccaggcaaaaactatgtacaccagctacagctcatcatgatggtgctgggtaccccatcaccagccgtgattcaggctgtgggggctgagagggtgcgggcctatatccagagcttgccaccacgccagcctgtgccctgggagacagtgtacccaggtgccgaccgccaggccctatcactgctgggtcgcatgctgcgttttgagcccagcgctcgcatctcagcagctgctgcccttcgccaccctttcctggccaagtaccatgatcctgatgatgagcctgactgtgccccgccctttgactttgcctttgaccgcgaagccctcactcgggagcgcattaaggaggccattgtggctgaaattgaggacttccatgcaaggcgtgagggcatccgccaacagatccgcttccagccttctctacagcctgtggctagtgagcctggctgtccagatgttgaaatgcccagtccctgggctcccagtggggactgtgccatggagtctccaccaccagccccgccaccatgccccggccctgcacctgacaccattgatctgaccctgcagccacctccaccagtcagtgagcctgccccaccaaagaaagatggtgccatctcagacaatactaaggctgcccttaaagctgccctgctcaagtctttgaggagccggctcagagatggccccagcgcacccctggaggctcctgagcctcggaagccggtgacagcccaggagcgccagcgggagcgggaggagaagcggcggaggcggcaagaacgagccaaggagcgggagaaacggcggcaggagcgggagcgaaaggaacggggggctggggcctctgggggcccctccactgaccccttggctggactagtgctcagtgacaatgacagaagcctgttggaacgctggactcgaatggcccggcccgcagccccagccctcacctctgtgccggcccctgccccagcgccaacgccaaccccaaccccagtccaacctaccagtcctcctcctggccctgtagcccagcccactggcccgcaaccacaatctgcgggctctacctctggccctgtaccccagcctgcctgcccaccccctggccctgcaccccaccccactggccctcctgggcccatccctgtccccgcgccaccccagattgccacctccaccagcctcctggctgcccagtcacttgtgccaccccctgggctgcctggctccagcaccccaggagttttgccttacttcccacctggcctgccgcccccagacgccgggggagcccctcagtcttccatgtcagagtcacctgatgtcaaccttgtgacccagcagctatctaagtcacaggtggaggaccccctgccccctgtgttctcaggcacaccaaagggcagtggggctggctacggtgttggctttgacctggaggaattcttaaaccagtctttcgacatgggcgtggctgatgggccacaggatggccaggcagattcagcctctctctcagcctccctgcttgctgactggctcgaaggccatggcatgaaccctgccgatattgagtccctgcagcgtgagatccagatggactccccaatgctgctggctgacctgcctgacctccaggacccctgaggcccccagcctgtgccttgctgccacagtagacctagttccaggatccatgggagcattctcaaaggctttagccctggacccagcaggtgaggctcggcttggattattctgcaggttcatctcagacccacctttcagccttaagcagccacctgagccaccaccgagccatggcaggatcgggagaccccaactccccctgaacaatccttttcagtattatatttttattattattatgttattattacactgtctttttgccatcaaaatgaggcctgtgaaatacaaggttcccttctgcacctga

SEQ ID NO: 18489 - DNA, 850 bp, Homo sapiens
  source 1..850: mol_type = unassigned DNA
gcggggagcacacccctgcgaagtgccgggcaccctttgggcggctcccgccggcgagctggacagcggcgcgcgccaggcgtggctttctcggccggtgggctaggattggacgcagtagacaccatggccgagcctctgaaggaggaagacggcgaggacggctctgcggagccccccgggcccgtgaaggccgaacccgcccacaccgctgcctctgtagcggccaagaacctggccctgcttaaagcccgctccttcgatgtgacctttgacgtgggcgacgagtacgagatcatcgagaccataggcaacggggcctatggagtggtgtcctccgcccgccgccgcctcaccggccagcaggtggccatcaagaagatccctaatgctttcgatgtggtgaccaatgccaagcggaccctcagggagctgaagatcctcaagcactttaaacacgacaacatcatcgccatcaaggacatcctgaggcccaccgtgccctatggcgaattcaaatctgtctacgtggtcctggacctgatggaaagcgacctgcaccagatcatccactcctcacagcccctcacactggaacacgtgcgctacttcctgtaccaactgctgcggggcctgaagtacatgcactcggctcaggtcatccaccgtgacctgaagccctccaacctattggtgaatgagaactgtgagctcaagattggtgactttggtatggctcgtggcctgtgcacctcgcccgctgaacatcagtacttcatgactgagtatgtggccacgcgctggtaccgtgcgcccgagctcatgctctctttgcatgagtatacacagg

SEQ ID NO: 18490 - DNA, 3050 bp, Homo sapiens
  source 1..3050: mol_type = unassigned DNA
agtcccgcgggccgtgcgcggtgctgtgccgcgccctgccagacacaggtgcgcccgcctagcccgaactccgcggcggcggctgccctctcgccgcgcctccgcctccttcgcagccgccgcctcctccgcgccgcgctccgcccggatggccagggctgtgcccgagaatggcggagcgagaaagcggcggcctgggagggggggccgcgtccccgcccgccgcctccccgttcctggggctgcacatcgcttcgcctcccaatttcaggctcacccatgacatcagcctggaggagtttgaggatgaagacctctcggagatcactgatgagtgtggcatcagcttacagtgcaaagacaccctgtccttacggcccccgcgcgccgggctgctctctgcgggcggcggcggcgcggggagccggttgcaggccgagatgctgcagatggacctgatcgacgcgacgggggacactcccggggccgaggacgacgaggaggacgacgacgaggagcgcgcggcccggcggccgggagcggggccgcccaaggccgagtccggccaggagccggcgtcccgcggccagggccagagccaaggccagagccagggcccgggcagcggggacacgtaccggcccaagcggcccaccacgctcaacctctttccgcaggtgccgcggtctcaggacacactgaataataattctctgggcaaaaagcacagttggcaggatcgggtgtctcgatcatcctcacccctgaagacaggggagcagacaccaccgcatgaacacatctgcctgagcgatgagctgcccccccagagcggccccgcccccaccacagatcgaggcacctccaccgacagcccttgccgccgcagcacagccacccagatggcacctccgggtggtccccctgctgccccgcctgggggtcggggccactcgcatcgagaccgaatccactaccaggccgatgtgcgactagaggccactgaggagatctacctgaccccagtgcagaggcccccagacgctgcagagcccacctccgccttcctgccgcccactgagagccggatgtcagtcagctccgatccagaccctgccgcctacccctccacggcagggcggccgcacccctccatcagtgaagaggaagagggcttcgactgcctgtcgtccccagagcgggctgagcccccaggcggagggtggcgggggagcctgggggagccgccgccacctccacgggcctctctgagctcggacaccagcgccctgtcctatgactctgtcaagtacacgctggtggtagatgagcatgcacagctggagctggtgagcctgcggccgtgcttcggagactacagtgacgagagtgactctgccaccgtctatgacaactgtgcctccgtctcctcgccctatgagtcggccatcggagaggaatatgaggaggccccgcggccccagccccctgcctgcctctccgaggactccacgcctgatgaacccgacgtccatttctccaagaaattcctgaacgtcttcatgagtggccgctcccgctcctccagtgctgagtccttcgggctgttctcctgcatcatcaacggggaggagcaggagcagacccaccgggccatattcaggtttgtgcctcgacacgaagacgaacttgagctggaagtggatgaccctctgctagtggagctccaggctgaagactactggtacgaggcctacaacatgcgcactggtgcccggggtgtctttcctgcctattacgccatcgaggtcaccaaggagcccgagcacatggcagccctggccaaaaacagtgactgggtggaccagttccgggtgaagttcctgggctcagtccaggttccctatcacaagggcaatgacgtcctctgtgctgctatgcaaaagattgccaccacccgccggctcaccgtgcactttaacccgccctccagctgtgtcctggagatcagcgtgcggggtgtgaagataggcgtcaaggccgatgactcccaggaggccaaggggaataaatgtagccactttttccagttaaaaaacatctctttctgcggatatcatccaaagaacaacaagtactttgggttcatcaccaagcaccccgccgaccaccggtttgcctgccacgtctttgtgtctgaagactccaccaaagccctggcagagtccgtggggagagcattccagcagttctacaagcagtttgtggagtacacctgccccacagaagatatctacctggagtagctgtgcagccccgccctctgcgtcccccagccctcaggccagtgccaggacagctggctgctgacaggatgtggcactgcttgaggaggggcacctgccaccgccagaggacaaggaagtgggggccgctggcccagggtaggggagggtggggcaatggggagaggcaaatgcagtttattgtaatatatgggattagattcatctatggagggcagagtgggctgcctggggattgggagggacagggcttggggagcaggtctctggcagagaaggatgtccgttccaggagcacacggccctgccccatcctgggccttacctcccctgccagggctcgggcgctgtggctcctgccttgatgaagcccgtgtcctgccttgatgaagcctgtgccacctgcaagtgcccgccctgcccctgccccaacccccaccgaagagccctgagctcaggctgagcccagccacctcccaaggactttccagtgaggaaatggcaacacgtggaggtgaagtccctgttctcagctccgtcatctgcggggcttctgggtggctcctgccactgacctcaccggcatgctggcctgtggcaggcctaggacctcaggcggggaggaggagctgccgcaaggccctgtcccagcagaagagggaggcttcctgactgacacaggccagccccatcttggtcctgtcaccctggccccaactattaaagtgccatttcctgtctgga

SEQ ID NO: 18491 - DNA, 2566 bp, Homo sapiens
  source 1..2566: mol_type = unassigned DNA
atgctccccgatttcccttctcctagcacctgggcccctgggctactgctgccctctggcccagccctgctatctccctccgtcctgcaggacagcctctccctggggcgctcggagcagccgcaccccatctgctccttccaggatgacttccaggagtttgagatgatcgatgacaatgaagaggaggacgatgaggacgaggaagaggaggaggaggaggaggagggagatggggaaggccaggagggaggagaccctggctcagaggcacctgcccccgggccccttatcccctccccttccgtggaggagccccacaagcaccggcccaccaccctccgtctgaccacactgggggcccaggactcccaggaccccgaggcggccgcggggcccggcggcgtggagctggtggacatggagacgctcaaccccacgcgtgacaccatcacgccgctgtgggccgcgcccggccgcgccgcccgcccgggacgagcctgctccgccgcctgctccgaggaggaggacgaagaggacgacgaggaagaggaggatgccgaggacagtgcggggtcccccgggggcaggggcacgggcccctcggcgccgcgggacgcgtcgctggtgtacgacgcggtcaagtacacgctggtggtggatgagcacacgcagctggagctggtgagcctgcggcgctgtgctgggctgggccacgacagcgaagaggacagcggcggggaggccagcgaggaggaggcgggcgcggcgctgctaggcggcggtcaggtctcgggggacacctcgccggacagccctgacctcactttctccaagaagttcctcaatgtcttcgtcaacagcacatctcggtcctccagcaccgagtcctttggccttttctcctgtctggtcaacggcgaggagcgagagcagactcaccgggctgtgttcaggttcatcccgcggcatccagacgagctggagctggatgtggatgaccctgtgttggtggaggccgaggaggacgacttctggttccgtggcttcaacatgcgcacgggggagcgcggtgtgtttcctgccttctacgcccatgcggtgcccggccctgccaaggacctgctggggagtaagcggagcccctgctgggtggagcgctttgacgtgcagttcctgggctccgtggaggtgccctgccaccagggcaacggcatcctgtgtgcagccatgcagaagattgccactgcccggaaactgaccgtccacctgcgccctcctgcctcctgtgacctcgagatctctcttcggggggtcaagctgagtctgagcggaggagggcccgagttccagcgctgcagccatttcttccagatgaagaacatctccttctgcggctgccatccccgcaacagctgcgaggccccgcaaggagctgctttccagtgggagcgaggggtagaccggaagagggttttacagaccaggggtaacgtccagccccacctcggagctgggcaaggggctgccctgaatagggccacagagggtagcagcaccggctcagagaagggagagtggacgcccctggtcatcatggaattaactcagagcgtgaactcttgctatttcggcttcatcaccaaacaccccctgctgagccgcttcgcctgccacgtctttgtctcccaggagtccatgaggccggtggcgcagagtgtgggccgcgccttcctggagtactaccaagagcacctggcgtacgcctgccccacggaggacatctacctggagtagcctgcccaccgctctgtctcctggccgtctgctccaggcgcagctggggctgaggatgtctcaagaggccaccatggctttggcaaggactggattggggggacatgggaccttacgcttgtgggggtctgcgggctgggaactctcgtcctcggtccccagggcgcagctgttggggctgcgggggagtggagcccccgtgcccctgcttttcctcagatccgttctttctctgtgttgtcctcctccttcccttcccagtctcccttttctctctcctggtgtctctgcccctctctgtgcctgcaaaccttatcctctattcttcactttggggtcagaacttcgggggtgtggaggaggtgcggctctagggacaggtaatgtcggcttccaagtgatgccctcctgccactcccctgcgatttataagggaattttaatttttatagtgaatctcaagggatcatcccatccttgaccacagggacaagaggggccccctcgccccagccccaccccacatggagctcagggggaagcagggaggggttcccaaaagagccctgcggaggctaggagtggttcttgatgctcacctgaagcccctagacgctgctaggagggggggccctcctgggcccccaatacccctccgcttgccgctgctagcgcacccctgcagtccagcgtgcatccaccccacgcacgccccgtgctgtgttcctgggccctgcccatggcctcaataaactctctgcttggtgtg

SEQ ID NO: 18492 - DNA, 3358 bp, Homo sapiens
  source 1..3358: mol_type = unassigned DNA
cgcggggcggacgccgcagggcgtgtcacgaggtgagcggggcgggccgagcgccggcgcggggcgcggcgaggctcccgcaccccccgccgcagtcgcgggcctctcccggagaagatggcggatcgcgcggagatgttttctctctccaccttccactcgctgtcgccgccgggctgcaggcctccccaggacataagcctggaagaatttgacgacgaagatctgtctgagatcactgatgactgtggcctgggcctcagctacgactcagaccactgtgagaaggacagcctctccctggggcgctcggagcagccgcaccccatctgctccttccaggatgacttccaggagtttgagatgatcgatgacaatgaagaggaggacgatgaggacgaggaagaggaggaggaggaggaggagggagatggggaaggccaggagggaggagaccctggctcagaggcacctgcccccgggccccttatcccctccccttccgtggaggagccccacaagcaccggcccaccaccctccgtctgaccacactgggggcccaggactccctaaacaacaacggaggctttgacctggtgcgtccggcctcctggcaggagacagcgctatgctcacccgccccggaggccctcagagagctcccgggccccctccctgccacggacaccgggcccggcggggcgcagtcgccagtgcgcccgggttgcgactgcgaagggaaccggcctgcggaaccccctgcgccaggggggacttcgccctcctcagatcccggcatcgaggctgacctgagaagccgctcgagcggcggccgcgggggacgtcgcagcagccaggagctgtcctcgcccggctccgactcggaggacgcgggcggccgcctggggcgcatgatctcgtccatctcggagacggagctggagctgagcagcgatggcggaagcagcagcagcggccgctcctcgcacctcaccaactccatcgaggaggcctcgtcgcccgcctcggagccggagcccccgcgcgaacccccgcgccgccccgccttcctgcccgtgggccccgacgacaccaacagcgagtacgagtcggggtcggagtcggagccggacctcagcgaggacgcggactcgccctggctgctcagcaacctggtgagccgcatgatctccgagggctcctcgcccatccgctgccccggccagtgcctgtctcctgcgccgcgcccgcccggggagcccgtgtcgccggccggcggggccgcccaggactcccaggaccccgaggcggccgcggggcccggcggcgtggagctggtggacatggagacgctgtgcgcgccgccgccgcccgcgcccgccgcgcctcgacccggccccgcgcagcccgggccctgcctattcctcagcaaccccacgcgtgacaccatcacgccgctgtgggccgcgcccggccgcgccgcccgcccgggacgagcctgctccgccgcctgctccgaggaggaggacgaagaggacgacgaggaagaggaggatgccgaggacagtgcggggtcccccgggggcaggggcacgggcccctcggcgccgcgggacgcgtcgctggtgtacgacgcggtcaagtacacgctggtggtggatgagcacacgcagctggagctggtgagcctgcggcgctgtgctgggctgggccacgacagcgaagaggacagcggcggggaggccagcgaggaggaggcgggcgcggcgctgctaggcggcggtcaggtctcgggggacacctcgccggacagccctgacctcactttctccaagaagttcctcaatgtcttcgtcaacagcacatctcggtcctccagcaccgagtcctttggccttttctcctgtctggtcaacggcgaggagcgagagcagactcaccgggctgtgttcaggttcatcccgcggcatccagacgagctggagctggatgtggatgaccctgtgttggtggaggccgaggaggacgacttctggttccgtggcttcaacatgcgcacgggggagcgcggtgtgtttcctgccttctacgcccatgcggtgcccggccctgccaaggacctgctggggagtaagcggagcccctgctgggtggagcgctttgacgtgcagttcctgggctccgtggaggtgccctgccaccagggcaacggcatcctgtgtgcagccatgcagaagattgccactgcccggaaactgaccgtccacctgcgccctcctgcctcctgtgacctcgagatctctcttcggggggtcaagctgagtctgagcggaggagggcccgagttccagcgctgcagccatttcttccagatgaagaacatctccttctgcggctgccatccccgcaacagctgctatttcggcttcatcaccaaacaccccctgctgagccgcttcgcctgccacgtctttgtctcccaggagtccatgaggccggtggcgcagagtgtgggccgcgccttcctggagtactaccaagagcacctggcgtacgcctgccccacggaggacatctacctggagtagcctgcccaccgctctgtctcctggccgtctgctccaggcgcagctggggctgaggatgtctcaagaggccaccatggctttggcaaggactggattggggggacatgggaccttacgcttgtgggggtctgcgggctgggaactctcgtcctcggtccccagggcgcagctgttggggctgcgggggagtggagcccccgtgcccctgcttttcctcagatccgttctttctctgtgttgtcctcctccttcccttcccagtctcccttttctctctcctggtgtctctgcccctctctgtgcctgcaaaccttatcctctattcttcactttggggtcagaacttcgggggtgtggaggaggtgcggctctagggacaggtaatgtcggcttccaagtgatgccctcctgccactcccctgcgatttataagggaattttaatttttatagtgaatctcaagggatcatcccatccttgaccacagggacaagaggggccccctcgccccagccccaccccacatggagctcagggggaagcagggaggggttcccaaaagagccctgcggaggctaggagtggttcttgatgctcacctgaagcccctagacgctgctaggagggggggccctcctgggcccccaatacccctccgcttgccgctgctagcgcacccctgcagtccagcgtgcatccaccccacgcacgccccgtgctgtgttcctgggccctgcccatggcctcaataaactctctgcttggtgtg

SEQ ID NO: 18493 - DNA, 2221 bp, Homo sapiens
  source 1..2221: mol_type = unassigned DNA
cgcggggcggacgccgcagggcgtgtcacgaggtgagcggggcgggccgagcgccggcgcggggcgcggcgaggctcccgcaccccccgccgcagtcgcgggcctctcccggagaagatggcggatcgcgcggagatgttttctctctccaccttccactcgctgtcgccgccgggctgcaggcctccccaggacataagcctggaagaatttgacgacgaagatctgtctgagatcactgatgactgtggcctgggcctcagctacgactcagaccactgtgagaaggacagcctctccctggggcgctcggagcagccgcaccccatctgctccttccaggatgacttccaggagtttgagatgatcgatgacaatgaagaggaggaggacgaagaggacgacgaggaagaggaggatgccgaggacagtgcggggtcccccgggggcaggggcacgggcccctcggcgccgcgggacgcgtcgctggtgtacgacgcggtcaagtacacgctggtggtggatgagcacacgcagctggagctggtgagcctgcggcgctgtgctgggctgggccacgacagcgaagaggacagcggcggggaggccagcgaggaggaggcgggcgcggcgctgctaggcggcggtcaggtctcgggggacacctcgccggacagccctgacctcactttctccaagaagttcctcaatgtcttcgtcaacagcacatctcggtcctccagcaccgagtcctttggccttttctcctgtctggtcaacggcgaggagcgagagcagactcaccgggctgtgttcaggttcatcccgcggcatccagacgagctggagctggatgtggatgaccctgtgttggtggaggccgaggaggacgacttctggttccgtggcttcaacatgcgcacgggggagcgcggtgtgtttcctgccttctacgcccatgcggtgcccggccctgccaaggacctgctggggagtaagcggagcccctgctgggtggagcgctttgacgtgcagttcctgggctccgtggaggtgccctgccaccagggcaacggcatcctgtgtgcagccatgcagaagattgccactgcccggaaactgaccgtccacctgcgccctcctgcctcctgtgacctcgagatctctcttcggggggtcaagctgagtctgagcggaggagggcccgagttccagcgctgcagccatttcttccagatgaagaacatctccttctgcggctgccatccccgcaacagctgctatttcggcttcatcaccaaacaccccctgctgagccgcttcgcctgccacgtctttgtctcccaggagtccatgaggccggtggcgcagagtgtgggccgcgccttcctggagtactaccaagagcacctggcgtacgcctgccccacggaggacatctacctggagtagcctgcccaccgctctgtctcctggccgtctgctccaggcgcagctggggctgaggatgtctcaagaggccaccatggctttggcaaggactggattggggggacatgggaccttacgcttgtgggggtctgcgggctgggaactctcgtcctcggtccccagggcgcagctgttggggctgcgggggagtggagcccccgtgcccctgcttttcctcagatccgttctttctctgtgttgtcctcctccttcccttcccagtctcccttttctctctcctggtgtctctgcccctctctgtgcctgcaaaccttatcctctattcttcactttggggtcagaacttcgggggtgtggaggaggtgcggctctagggacaggtaatgtcggcttccaagtgatgccctcctgccactcccctgcgatttataagggaattttaatttttatagtgaatctcaagggatcatcccatccttgaccacagggacaagaggggccccctcgccccagccccaccccacatggagctcagggggaagcagggaggggttcccaaaagagccctgcggaggctaggagtggttcttgatgctcacctgaagcccctagacgctgctaggagggggggccctcctgggcccccaatacccctccgcttgccgctgctagcgcacccctgcagtccagcgtgcatccaccccacgcacgccccgtgctgtgttcctgggccctgcccatggcctcaataaactctctgcttggtgtg

SEQ ID NO: 18494 - DNA, 3163 bp, Homo sapiens
  source 1..3163: mol_type = unassigned DNA
atgctccccgatttcccttctcctagcacctgggcccctgggctactgctgccctctggcccagccctgctatctccctccgtcctgcaggacagcctctccctggggcgctcggagcagccgcaccccatctgctccttccaggatgacttccaggagtttgagatgatcgatgacaatgaagaggaggacgatgaggacgaggaagaggaggaggaggaggaggagggagatggggaaggccaggagggaggagaccctggctcagaggcacctgcccccgggccccttatcccctccccttccgtggaggagccccacaagcaccggcccaccaccctccgtctgaccacactgggggcccaggactccctaaacaacaacggaggctttgacctggtgcgtccggcctcctggcaggagacagcgctatgctcacccgccccggaggccctcagagagctcccgggccccctccctgccacggacaccgggcccggcggggcgcagtcgccagtgcgcccgggttgcgactgcgaagggaaccggcctgcggaaccccctgcgccaggggggacttcgccctcctcagatcccggcatcgaggctgacctgagaagccgctcgagcggcggccgcgggggacgtcgcagcagccaggagctgtcctcgcccggctccgactcggaggacgcgggcggcgccgcctggggcgcatgatctcgtccatctcggagacggagctggagctgagcagcgatggcggaagcagcagcagcggccgctcctcgcacctcaccaactccatcgaggaggcctcgtcgcccgcctcggagccggagcccccgcgcgaacccccgcgccgccccgccttcctgcccgtgggccccgacgacaccaacagcgagtacgagtcggggtcggagtcggagccggacctcagcgaggacgcggactcgccctggctgctcagcaacctggtgagccgcatgatctccgagggctcctcgcccatccgctgccccggccagtgcctgtctcctgcgccgcgcccgcccggggagcccgtgtcgccggccggcggggccgcccaggactcccaggaccccgaggcggccgcggggcccggcggcgtggagctggtggacatggagacgctgtgcgcgccgccgccgcccgcgcccgccgcgcctcgacccggccccgcgcagcccgggccctgcctattcctcagcaaccccacgcgtgacaccatcacgccgctgtgggccgcgcccggccgcgccgcccgcccgggacgagcctgctccgccgcctgctccgaggaggaggacgaagaggacgacgaggaagaggaggatgccgaggacagtgcggggtcccccgggggcaggggcacgggcccctcggcgccgcgggacgcgtcgctggtgtacgacgcggtcaagtacacgctggtggtggatgagcacacgcagctggagctggtgagcctgcggcgctgtgctgggctgggccacgacagcgaagaggacagcggcggggaggccagcgaggaggaggcgggcgcggcgctgctaggcggcggtcaggtctcgggggacacctcgccggacagccctgacctcactttctccaagaagttcctcaatgtcttcgtcaacagcacatctcggtcctccagcaccgagtcctttggccttttctcctgtctggtcaacggcgaggagcgagagcagactcaccgggctgtgttcaggttcatcccgcggcatccagacgagctggagctggatgtggatgaccctgtgttggtggaggccgaggaggacgacttctggttccgtggcttcaacatgcgcacgggggagcgcggtgtgtttcctgccttctacgcccatgcggtgcccggccctgccaaggacctgctggggagtaagcggagcccctgctgggtggagcgctttgacgtgcagttcctgggctccgtggaggtgccctgccaccagggcaacggcatcctgtgtgcagccatgcagaagattgccactgcccggaaactgaccgtccacctgcgccctcctgcctcctgtgacctcgagatctctcttcggggggtcaagctgagtctgagcggaggagggcccgagttccagcgctgcagccatttcttccagatgaagaacatctccttctgcggctgccatccccgcaacagctgctatttcggcttcatcaccaaacaccccctgctgagccgcttcgcctgccacgtctttgtctcccaggagtccatgaggccggtggcgcagagtgtgggccgcgccttcctggagtactaccaagagcacctggcgtacgcctgccccacggaggacatctacctggagtagcctgcccaccgctctgtctcctggccgtctgctccaggcgcagctggggctgaggatgtctcaagaggccaccatggctttggcaaggactggattggggggacatgggaccttacgcttgtgggggtctgcgggctgggaactctcgtcctcggtccccagggcgcagctgttggggctgcgggggagtggagcccccgtgcccctgcttttcctcagatccgttctttctctgtgttgtcctcctccttcccttcccagtctcccttttctctctcctggtgtctctgcccctctctgtgcctgcaaaccttatcctctattcttcactttggggtcagaacttcgggggtgtggaggaggtgcggctctagggacaggtaatgtcggcttccaagtgatgccctcctgccactcccctgcgatttataagggaattttaatttttatagtgaatctcaagggatcatcccatccttgaccacagggacaagaggggccccctcgccccagccccaccccacatggagctcagggggaagcagggaggggttcccaaaagagccctgcggaggctaggagtggttcttgatgctcacctgaagcccctagacgctgctaggagggggggccctcctgggcccccaatacccctccgcttgccgctgctagcgcacccctgcagtccagcgtgcatccaccccacgcacgccccgtgctgtgttcctgggccctgcccatggcctcaataaactctctgcttggtgtga

SEQ ID NO: 18495 - DNA, 3380 bp, Homo sapiens
  source 1..3380: mol_type = unassigned DNA
ggagtccgggcgaggtgcgcggggcggacgccgcagggcgtgtcacgaggtgagcggggcgggccgagcgccggcgcggggcgcggcgaggctcccgcaccccccgccgcagtcgcgggcctctcccggagaagatggcggatcgcgcggagatgttttctctctccaccttccactcgctgtcgccgccgggctgcaggcctccccaggacataagcctggaagaatttgacgacgaagatctgtctgagatcactgatgactgtggcctgggcctcagctacgactcagaccactgtgagaaggacagcctctccctggggcgctcggagcagccgcaccccatctgctccttccaggatgacttccaggagtttgagatgatcgatgacaatgaagaggaggacgatgaggacgaggaagaggaggaggaggaggaggagggagatggggaaggccaggagggaggagaccctggctcagaggcacctgcccccgggccccttatcccctccccttccgtggaggagccccacaagcaccggcccaccaccctccgtctgaccacactgggggcccaggactccctaaacaacaacggaggctttgacctggtgcgtccggcctcctggcaggagacagcgctatgctcacccgccccggaggccctcagagagctcccgggccccctccctgccacggacaccgggcccggcggggcgcagtcgccagtgcgcccgggttgcgactgcgaagggaaccggcctgcggaaccccctgcgccaggggggacttcgccctcctcagatcccggcatcgaggctgacctgagaagccgctcgagcggcggccgcgggggacgtcgcagcagccaggagctgtcctcgcccggctccgactcggaggacgcgggcggcgccgcctggggcgcatgatctcgtccatctcggagacggagctggagctgagcagcgatggcggaagcagcagcagcggccgctcctcgcacctcaccaactccatcgaggaggcctcgtcgcccgcctcggagccggagcccccgcgcgaacccccgcgccgccccgccttcctgcccgtgggccccgacgacaccaacagcgagtacgagtcggggtcggagtcggagccggacctcagcgaggacgcggactcgccctggctgctcagcaacctggtgagccgcatgatctccgagggctcctcgcccatccgctgccccggccagtgcctgtctcctgcgccgcgcccgcccggggagcccgtgtcgccggccggcggggccgcccaggactcccaggaccccgaggcggccgcggggcccggcggcgtggagctggtggacatggagacgctgtgcgcgccgccgccgcccgcgcccgccgcgcctcgacccggccccgcgcagcccgggccctgcctattcctcagcaaccccacgcgtgacaccatcacgccgctgtgggccgcgcccggccgcgccgcccgcccgggacgagcctgctccgccgcctgctccgaggaggaggacgaagaggacgacgaggaagaggaggatgccgaggacagtgcggggtcccccgggggcaggggcacgggcccctcggcgccgcgggacgcgtcgctggtgtacgacgcggtcaagtacacgctggtggtggatgagcacacgcagctggagctggtgagcctgcggcgctgtgctgggctgggccacgacagcgaagaggacagcggcggggaggccagcgaggaggaggcgggcgcggcgctgctaggcggcggtcaggtctcgggggacacctcgccggacagccctgacctcactttctccaagaagttcctcaatgtcttcgtcaacagcacatctcggtcctccagcaccgagtcctttggccttttctcctgtctggtcaacggcgaggagcgagagcagactcaccgggctgtgttcaggttcatcccgcggcatccagacgagctggagctggatgtggatgaccctgtgttggtggaggccgaggaggacgacttctggttccgtggcttcaacatgcgcacgggggagcgcggtgtgtttcctgccttctacgcccatgcggtgcccggccctgccaaggacctgctggggagtaagcggagcccctgctgggtggagcgctttgacgtgcagttcctgggctccgtggaggtgccctgccaccagggcaacggcatcctgtgtgcagccatgcagaagattgccactgcccggaaactgaccgtccacctgcgccctcctgcctcctgtgacctcgagatctctcttcggggggtcaagctgagtctgagcggaggagggcccgagttccagcgctgcagccatttcttccagatgaagaacatctccttctgcggctgccatccccgcaacagctgctatttcggcttcatcaccaaacaccccctgctgagccgcttcgcctgccacgtctttgtctcccaggagtccatgaggccggtggcgcagagtgtgggccgcgccttcctggagtactaccaagagcacctggcgtacgcctgccccacggaggacatctacctggagtagcctgcccaccgctctgtctcctggccgtctgctccaggcgcagctggggctgaggatgtctcaagaggccaccatggctttggcaaggactggattggggggacatgggaccttacgcttgtgggggtctgcgggctgggaactctcgtcctcggtccccagggcgcagctgttggggctgcgggggagtggagcccccgtgcccctgcttttcctcagatccgttctttctctgtgttgtcctcctccttcccttcccagtctcccttttctctctcctggtgtctctgcccctctctgtgcctgcaaaccttatcctctattcttcactttggggtcagaacttcgggggtgtggaggaggtgcggctctagggacaggtaatgtcggcttccaagtgatgccctcctgccactcccctgcgatttataagggaattttaatttttatagtgaatctcaagggatcatcccatccttgaccacagggacaagaggggccccctcgccccagccccaccccacatggagctcagggggaagcagggaggggttcccaaaagagccctgcggaggctaggagtggttcttgatgctcacctgaagcccctagacgctgctaggagggggggccctcctgggcccccaatacccctccgcttgccgctgctagcgcacccctgcagtccagcgtgcatccaccccacgcacgccccgtgctgtgttcctgggccctgcccatggcctcaataaactctctgcttggtgtgaca

SEQ ID NO: 18496 - DNA, 2527 bp, Homo sapiens
  source 1..2527: mol_type = unassigned DNA
cgcggggcggacgccgcagggcgtgtcacgaggtgagcggggcgggccgagcgccggcgcggggcgcggcgaggctcccgcaccccccgccgcagtcgcgggcctctcccggagaagatggcggatcgcgcggagatgttttctctctccaccttccactcgctgtcgccgccgggctgcaggcctccccaggacataagcctggaagaatttgacgacgaagatctgtctgagatcactgatgactgtggcctgggcctcagctacgactcagaccactgtgagaaggacagcctctccctggggcgctcggagcagccgcaccccatctgctccttccaggatgacttccaggagtttgagatgatcgatgacaatgaagaggaggacgatgaggacgaggaagaggaggaggaggaggaggagggagatggggaaggccaggagggaggagaccctggctcagaggcacctgcccccgggccccttatcccctccccttccgtggaggagccccacaagcaccggcccaccaccctccgtctgaccacactgggggcccaggactccctaaacaacaacggaggctttgacctggtgcgtccggcctcctggcaggagacagcgctatgctcacccgccccggaggccctcagagagctcccgggccccctccctgccacggacaccgggcccggcggggcgcagtcgccagtgcgcccgggttgcgactgcgaagggaaccggcctgcggaaccccctgcgccaggggggacttcgccctcctcagatcccggcatcgaggctgacctgagaagccgctcgagcggcggccgcgggggacgtcgcagcagccaggagctgtcctcgcccggctccgactcggaggacgcgggcggccgcctggggcgcatgatctcgtccatctcggagacggagctggagctgagcagcgatggcggaagcagcagcagcggccgctcctcgcacctcactttctccaagaagttcctcaatgtcttcgtcaacagcacatctcggtcctccagcaccgagtcctttggccttttctcctgtctggtcaacggcgaggagcgagagcagactcaccgggctgtgttcaggttcatcccgcggcatccagacgagctggagctggatgtggatgaccctgtgttggtggaggccgaggaggacgacttctggttccgtggcttcaacatgcgcacgggggagcgcggtgtgtttcctgccttctacgcccatgcggtgcccggccctgccaaggacctgctggggagtaagcggagcccctgctgggtggagcgctttgacgtgcagttcctgggctccgtggaggtgccctgccaccagggcaacggcatcctgtgtgcagccatgcagaagattgccactgcccggaaactgaccgtccacctgcgccctcctgcctcctgtgacctcgagatctctcttcggggggtcaagctgagtctgagcggaggagggcccgagttccagcgctgcagccatttcttccagatgaagaacatctccttctgcggctgccatccccgcaacagctgctatttcggcttcatcaccaaacaccccctgctgagccgcttcgcctgccacgtctttgtctcccaggagtccatgaggccggtggcgcagagtgtgggccgcgccttcctggagtactaccaagagcacctggcgtacgcctgccccacggaggacatctacctggagtagcctgcccaccgctctgtctcctggccgtctgctccaggcgcagctggggctgaggatgtctcaagaggccaccatggctttggcaaggactggattggggggacatgggaccttacgcttgtgggggtctgcgggctgggaactctcgtcctcggtccccagggcgcagctgttggggctgcgggggagtggagcccccgtgcccctgcttttcctcagatccgttctttctctgtgttgtcctcctccttcccttcccagtctcccttttctctctcctggtgtctctgcccctctctgtgcctgcaaaccttatcctctattcttcactttggggtcagaacttcgggggtgtggaggaggtgcggctctagggacaggtaatgtcggcttccaagtgatgccctcctgccactcccctgcgatttataagggaattttaatttttatagtgaatctcaagggatcatcccatccttgaccacagggacaagaggggccccctcgccccagccccaccccacatggagctcagggggaagcagggaggggttcccaaaagagccctgcggaggctaggagtggttcttgatgctcacctgaagcccctagacgctgctaggagggggggccctcctgggcccccaatacccctccgcttgccgctgctagcgcacccctgcagtccagcgtgcatccaccccacgcacgccccgtgctgtgttcctgggccctgcccatggcctcaataaactctctgcttggtgtg

SEQ ID NO: 18497 - DNA, 4369 bp, Homo sapiens
  source 1..4369: mol_type = unassigned DNA
ggcgcgagggtctgtcagaccgggcgccgcggcggcggcagcggcggagaagggagcgggaccggaagggtcgcagcgccccggcgcccctcacacccactgcggcggcggcggcggcggcggcggcggggcggagcggagcggggcgggccggcggcggagccggggccgcggagccaggagtgactagcacgcagcgccgccagtccgcccgcccgccctctccccgtggcgcggcggcggggaggcgagggatctgaaacttgcccacccttcgggatattgcaggacgctgcatcatgagcgacagtaaatgtgacagtcagttttatagtgtgcaagtggcagactcaaccttcactgtcctaaaacgttaccagcagctgaaaccaattggctctggggcccaagggattgtttgtgctgcatttgatacagttcttgggataaatgttgcagtcaagaaactaagccgtccttttcagaaccaaactcatgcaaagagagcttatcgtgaacttgtcctcttaaaatgtgtcaatcataaaaatataattagtttgttaaatgtgtttacaccacaaaaaactctagaagaatttcaagatgtgtatttggttatggaattaatggatgctaacttatgtcaggttattcacatggagctggatcatgaaagaatgtcctaccttctttaccagatgctttgtggtattaaacatctgcattcagctggtataattcatagagatttgaagcctagcaacattgttgtgaaatcagactgcaccctgaagatccttgactttggcctggcccggacagcgtgcactaacttcatgatgaccccttacgtggtgacacggtactaccgggcgcccgaagtcatcctgggtatgggctacaaagagaacgtggacatctggtctgtcgggtgcatcatggcagaaatggtcctccataaagtcctgttcccgggaagagactatattgatcagtggaataaagttattgagcagctgggaacaccatcagcagagttcatgaagaaacttcagccaactgtgaggaattatgtcgaaaacagaccaaagtatcctggaatcaaatttgaagaactctttccagattggatattcccatcagaatctgagcgagacaaaataaaaacaagtcaagccagagatctgttatcaaaaatgttagtgattgatcctgacaagcggatctctgtagacgaagctctgcgtcacccatacatcactgtttggtatgaccccgccgaagcagaagccccaccacctcaaatttatgatgcccagttggaagaaagagaacatgcaattgaagaatggaaagagctaatttacaaagaagtcatggattgggaagaaagaagcaagaatggtgttgtaaaagatcagccttcagcacagatgcagcagtaagtagcaacgccactccttctcagtcttcatcgatcaatgacatttcatccatgtccactgagcagacgctggcctcagacacagacagcagtcttgatgcctcgacgggaccccttgaaggctgtcgatgataggttagaaatagcaaacctgtcagcattgaaggaactctcacctccgtgggcctgaaatgcttgggagttgatggaaccaaatagaaaaactccatgttctgcatgtaagaaacacaatgccttgccctactcagacctgataggattgcctgcttagatgataaaatgaggcagaatatgtctgaagaaaaaaattgcaagccacacttctagagattttgttcaagatcatttcaggtgagcagttagagtaggtgaatttgtttcaaattgtactagtgacagtttctcatcatctgtaactgttgagatgtatgtgcatgtgaccacaaatgcttgcttggacttgcccatctagcactttggaaatcagtatttaaatgccaaataatcttccaggtagtgctgcttctgaagttatctcttaatcctcttaagtaatttggtgtctgtccagaaaaagtcgatttatgtgtattaattggccatcatgatgttatcatatcttattcccttttatgctatgatttattctatcttttgtatttcagaagacatataattaaatctatttaataaataaaaatatatagcttttcttagatttgtgatgtttggggctgagaattatcacggctaaaaccaagacacttatgtggacatcttgttttctttaaactgtcttgtctgggatgattgtacattcagctttactgcacgatacaattttaagttttgcttagtgctgcttgaaatcctagctaccttatctcttttcttcttggtcttctagacttcttatgaatttaaaatgctacctagaacttcaccttctttattaggtgcgtaacactccatcttaattaaatatgatggcagataggttcctgcatccatggcctaacgttggagtggaattttacaaaatgctcactagagatcactgcagtcatttcctaagtgcttcctttgccacagactggcctgggtcctttatttaccttccctcattcactttccctcggccaataccacgttcttgattttctttcttcactggaagaaagcagataaactcctctttggtctgttttcagaggccaggctgattcagatgcctgttgctattgttgctctccattgttgggaggcattccttttcacaagaatgttctgggaaactcttcagaggacgtgaaggaaataccctgaagagtcatgattaactattgactattttctgatttaaaactgctcacctgaaattgatacttttagactttacgatcagtaaattattcagaattcatgaagatgctgagtatgttaagtgtcactgcaggaacggagctgtggtgatcacgttttgcctgcctgtgcccatgtctcttcccttgagcttattctgttgctgattcatatcttgtgttcaattattttggaagcttttcagtcgacattctgtagagtgtgttctgaggaggaactgtgataagaaagtttattataaatattatgtaaaatatatggctctctctgcaccagttatatcttattggttggtcatatcactggaaactggaacctttgattagcaaaattaatattgaaataagaaatagttcttttatattgtgtcatttggacactttcaagtacaaaatggtaataataacttggattgaggcggaaacacctattttatggctatctatctaaacatcttaaaatggccttctctgtaatacactttcttttaaaagacttcactaaatctatctttaaaaggaaaaacaaaagggagaggttgaaaatgcgcgagctgccctgcactgtgtgatgctccctccccgggagacgtggacgggggacgaggcacccgcagacgcccttctgctcactcgctcctctgtgcattcagcgagccacttgccacagatggagcccgtgacggtgtggagggtttcctggaaaggccatcttccaccaggtagaggcgagcgtgcctaggacaggccacagggctccacagaaatacctcaccccagcttcagggttctctctcctgagcctagatttgccagggtcttggtgccacgcaaatggtttcaaactgatctctatggataaatgctgatgttggttaaagaactgaaaaatgtgctcaactgtttcatcttttctattttatttttgtaatttatattgtacacaacccaggaagtaactattttggacatgtatttttataaaccaggtaatttactattatcctggaatttagactaggtttgtttcatttgttgacttagtttccagccaagaaggaaacgactgtctcccccatgtccaggtctcagtttcaagggcagagtccagagagcagacagagttctgtgagagcaggagagcagtctggaaaccctggctgtgcataccgtgtcagccgtgggcctggagatgggagcaggtgagacgcagagccccagtactgagaggaggaagccctcttacagggccccttgcccaccccaagtccgtgtctgaaacacggagcgggtgctgcttcaacccgcatttaatgctgtgtaagtagcgataaccacgtacgagtctgtctggttgatttctaatgtgactcctctggtatttcctcctggtaataaatacaagtgtgacctttcagattgcatatctcaaaagtaacattgctaatgttttataataaaatatattatgtgtgttttggttggtgaaaataatacagactacattttaaaagataaa

SEQ ID NO: 18498 - DNA, 4326 bp, Homo sapiens
  source 1..4326: mol_type = unassigned DNA
gcggagaagggagcgggaccggaagggtcgcagcgccccggcgcccctcacacccactgcggcggcggcggcggcggcggcggcggggcggagcggagcggggcgggccggcggcggagccggggccgcggagccaggagtgactagcacgcagcgccgccagtccgcccgcccgccctctccccgtggcgcggcggcggggaggcgagggatctgaaacttgcccacccttcgggatattgcaggacgctgcatcatgagcgacagtaaatgtgacagtcagttttatagtgtgcaagtggcagactcaaccttcactgtcctaaaacgttaccagcagctgaaaccaattggctctggggcccaagggattgtttgtgctgcatttgatacagttcttgggataaatgttgcagtcaagaaactaagccgtccttttcagaaccaaactcatgcaaagagagcttatcgtgaacttgtcctcttaaaatgtgtcaatcataaaaatataattagtttgttaaatgtgtttacaccacaaaaaactctagaagaatttcaagatgtgtatttggttatggaattaatggatgctaacttatgtcaggttattcacatggagctggatcatgaaagaatgtcctaccttctttaccagatgctttgtggtattaaacatctgcattcagctggtataattcatagagatttgaagcctagcaacattgttgtgaaatcagactgcaccctgaagatccttgactttggcctggcccggacagcgtgcactaacttcatgatgaccccttacgtggtgacacggtactaccgggcgcccgaagtcatcctgggtatgggctacaaagagaacgttgatatctggtcagtgggttgcatcatgggagagctggtgaaaggttgtgtgatattccaaggcactgaccatattgatcagtggaataaagttattgagcagctgggaacaccatcagcagagttcatgaagaaacttcagccaactgtgaggaattatgtcgaaaacagaccaaagtatcctggaatcaaatttgaagaactctttccagattggatattcccatcagaatctgagcgagacaaaataaaaacaagtcaagccagagatctgttatcaaaaatgttagtgattgatcctgacaagcggatctctgtagacgaagctctgcgtcacccatacatcactgtttggtatgaccccgccgaagcagaagccccaccacctcaaatttatgatgcccagttggaagaaagagaacatgcaattgaagaatggaaagagctaatttacaaagaagtcatggattgggaagaaagaagcaagaatggtgttgtaaaagatcagccttcagcacagatgcagcagtaagtagcaacgccactccttctcagtcttcatcgatcaatgacatttcatccatgtccactgagcagacgctggcctcagacacagacagcagtcttgatgcctcgacgggaccccttgaaggctgtcgatgataggttagaaatagcaaacctgtcagcattgaaggaactctcacctccgtgggcctgaaatgcttgggagttgatggaaccaaatagaaaaactccatgttctgcatgtaagaaacacaatgccttgccctactcagacctgataggattgcctgcttagatgataaaatgaggcagaatatgtctgaagaaaaaaattgcaagccacacttctagagattttgttcaagatcatttcaggtgagcagttagagtaggtgaatttgtttcaaattgtactagtgacagtttctcatcatctgtaactgttgagatgtatgtgcatgtgaccacaaatgcttgcttggacttgcccatctagcactttggaaatcagtatttaaatgccaaataatcttccaggtagtgctgcttctgaagttatctcttaatcctcttaagtaatttggtgtctgtccagaaaaagtcgatttatgtgtattaattggccatcatgatgttatcatatcttattcccttttatgctatgatttattctatcttttgtatttcagaagacatataattaaatctatttaataaataaaaatatatagcttttcttagatttgtgatgtttggggctgagaattatcacggctaaaaccaagacacttatgtggacatcttgttttctttaaactgtcttgtctgggatgattgtacattcagctttactgcacgatacaattttaagttttgcttagtgctgcttgaaatcctagctaccttatctcttttcttcttggtcttctagacttcttatgaatttaaaatgctacctagaacttcaccttctttattaggtgcgtaacactccatcttaattaaatatgatggcagataggttcctgcatccatggcctaacgttggagtggaattttacaaaatgctcactagagatcactgcagtcatttcctaagtgcttcctttgccacagactggcctgggtcctttatttaccttccctcattcactttccctcggccaataccacgttcttgattttctttcttcactggaagaaagcagataaactcctctttggtctgttttcagaggccaggctgattcagatgcctgttgctattgttgctctccattgttgggaggcattccttttcacaagaatgttctgggaaactcttcagaggacgtgaaggaaataccctgaagagtcatgattaactattgactattttctgatttaaaactgctcacctgaaattgatacttttagactttacgatcagtaaattattcagaattcatgaagatgctgagtatgttaagtgtcactgcaggaacggagctgtggtgatcacgttttgcctgcctgtgcccatgtctcttcccttgagcttattctgttgctgattcatatcttgtgttcaattattttggaagcttttcagtcgacattctgtagagtgtgttctgaggaggaactgtgataagaaagtttattataaatattatgtaaaatatatggctctctctgcaccagttatatcttattggttggtcatatcactggaaactggaacctttgattagcaaaattaatattgaaataagaaatagttcttttatattgtgtcatttggacactttcaagtacaaaatggtaataataacttggattgaggcggaaacacctattttatggctatctatctaaacatcttaaaatggccttctctgtaatacactttcttttaaaagacttcactaaatctatctttaaaaggaaaaacaaaagggagaggttgaaaatgcgcgagctgccctgcactgtgtgatgctccctccccgggagacgtggacgggggacgaggcacccgcagacgcccttctgctcactcgctcctctgtgcattcagcgagccacttgccacagatggagcccgtgacggtgtggagggtttcctggaaaggccatcttccaccaggtagaggcgagcgtgcctaggacaggccacagggctccacagaaatacctcaccccagcttcagggttctctctcctgagcctagatttgccagggtcttggtgccacgcaaatggtttcaaactgatctctatggataaatgctgatgttggttaaagaactgaaaaatgtgctcaactgtttcatcttttctattttatttttgtaatttatattgtacacaacccaggaagtaactattttggacatgtatttttataaaccaggtaatttactattatcctggaatttagactaggtttgtttcatttgttgacttagtttccagccaagaaggaaacgactgtctcccccatgtccaggtctcagtttcaagggcagagtccagagagcagacagagttctgtgagagcaggagagcagtctggaaaccctggctgtgcataccgtgtcagccgtgggcctggagatgggagcaggtgagacgcagagccccagtactgagaggaggaagccctcttacagggccccttgcccaccccaagtccgtgtctgaaacacggagcgggtgctgcttcaacccgcatttaatgctgtgtaagtagcgataaccacgtacgagtctgtctggttgatttctaatgtgactcctctggtatttcctcctggtaataaatacaagtgtgacctttcagattgcatatctcaaaagtaacattgctaatgttttataataaaatatattatgtgtgttttggttggtgaaaataatacagactacattttaaaagataaa

SEQ ID NO: 18499 - DNA, 1416 bp, Homo sapiens
  source 1..1416: mol_type = unassigned DNA
atattgcaggacgctgcatcatgagcgacagtaaatgtgacagtcagttttatagtgtgcaagtggcagactcaaccttcactgtcctaaaacgttaccagcagctgaaaccaattggctctggggcccaagggattgtttggcgccatcattgcagtgccttgccattcattggcaggatgaggccagtcagtgtcattgtcactccatggattaaccaggaagggatgctgtgtgaggggttgggctggccatctcttccttggtgtctcacttcaactgtgtgtccagcccagaacgtcagaatcgttagtctgaccctgaacgttagtctcttgcatggtaagacggtcagccgccgcagcatcacgggccagctcaagtgctgcatttgatacagttcttgggataaatgttgcagtcaagaaactaagccgtccttttcagaaccaaactcatgcaaagagagcttatcgtgaacttgtcctcttaaaatgtgtcaatcataaaaatataattagtttgttaaatgtgtttacaccacaaaaaactctagaagaatttcaagatgtgtatttggttatggaattaatggatgctaacttatgtcaggttattcacatggagctggatcatgaaagaatgtcctaccttctttaccagatgctttgtggtattaaacatctgcattcagctggtataattcatagagatttgaagcctagcaacattgttgtgaaatcagactgcaccctgaagatccttgactttggcctggcccggacagcgtgcactaacttcatgatgaccccttacgtggtgacacggtactaccgggcgcccgaagtcatcctgggtatgggctacaaagagaacgttgatatctggtcagtgggttgcatcatgggagagctggtgaaaggttgtgtgatattccaaggcactgaccatattgatcagtggaataaagttattgagcagctgggaacaccatcagcagagttcatgaagaaacttcagccaactgtgaggaattatgtcgaaaacagaccaaagtatcctggaatcaaatttgaagaactctttccagattggatattcccatcagaatctgagcgagacaaaataaaaacaagtcaagccagagatctgttatcaaaaatgttagtgattgatcctgacaagcggatctctgtagacgaagctctgcgtcacccatacatcactgtttggtatgaccccgccgaagcagaagccccaccacctcaaatttatgatgcccagttggaagaaagagaacatgcaattgaagaatggaaagagctaatttacaaagaagtcatggattgggaagaaagaagcaagaatggtgttgtaaaagatcagccttcaggttagtgattgctttaattgatt

SEQ ID NO: 18500 - DNA, 2266 bp, Homo sapiens
  source 1..2266: mol_type = unassigned DNA
ggagcggagcggggcgggccggcggcggagccggggccgcggagccaggagtgactagcacgcagcgccgccagtccgcccgcccgccctctccccgtggcgcggcggcggggaggcgagggatctgaaacttgcccacccttcgggatattgcaggacgctgcatcatgagcgacagtaaatgtgacagtcagttttatagtgtgcaagtggcagactcaaccttcactgtcctaaaacgttaccagcagctgaaaccaattggctctggggcccaagggattgtttgtgctgcatttgatacagttcttgggataaatgttgcagtcaagaaactaagccgtccttttcagaaccaaactcatgcaaagagagcttatcgtgaacttgtcctcttaaaatgtgtcaatcataaaaatataattagtttgttaaatgtgtttacaccacaaaaaactctagaagaatttcaagatgtgtatttggttatggaattaatggatgctaacttatgtcaggttattcacatggagctggatcatgaaagaatgtcctaccttctttaccagatgctttgtggtattaaacatctgcattcagctggtataattcatagagatttgaagcctagcaacattgttgtgaaatcagactgcaccctgaagatccttgactttggcctggcccggacagcgtgcactaacttcatgatgaccccttacgtggtgacacggtactaccgggcgcccgaagtcatcctgggtatgggctacaaagagaacgttgatatctggtcagtgggttgcatcatgggagagctggtgaaaggttgtgtgatattccaaggcactgaccgtatccttccccgcgaccttggccccgccatgctttcttaatgcctcaggcagcatgaccacctgcttacacgagcgctcacgaggacaaagtcgtaaaatccactccagactgtgttctaaggggggctttactgtatttgttaattagtgtcacaagccaagtggttcaatttcattctttatttttaacttgactacctgtgatgactttgagacttagagttcagttaaaccgattatattagctcttaattttgccaaaaatagctggacacatagaagaaattatttactctttgataagtatattctgatatttaaatgaaaatactgtattatttagtttattccgttaatttaactaggaaagatgctatctaaatttaataggctagtgtgcttgtgtgctttaattaagtactattttgttagttactggtatgcattgaaatattttcccccaaagtaagaactgaagcacattacaaaggacctaagtgaaagagattaaaatgaaaattttgtgaggaacaatatgttaaactttcttgtttgttactgtgctgacattttgtagaattttttttaaaaatctgtctagtgggttattttgtgacacactggggaagtcaaaataaatgtaaaatgaaagagataaactcatactgtagtcagcaagtcatgttagagatacagcagaaaggagaataactactctaattgttacaatagccttctttcctcatttgccattcttccatcctcagtattttttaccctaacatggttcttcacatcttccctttttcatttgtgttttaaccacttagtttttcattagtctttgactttgttttcgttatgaaagtttaaattggtctccatccttgggcagattgatggttgcttttaaggaaatcaagctccatagtcagtgttttgtatgtatcttaggaaaataatttcagattttaataattttatcaaagtggtctccttataaattcttcacagtgcaaacttaaagtgaaaatatttttatttctctcattttatttacctttctttacattttctatatcatagattatataatatgtcaagttattttatttgttctactaaattttctagcagtttccatagcctcatctcagattcacttgttgcaacctataaataaggacgtctttattttgcaagtaaacttaattaaaaagggaaaagttgaaaaattaaaagactaataatttagaaatatctacttaatgttcagtttgtctcaattcttactcattttgtgccattccttgttttattacaaaatgttttcttcaaaaagtacaaaaatgaaaaatgtgagtactttttggtgcattttagtaagtaaaattaaaattcctgctata

SEQ ID NO: 18501 - DNA, 4815 bp, Homo sapiens
  source 1..4815: mol_type = unassigned DNA
ggcgcgagggtctgtcagaccgggcgccgcggcggcggcagcggcggagaagggagcgggaccggaagggtcgcagcgccccggcgcccctcacacccactgcggcggcggcggcggcggcggcggcggggcggagcggagcggggcgggccggcggcggagccggggccgcggagccaggagtgactagcacgcagcgccgccagtccgcccgcccgccctctccccgtggcgcggcggcggggaggcgagggatctgaaacttgcccacccttcgggatattgcaggacgctgcatcatgagcgacagtaaatgtgacagtcagttttatagtgtgcaagtggcagactcaaccttcactgtcctaaaacgttaccagcagctgaaaccaattggctctggggcccaagggattgtttgtgctgcatttgatacagttcttgggataaatgttgcagtcaagaaactaagccgtccttttcagaaccaaactcatgcaaagagagcttatcgtgaacttgtcctcttaaaatgtgtcaatcataaaaatataattagtttgttaaatgtgtttacaccacaaaaaactctagaagaatttcaagatgtgtatttggttatggaattaatggatgctaacttatgtcaggttattcacatggagctggatcatgaaagaatgtcctaccttctttaccagatgctttgtggtattaaacatctgcattcagctggtataattcatagagatttgaagcctagcaacattgttgtgaaatcagactgcaccctgaagatccttgactttggcctggcccggacagcgtgcactaacttcatgatgaccccttacgtggtgacacggtactaccgggcgcccgaagtcatcctgggtatgggctacaaagagaacgttgatatctggtcagtgggttgcatcatgggagagctggtgaaaggttgtgtgatattccaaggcactgaccatattgatcagtggaataaagttattgagcagctgggaacaccatcagcagagttcatgaagaaacttcagccaactgtgaggaattatgtcgaaaacagaccaaagtatcctggaatcaaatttgaagaactctttccagattggatattcccatcagaatctgagcgagacaaaataaaaacaagtcaagccagagatctgttatcaaaaatgttagtgattgatcctgacaagcggatctctgtagacgaagctctgcgtcacccatacatcactgtttggtatgaccccgccgaagcagaagccccaccacctcaaatttatgatgcccagttggaagaaagagaacatgcaattgaagaatggaaagagctaatttacaaagaagtcatggattgggaagaaagaagcaagaatggtgttgtaaaagatcagccttcagatgcagcagtaagtagcaacgccactccttctcagtcttcatcgatcaatgacatttcatccatgtccactgagcagacgctggcctcagacacagacagcagtcttgatgcctcgacgggaccccttgaaggctgtcgatgataggttagaaatagcaaacctgtcagcattgaaggaactctcacctccgtgggcctgaaatgcttgggagttgatggaaccaaatagaaaaactccatgttctgcatgtaagaaacacaatgccttgccctactcagacctgataggattgcctgcttagatgataaaatgaggcagaatatgtctgaagaaaaaaattgcaagccacacttctagagattttgttcaagatcatttcaggtgagcagttagagtaggtgaatttgtttcaaattgtactagtgacagtttctcatcatctgtaactgttgagatgtatgtgcatgtgaccacaaatgcttgcttggacttgcccatctagcactttggaaatcagtatttaaatgccaaataatcttccaggtagtgctgcttctgaagttatctcttaatcctcttaagtaatttggtgtctgtccagaaaaagtcgatttatgtgtattaattggccatcatgatgttatcatatcttattcccttttatgctatgatttattctatcttttgtatttcagaagacatataattaaatctatttaataaataaaaatatatagcttttcttagatttgtgatgtttggggctgagaattatcacggctaaaaccaagacacttatgtggacatcttgttttctttaaactgtcttgtctgggatgattgtacattcagctttactgcacgatacaattttaagttttgcttagtgctgcttgaaatcctagctaccttatctcttttcttcttggtcttctagacttcttatgaatttaaaatgctacctagaacttcaccttctttattaggtgcgtaacactccatcttaattaaatatgatggcagataggttcctgcatccatggcctaacgttggagtggaattttacaaaatgctcactagagatcactgcagtcatttcctaagtgcttcctttgccacagactggcctgggtcctttatttaccttccctcattcactttccctcggccaataccacgttcttgattttctttcttcactggaagaaagcagataaactcctctttggtctgttttcagaggccaggctgattcagatgcctgttgctattgttgctctccattgttgggaggcattccttttcacaagaatgttctgggaaactcttcagaggacgtgaaggaaataccctgaagagtcatgattaactattgactattttctgatttaaaactgctcacctgaaattgatacttttagactttacgatcagtaaattattcagaattcatgaagatgctgagtatgttaagtgtcactgcaggaacggagctgtggtgatcacgttttgcctgcctgtgcccatgtctcttcccttgagcttattctgttgctgattcatatcttgtgttcaattattttggaagcttttcagtcgacattctgtagagtgtgttctgaggaggaactgtgataagaaagtttattataaatattatgtaaaatatatggctctctctgcaccagttatatcttattggttggtcatatcactggaaactggaacctttgattagcaaaattaatattgaaataagaaatagttcttttatattgtgtcatttggacactttcaagtacaaaatggtaataataacttggattgaggcggaaacacctattttatggctatctatctaaacatcttaaaatggccttctctgtaatacactttcttttaaaagacttcactaaatctatctttaaaaggaaaaacaaaagggagaggttgaaaatgcgcgagctgccctgcactgtgtgatgctccctccccgggagacgtggacgggggacgaggcacccgcagacgcccttctgctcactcgctcctctgtgcattcagcgagccacttgccacagatggagcccgtgacggtgtggagggtttcctggaaaggccatcttccaccaggtagaggcgagcgtgcctaggacaggccacagggctccacagaaatacctcaccccagcttcagggttctctctcctgagcctagatttgccagggtcttggtgccacgcaaatggtttcaaactgatctctatggataaatgctgatgttggttaaagaactgaaaaatgtgctcaactgtttcatcttttctattttatttttgtaatttatattgtacacaacccaggaagtaactattttggacatgtatttttataaaccaggtaatttactattatcctggaatttagactaggtttgtttcatttgttgacttagtttccagccaagaaggaaacgactgtctcccccatgtccaggtctcagtttcaagggcagagtccagagagcagacagagttctgtgagagcaggagagcagtctggaaaccctggctgtgcataccgtgtcagccgtgggcctggagatgggagcaggtgagacgcagagccccagtactgagaggaggaagccctcttacagggccccttgcccaccccaagtccgtgtctgaaacacggagcgggtgctgcttcaacccgcatttaatgctgtgtaagtagcgataaccacgtacgagtctgtctggttgatttctaatgtgactcctctggtatttcctcctggtaataaatacaagtgtgacctttcagattgcatatctcaaaagtaacattgctaatgttttataataaaatatattatgtgtgttttggttggtgaaaataatacagactacattttaaaagataaatgtatagcatgtccaatttttgtgtgtttttacatggcaattagatatttctccatcaccatctctgatgacagatttaacatgaacacagatagatgataaagtgtcatgcttttgatcaatattagcaagaggtttcacactgagaggcagaaacattgctgtttgttctcttattgaaaatattctgcaaattcctaaatctgtgttttcaaaactaatggcagtaagttttgacttcaccaatatgcaggtccaattcagagtattggtgtaattgttttctcatgaggcgtggccaggagaattcaccagtcagccttagtcatgttacttaacgtcattcatggtgcttgtggctttgtgcctgggatgagccaagttcatctgacgtctgtgtttgaagcacttcaggctgtttagtacttaataccacaggagtggaaggaca

SEQ ID NO: 18502 - DNA, 4336 bp, Homo sapiens
  source 1..4336: mol_type = unassigned DNA
gcggcggcggcagcggcggagaagggagcgggaccggaagggtcgcagcgccccggcgcccctcacacccactgcggcggcggcggcggcggcggcggcggggcggagcggagcggggcgggccggcggcggagccggggccgcggagccaggagtgactagcacgcagcgccgccagtccgcccgcccgccctctccccgtggcgcggcggcggggaggcgagggatctgaaacttgcccacccttcgggatattgcaggacgctgcatcatgagcgacagtaaatgtgacagtcagttttatagtgtgcaagtggcagactcaaccttcactgtcctaaaacgttaccagcagctgaaaccaattggctctggggcccaagggattgtttgtgctgcatttgatacagttcttgggataaatgttgcagtcaagaaactaagccgtccttttcagaaccaaactcatgcaaagagagcttatcgtgaacttgtcctcttaaaatgtgtcaatcataaaaatataattagtttgttaaatgtgtttacaccacaaaaaactctagaagaatttcaagatgtgtatttggttatggaattaatggatgctaacttatgtcaggttattcacatggagctggatcatgaaagaatgtcctaccttctttaccagatgctttgtggtattaaacatctgcattcagctggtataattcatagagatttgaagcctagcaacattgttgtgaaatcagactgcaccctgaagatccttgactttggcctggcccggacagcgtgcactaacttcatgatgaccccttacgtggtgacacggtactaccgggcgcccgaagtcatcctgggtatgggctacaaagagaacgtggacatctggtctgtcgggtgcatcatggcagaaatggtcctccataaagtcctgttcccgggaagagactatattgatcagtggaataaagttattgagcagctgggaacaccatcagcagagttcatgaagaaacttcagccaactgtgaggaattatgtcgaaaacagaccaaagtatcctggaatcaaatttgaagaactctttccagattggatattcccatcagaatctgagcgagacaaaataaaaacaagtcaagccagagatctgttatcaaaaatgttagtgattgatcctgacaagcggatctctgtagacgaagctctgcgtcacccatacatcactgtttggtatgaccccgccgaagcagaagccccaccacctcaaatttatgatgcccagttggaagaaagagaacatgcaattgaagaatggaaagagctaatttacaaagaagtcatggattgggaagaaagaagcaagaatggtgttgtaaaagatcagccttcagatgcagcagtaagtagcaacgccactccttctcagtcttcatcgatcaatgacatttcatccatgtccactgagcagacgctggcctcagacacagacagcagtcttgatgcctcgacgggaccccttgaaggctgtcgatgataggttagaaatagcaaacctgtcagcattgaaggaactctcacctccgtgggcctgaaatgcttgggagttgatggaaccaaatagaaaaactccatgttctgcatgtaagaaacacaatgccttgccctactcagacctgataggattgcctgcttagatgataaaatgaggcagaatatgtctgaagaaaaaaattgcaagccacacttctagagattttgttcaagatcatttcaggtgagcagttagagtaggtgaatttgtttcaaattgtactagtgacagtttctcatcatctgtaactgttgagatgtatgtgcatgtgaccacaaatgcttgcttggacttgcccatctagcactttggaaatcagtatttaaatgccaaataatcttccaggtagtgctgcttctgaagttatctcttaatcctcttaagtaatttggtgtctgtccagaaaaagtcgatttatgtgtattaattggccatcatgatgttatcatatcttattcccttttatgctatgatttattctatcttttgtatttcagaagacatataattaaatctatttaataaataaaaatatatagcttttcttagatttgtgatgtttggggctgagaattatcacggctaaaaccaagacacttatgtggacatcttgttttctttaaactgtcttgtctgggatgattgtacattcagctttactgcacgatacaattttaagttttgcttagtgctgcttgaaatcctagctaccttatctcttttcttcttggtcttctagacttcttatgaatttaaaatgctacctagaacttcaccttctttattaggtgcgtaacactccatcttaattaaatatgatggcagataggttcctgcatccatggcctaacgttggagtggaattttacaaaatgctcactagagatcactgcagtcatttcctaagtgcttcctttgccacagactggcctgggtcctttatttaccttccctcattcactttccctcggccaataccacgttcttgattttctttcttcactggaagaaagcagataaactcctctttggtctgttttcagaggccaggctgattcagatgcctgttgctattgttgctctccattgttgggaggcattccttttcacaagaatgttctgggaaactcttcagaggacgtgaaggaaataccctgaagagtcatgattaactattgactattttctgatttaaaactgctcacctgaaattgatacttttagactttacgatcagtaaattattcagaattcatgaagatgctgagtatgttaagtgtcactgcaggaacggagctgtggtgatcacgttttgcctgcctgtgcccatgtctcttcccttgagcttattctgttgctgattcatatcttgtgttcaattattttggaagcttttcagtcgacattctgtagagtgtgttctgaggaggaactgtgataagaaagtttattataaatattatgtaaaatatatggctctctctgcaccagttatatcttattggttggtcatatcactggaaactggaacctttgattagcaaaattaatattgaaataagaaatagttcttttatattgtgtcatttggacactttcaagtacaaaatggtaataataacttggattgaggcggaaacacctattttatggctatctatctaaacatcttaaaatggccttctctgtaatacactttcttttaaaagacttcactaaatctatctttaaaaggaaaaacaaaagggagaggttgaaaatgcgcgagctgccctgcactgtgtgatgctccctccccgggagacgtggacgggggacgaggcacccgcagacgcccttctgctcactcgctcctctgtgcattcagcgagccacttgccacagatggagcccgtgacggtgtggagggtttcctggaaaggccatcttccaccaggtagaggcgagcgtgcctaggacaggccacagggctccacagaaatacctcaccccagcttcagggttctctctcctgagcctagatttgccagggtcttggtgccacgcaaatggtttcaaactgatctctatggataaatgctgatgttggttaaagaactgaaaaatgtgctcaactgtttcatcttttctattttatttttgtaatttatattgtacacaacccaggaagtaactattttggacatgtatttttataaaccaggtaatttactattatcctggaatttagactaggtttgtttcatttgttgacttagtttccagccaagaaggaaacgactgtctcccccatgtccaggtctcagtttcaagggcagagtccagagagcagacagagttctgtgagagcaggagagcagtctggaaaccctggctgtgcataccgtgtcagccgtgggcctggagatgggagcaggtgagacgcagagccccagtactgagaggaggaagccctcttacagggccccttgcccaccccaagtccgtgtctgaaacacggagcgggtgctgcttcaacccgcatttaatgctgtgtaagtagcgataaccacgtacgagtctgtctggttgatttctaatgtgactcctctggtatttcctcctggtaataaatacaagtgtgacctttcagattgcatatctcaaaagtaacattgctaatgttttataataaaatatattatgtgtgttttggttggtgaaaataatacagactacattttaaaagataaa

SEQ ID NO: 18503 - DNA, 657 bp, Homo sapiens
  source 1..657: mol_type = unassigned DNA
gagaagggagcgggaccggaagggtcgcagcgccccggcgcccctcacacccactgcggcggcggcggcggcggcggcggcggggcggagcggagcggggcgggccggcggcggagccggggccgcggagccaggagtgactagcacgcagcgccgccagtccgcccgcccgccctctccccgtggcgcggcggcggggaggcgaggaatgttatatgcatggagttatacaggatgtgactttttgagattggcttttttcgttgactatcctgcccctgagatccacccaagttgtgggatctgaaacttgcccacccttcgggatattgcaggacgctgcatcatgagcgacagtaaatgtgacagtcagttttatagtgtgcaagtggcagactcaaccttcactgtcctaaaacgttaccagcagctgaaaccaattggctctggggcccaagggattgtttgtgctgcatttgatacagttcttgggataaatgttgcagtcaagaaactaagccgtccttttcagaaccaaactcatgcaaagagagcttatcgtgaacttgtcctcttaaaatgtgtcaatcataaaaatataattagtttgttaaatgtgtttacaccacaaaaaactctagaagaatttcaagatgt

SEQ ID NO: 18504 - DNA, 1668 bp, Homo sapiens
  source 1..1668: mol_type = unassigned DNA
atattgcaggacgctgcatcatgagcgacagtaaatgtgacagtcagttttatagtgtgcaagtggcagactcaaccttcactgtcctaaaacgttaccagcagctgaaaccaattggctctggggcccaagggattgtttgtgctgcatttgatacagttcttgggataaatgttgcagtcaagaaactaagccgtccttttcagaaccaaactcatgcaaagagagcttatcgtgaacttgtcctcttaaaatgtgtcaatcataaaaatataattagtttgttaaatgtgtttacaccacaaaaaactctagaagaatttcaagatgtgtatttggttatggaattaatggatgctaacttatgtcaggttattcacatggagctggatcatgaaagaatgtcctaccttctttaccagatgctttgtggtattaaacatctgcattcagctggtataattcatagagatttgaagcctagcaacattgttgtgaaatcagactgcaccctgaagatccttgactttggcctggcccggacagcgtgcactaacttcatgatgaccccttacgtggtgacacggtactaccgggcgcccgaagtcatcctgggtatgggctacaaagagaacgctataaagtattggactctttggcactaaaaccccagattgctacaaaccgaaggctaaaatagagttgatatctggtcagtgggttgcatcatgggagagctggtgaaaggttgtgtgatattccaaggcactgaccgtatccttccccgcgaccttggccccgccatgctttcttaatgcctcaggcagcatgaccacctgcttacacgagcgctcacgaggacaaagtcgtaaaatccactccagactgtgttctaaggggggctttactgtatttgttaattagtgtcacaagccaagtggttcaatttcattctttatttttaacttgactacctgtgatgactttgagacttagagttcagttaaaccgattatattagctcttaattttgccaaaaatagctggacacatagaagaaattatttactctttgataagtatattctgatatttaaatgaaaatactgtattatttagtttattccgttaatttaactaggaaagatgctatctaaatttaataggctagtgtgcttgtgtgctttaattaagtactattttgttagttactggtatgcattgaaatattttcccccaaagtaagaactgaagcacattacaaaggacctaagtgaaagagattaaaatgaaaattttgtgaggaacaatatgttaaactttcttgtttgttactgtgctgacattttgtagaattttttttaaaaatctgtctagtgggttattttgtgacacactggggaagtcaaaataaatgtaaaatgaaagagataaactcatactgtagtcagcaagtcatgttagagatacagcagaaaggagaataactactctaattgttacaatagccttctttcctcatttgccattcttccatcctcagtattttttaccctaacatggttcttcacatcttccctttttcatttgtgttttaaccacttagtttttcattagtctttgactttgttttcgttatgaaagtttaaattggtctccatccttggg

SEQ ID NO: 18505 - DNA, 2347 bp, Homo sapiens
  source 1..2347: mol_type = unassigned DNA
ctcctcctcctctcgccgctaccgccgtcgccgccgccgcagccgccgccagtccgcgcggcctcgggtggccggagctcagcctgcgcgcgccgcgccctgtgtctccgggtggggcagaagactcgccccttgaacctcccgcggggactctccgtggtgtggcggccctggggctctttcttaatagccccggactgagtcccctccagtcgaggaccctctcctagtccactgacgagcggtggacacctgccgctgtatctcccccaaaccgagtccttgccctgctgcctcctcatacccacacggcggcagagaccttcaccatagcgttcgctcaactccagaaccttccgacctccgctagttcctgcgggcctttgcccgcttcccggtgcaccctccccgggagacacctcagacccccgacagcctgggcaggctcggtgcctgcgggtgcgttcctgatcacccctcccctcttccctccccctcatcctccattcccttgttttcaccctctgtcctctgcccgtcactccccttgtcacctcttggagccccctcctaaccagcggccagtgggtttcccataccccaggatgtgagcctctttaacctgtaatgctgtggctagcccttggcccctttcctgccatggagaaccaggtgctggtaattcgcatcaagatcccaaatagtggcgcggtggactggacagtgcactccgggccgcagttactcttcagggatgtgctggatgtgataggccaggttctgcctgaagcaacaactacagcatttgaatatgaagatgaagatggtgatcgaattacagtgagaagtgatgaggaaatgaaggcaatgctgtcatattattattccacagtaatggaacagcaagtaaatggacagttaatagagcctctgcagatatttccaagagcctgcaagcctcctggggaacggaacatacatggcctgaaggtgaatactcgggccggaccctctcaacacagcagcccagcagtctcagattcacttccaagcaatagcttaaagaagtcttctgctgaactgaaaaaaatactagccaatggccagatgaatgaacaagacatacgatatcgggacactcttggtcatggcaacggaggcacagtctacaaagcatatcatgtcccgagtgggaaaatattagctgtaaaggtcatactactagatattacactggaacttcagaagcaaattatgtctgaattggaaattctttataagtgcgattcatcatatatcattggattttatggagcattttttgtagaaaacaggatttcaatatgtacagaattcatggatgggggatctttggatgtatataggaaaatgccagaacatgtccttggaagaattgcagtagcagttgttaaaggccttacttatttgtggagtttaaagattttacatagagacgtgaagccctccaatatgctagtaaacacaagaggacaggttaagctgtgtgattttggagttagcactcagctggtgaattctatagccaagacgtatgttggaacaaatgcttatatggcgcctgaaaggatttcaggggagcagtatggaattcattctgatgtctggagcttaggaatctcttttatggagcttgctcttgggaggtttccatatcctcagattcagaaaaaccagggatctttaatgcctctccagcttctgcagtgcattgttgatgaggattcgcccgtccttccagttggagagttctcggagccatttgtacatttcatcactcagtgtatgcgaaaacagccaaaagaaaggccagcacctgaagaattgatgggccacccgttcatcgtgcagttcaatgatggaaatgccgccgtggtgtccatgtgggtgtgccgggcgctggaggagaggcggagccagcaggggcccccgtgaggctgccgcagggcactgaaagcccaggaccagtaaccaaggagaacaacccacccgtcgcccttctccgtatgctgcctgcgccagaagagctttgctgggccctggcttccctgccctcgccttcacctctgtcagcaggtggccttgcctggggagccccatgtgtggcccaccccaccaggccatccccataccttctggtttgaaggcgctgacactggcagagaggtaaagggtggggcattgagaatggaggctcccagggtccctgcccacttctgttttcctaatgtttttctctataaagggtcaggcccgtcagcatcactgatgggaataaaagtattaatgctttgtgacagcctctgcc

SEQ ID NO: 18506 - DNA, 2334 bp, Homo sapiens
  source 1..2334: mol_type = unassigned DNA
ggagtaacagtgtcgccgccgccttcctcctcctcctctcgccgctaccgccgtcgccgccgccgcagccgccgccagtccgcgcggcctcgggtggccggagctcagcctgcgcgcgccgcgccctgtgtctccgggtggggcagaagactcgccccttgaacctcccgcggggactctccgtggtgtggcggccctggggctctttcttaatagccccggactgagtcccctccagtcgaggaccctctcctagtccactgacgagcggtggacacctgccgctgtatctcccccaaaccgagtccttgccctgctgcctcctcatacccacacggcggcagagaccttcaccatagcgttcgctcaactccagaaccttccgacctccgctagttcctgcgggcctttgcccgcttcccggtgcaccctccccgggagacacctcagacccccgacagcctgggcaggctcggtgcctgcgggtgcgttcctgatcacccctcccctcttccctccccctcatcctccattcccttgttttcaccctctgtcctctgcccgtcactccccttgtcacctcttggagccccctcctaaccagcggccagtgggtttcccataccccaggatgtgagcctctttaacctgtaatgctgtggctagcccttggcccctttcctgccatggagaaccaggtgctggtaattcgcatcaagatcccaaatagtggcgcggtggactggacagtgcactccgggccgcagttactcttcagggatgtgctggatgtgataggccaggttctgcctgaagcaacaactacagcatttgaatatgaagatgaagatggtgatcgaattacagtgagaagtgatgaggaaatgaaggcaatgctgtcatattattattccacagtaatggaacagcaagtaaatggacagttaatagagcctctgcagatatttccaagagcctgcaagcctcctggggaacggaacatacatggcctgaaggtgaatactcgggccggaccctctcaacacagcagcccagcagtctcagattcacttccaagcaatagcttaaagaagtcttctgctgaactgaaaaaaatactagccaatggccagatgaatgaacaagacatacgatatcgggacactcttggtcatggcaacggaggcacagtctacaaagcatatcatgtcccgagtgggaaaatattagctgtaaaggtcatactactagatattacactggaacttcagaagcaaattatgtctgaattggaaattctttataagtgcgattcatcatatatcattggattttatggagcattttttgtagaaaacaggatttcaatatgtacagaattcatggatgggggatctttggatgtatataggaaaatgccagaacatgtccttggaagaattgcagtagcagttgttaaaggccttacttatttgtggagtttaaagattttacatagagacgtgaagccctccaatatgctagtaaacacaagaggacaggttaagctgtgtgattttggagttagcactcagctggtgaattctatagccaagacgtatgttggaacaaatgcttatatggcgcctgaaaggatttcaggggagcagtatggaattcattctgatgtctggagcttaggaatctcttttatggagattcagaaaaaccagggatctttaatgcctctccagcttctgcagtgcattgttgatgaggattcgcccgtccttccagttggagagttctcggagccatttgtacatttcatcactcagtgtatgcgaaaacagccaaaagaaaggccagcacctgaagaattgatgggccacccgttcatcgtgcagttcaatgatggaaatgccgccgtggtgtccatgtgggtgtgccgggcgctggaggagaggcggagccagcaggggcccccgtgaggctgccgcagggcactgaaagcccaggaccagtaaccaaggagaacaacccacccgtcgcccttctccgtatgctgcctgcgccagaagagctttgctgggccctggcttccctgccctcgccttcacctctgtcagcaggtggccttgcctggggagccccatgtgtggcccaccccaccaggccatccccataccttctggtttgaaggcgctgacactggcagagaggtaaagggtggggcattgagaatggaggctcccagggtccctgcccacttctgttttcctaatgtttttctctataaagggtcaggcccgtcagcatcactgatgggaataaaagtattaatgctttgtgaca

SEQ ID NO: 18507 - DNA, 1988 bp, Homo sapiens
  source 1..1988: mol_type = unassigned DNA
ggagtaacagtgtcgccgccgccttcctcctcctcctctcgccgctaccgccgtcgccgccgccgcagccgccgccagtccgcgcggcctcgggtggccggagctcagcctgcgcgcgccgcgccctgtgtctccgggtggggcagaagactcgccccttgaacctcccgcggggactctccgtggtgtggcggccctggggctctttcttaatagccccggactgagtcccctccagtcgaggaccctctcctagtccactgacgagcggtggacacctgccgctgtatctcccccaaaccgagtccttgccctgctgcctcctcatacccacacggcggcagagaccttcaccatagcgttcgctcaactccagaaccttccgacctccgctagttcctgcgggcctttgcccgcttcccggtgcaccctccccgggagacacctcagacccccgacagcctgggcaggctcggtgcctgcgggtgcgttcctgatcacccctcccctcttccctccccctcatcctccattcccttgttttcaccctctgtcctctgcccgtcactccccttgtcacctcttggagccccctcctaaccagcggccagtgggtttcccataccccaggatgtgagcctctttaacctgtaatgctgtggctagcccttggcccctttcctgccatggagaaccaggtgctggtaattcgcatcaagatcccaaatagtggcgcggtggactggacagtgcactccgggccgcagttactcttcagggatgtgctggatgtgataggccaggttctgcctgaagcaacaactacagcatttgaatatgaagatgaagatggtgatcgaattacagtgagaagtgatgaggaaatgaaggcaatgctgtcatattattattccacagtaatggaacagcaagtaaatggacagttaatagagcctctgcagatatttccaagagcctgcaagcctcctggggaacggaacatacatggcctgaaggtgaatactcgggccggaccctctcaacacagcagcccagcagtctcagattcacttccaagcaatagcttaaagaagtcttctgctgaactgaaaaaaatactagccaatggccagatgaatgaacaagacatacgatatcgggacactcttggtcatggcaacggaggcacagtctacaaagcatatcatgtcccgagtgggaaaatattagctgtaaaggtcatactactagatattacactggaacttcagaagcaaattatgtctgaattggaaattctttataagtgcgattcatcatatatcattggattttatggagcattttttgtagaaaacaggatttcaatatgtacagaattcatggatgggggatctttggatgtatataggaaaatgccagaacatgtccttggaagaattgcagtagcagttgttaaaggccttacttatttgtggagtttaaagattttacatagagacgtgaagccctccaatatgctagtaaacacaagaggacaggttaagctgtgtgattttggagttagcactcagctggtgaattctatagccaagacgtatgttggaacaaatgcttatatggcgcctgaaaggatttcaggggagcagtatggaattcattctgatgtctggagcttaggaatctcttttatggagattcagaaaaaccagggatctttaatgcctctccagcttctgcagtgcattgttgatgaggattcgcccgtccttccagttggagagttctcggagccatttgtacatttcatcactcagtgtatgcgaaaacagccaaaagaaaggccagcacctgaagaattgatgggccacccgttcatcgtgcagttcaatgatggaaatgccgccgtggtgtccatgtgggtgtgccgggcgctggaggagaggcggtctcccgcttcgctgccctccccaagctcgtccatctag

SEQ ID NO: 18508 - DNA, 1783 bp, Homo sapiens
  source 1..1783: mol_type = unassigned DNA
gaagttgcagccactctgctaagtgccctgcttggaaaggctgtgggctccctgctgagaaatactgcgagcggctttgtcagccggctgcctggtgccagttctgctgcagcctgggagggacactgtggcagagctcctggagagaaatgaggtttgcaggccattggagttggactggacatgatggagggtcactttccccagagcgatgtgataggccaggttctgcctgaagcaacaactacagcatttgaatatgaagatgaagatggtgatcgaattacagtgagaagtgatgaggaaatgaaggcaatgctgtcatattattattccacagtaatggaacagcaagtaaatggacagttaatagagcctctgcagatatttccaagagcctgcaagcctcctggggaacggaacatacatggcctgaaggtgaatactcgggccggaccctctcaacacagcagcccagcagtctcagattcacttccaagcaatagcttaaagaagtcttctgctgaactgaaaaaaatactagccaatggccagatgaatgaacaagacatacgatatcgggacactcttggtcatggcaacggaggcacagtctacaaagcatatcatgtcccgagtgggaaaatattagctgtaaaggtcatactactagatattacactggaacttcagaagcaaattatgtctgaattggaaattctttataagtgcgattcatcatatatcattggattttatggagcattttttgtagaaaacaggatttcaatatgtacagaattcatggatgggggatctttggatgtatataggaaaatgccagaacatgtccttggaagaattgcagtagcagttgttaaaggccttacttatttgtggagtttaaagattttacatagagacgtgaagccctccaatatgctagtaaacacaagaggacaggttaagctgtgtgattttggagttagcactcagctggtgaattctatagccaagacgtatgttggaacaaatgcttatatggcgcctgaaaggatttcaggggagcagtatggaattcattctgatgtctggagcttaggaatctcttttatggagcttgctcttgggaggtttccatatcctcagattcagaaaaaccagggatctttaatgcctctccagcttctgcagtgcattgttgatgaggattcgcccgtccttccagttggagagttctcggagccatttgtacatttcatcactcagtgtatgcgaaaacagccaaaagaaaggccagcacctgaagaattgatgggccacccgttcatcgtgcagttcaatgatggaaatgccgccgtggtgtccatgtgggtgtgccgggcgctggaggagaggcggagccagcaggggcccccgtgaggctgccgcagggcactgaaagcccaggaccagtaaccaaggagaacaacccacccgtcgcccttctccgtatgctgcctgcgccagaagagctttgctgggccctggcttccctgccctcgccttcacctctgtcagcaggtggccttgcctggggagccccatgtgtggcccaccccaccaggccatccccataccttctggtttgaaggcgctgacactggcagagaggtaaagggtggggcattgagaatggaggctcccagggtccctgcccacttctgttttcctaatgtttttctctataaagggtcaggcccgtcagcatcactgatgggaataaaagtattaatgctttgtg

SEQ ID NO: 18509 - DNA, 1850 bp, Homo sapiens
  source 1..1850: mol_type = unassigned DNA
agttccaagtttggagcttttagctgccagccctggcccatcatgtagctgcagcacagccttccctaacgttgcaactgggggaaaaatcactttccagtctgttttgcaaggtgtgcatttccatcttgattccctgaaagtccatctgctgcatcggtcaagagaaactccacttgcatgaagattgcacgcctgcagcttgcatctttgttgcaaaactagctacagaagagaagcaaggcaaagtcttttgtgctcccctcccccatcaaaggaaaggggaaaatgtctcagtcgaaaggcaagaagcgaaaccctggccttaaaattccaaaagaagcatttgaacaacctcagaccagttccacaccacctcgagatttagactccaaggcttgcatttctattggaaatcagaactttgaggtgaaggcagatgacctggagcctataatggaactgggacgaggtgcgtacggggtggtggagaagatgcggcacgtgcccagcgggcagatcatggcagtgaagcggatccgagccacagtaaatagccaggaacagaaacggctactgatggatttggatatttccatgaggacggtggactgtccattcactgtcaccttttatggcgcactgtttcgggagggtgatgtgtggatctgcatggagctcatggatacatcactagataaattctacaaacaagttattgataaaggccagacaattccagaggacatcttagggaaaatagcagtttctattgtaaaagcattagaacatttacatagtaagctgtctgtcattcacagagacgtcaagccttctaatgtactcatcaatgctctcggtcaagtgaagatgtgcgattttggaatcagtggctacttggtggactctgttgctaaaacaattgatgcaggttgcaaaccatacatggcccctgaaagaataaacccagagctcaaccagaagggatacagtgtgaagtctgacatttggagtctgggcatcacgatgattgagttggccatccttcgatttccctatgattcatggggaactccatttcagcagctcaaacaggtggtagaggagccatcgccacaactcccagcagacaagttctctgcagagtttgttgactttacctcacagtgcttaaagaagaattccaaagaacggcctacatacccagagctaatgcaacatccatttttcaccctacatgaatccaaaggaacagatgtggcatcttttgtaaaactgattcttggagactaaaaagcagtggacttaatcggttgaccctactgtggattggtgggtttcggggtgaagcaagttcactacagcatcaatagaaagtcatctttgagataatttaaccctgcctctcagagggttttctctcccaattttctttttactccccctcttaagggggccttggaatctatagtatagaatgaactgtctagatggatgaattatgataaaggcttaggacttcaaaaggtgattaaatatttaatgatgtgtcatatgagtcctcaagcttctcagacttctcttattctttacaaaatgaatgcattggccctgacaaaaaggtgctacggtagtgatgaaattataagtagatttgtagtttgtcccatttattattttaatatttatgtttaagtgcttggttgaaaagattccattttatacaagaagggagattcaaaaaaaaaatataaggttgggttagcaatatttatagggcttttattttttaagttcaattgtgtctgtggtccagaagaaattatttaatatgcatctttgagaatatt

SEQ ID NO: 18510 - DNA, 2870 bp, Homo sapiens
  source 1..2870: mol_type = unassigned DNA
gttccaagtttggagcttttagctgccagccctggcccatcatgtagctgcagcacagccttccctaacgttgcaactgggggaaaaatcactttccagtctgttttgcaaggtgtgcatttccatcttgattccctgaaagtccatctgctgcatcggtcaagagaaactccacttgcatgaagattgcacgcctgcagcttgcatctttgttgcaaaactagctacagaagagaagcaaggcaaagtcttttgtgctcccctcccccatcaaaggaaaggggaaaatgtctcagtcgaaaggcaagaagcgaaaccctggccttaaaattccaaaagaagcatttgaacaacctcagaccagttccacaccacctcgagatttagactccaaggcttgcatttctattggaaatcagaactttgaggtgaaggcagatgacctggagcctataatggaactgggacgaggtgcgtacggggtggtggagaagatgcggcacgtgcccagcgggcagatcatggcagtgaagcggatccgagccacagtaaatagccaggaacagaaacggctactgatggatttggatatttccatgaggacggtggactgtccattcactgtcaccttttatggcgcactgtttcgggagggtgatgtgtggatctgcatggagctcatggatacatcactagataaattctacaaacaagttattgataaaggccagacaattccagaggacatcttagggaaaatagcagtttctattgtaaaagcattagaacatttacatagtaagctgtctgtcattcacagagacgtcaagccttctaatgtactcatcaatgctctcggtcaagtgaagatgtgcgattttggaatcagtggctacttggtggactctgttgctaaaacaattgatgcaggttgcaaaccatacatggcccctgaaagaataaacccagagctcaaccagaagggatacagtgtgaagtctgacatttggagtctgggcatcacgatgattgagttggccatccttcgatttccctatgattcatggggaactccatttcagcagctcaaacaggtggtagaggagccatcgccacaactcccagcagacaagttctctgcagagtttgttgactttacctcacagtgcttaaagaagaattccaaagaacggcctacatacccagagctaatgcaacatccatttttcaccctacatgaatccaaaggaacagatgtggcatcttttgtaaaactgattcttggagactaaaaagcagtggacttaatcggttgaccctactgtggattggtgggtttcggggtgaagcaagttcactacagcatcaatagaaagtcatctttgagataatttaaccctgcctctcagagggttttctctcccaattttctttttactccccctcttaagggggccttggaatctatagtatagaatgaactgtctagatggatgaattatgataaaggcttaggacttcaaaaggtgattaaatatttaatgatgtgtcatatgagtcctcaagcttctcagacttctcttattctttacaaaatgaatgcattggccctgacaaaaaggtgctacggtagtgatgaaattataagtagatttgtagtttgtcccatttattattttaatatttatgtttaagtgcttggttgaaaagattccattttatacaagaagggagattcaaaaaaaaaatataaggttgggttagcaatatttatagggcttttattttttaagttcaattgtgtctgtggtccagaagaaattatttaatatgcatctttgagaatattataaaaatatcaaaaaggagctcttcttgtgaaatgtctgttccagctgttgtgactgctgccatttttgcaaacatctgcccaatcctgggtgatcaccacatcttttaggggaagtgacaagatgctctggtcatactctttttcccaactttggaaaacataaaaatcactcatataacagctcaaagagtaaaacatttggttcttctgacacttgtggtatagtattagtggaaagtgatttgtaatatgattttatatccacctacctattcatctacctgtgtgtatgtgtgtgtttgtgtgtctatttggcaattcacaagtcctgccaagtggtttctatgagcatctctgtttggtaaggaggacaattgtcagttttgagggggacatgtgttaaatcacagaaaaaaatggtgccttcttctgcgtttgtccctcctgccatgtgtaagttgtaaggattgcctttgtagttaatgtactctttggctttgtttgtttgttttcttcttcagtgaagcagccttactattcatagaagggctagaataggagaaaatgaaaggtagtgagtaattctttgataagatgaggaaataatgggaaaggttgaattaattcctgggcatggactaccagatgaccacaagttgcgttgaggccgcatctttcttcagcagcgtgcaatagctggctcctctataggagatgagcttcattgggagttcctagcaagttgactaaacagcaaaagttctttctcgtgggtaaatatacccacaggttctatgatttgtagctctaggtttcttgatgatcaaggagtgaagtaattgacagggaaaatatagacctatgataaataaccaggaagcattgcttttggacaaggaaggacagagggttttgattttaaaaagaagaaaaaaaaaccttattttttctttcttggcctcaagttcaatatggagaggattgcttccctgaatcctctcttccttccccttttaga

SEQ ID NO: 18511 - DNA, 3435 bp, Homo sapiens
  source 1..3435: mol_type = unassigned DNA
cgcgcggccaggccctcttagccctctgccgtttggggggcacgggtgaacctgccgccccactcccaccccgccccgccccgcccgtacagccaaatcggaagggacgagcctgccctttgaaagggttttttttcttgctcctgcggagggcgccccagccatggccctcaggagctccctagaccccgcagggactgccctccatcccggccgccggggcccgccctctgcatcccgcgggcagcctgtgtgaagcggcctcccgcagcccccggcccctcccccatggaggaggaggagggggcggtggccaaggagtggggcacgacccccgcggggcccgtctggaccgcggtgttcgactacgaggcggcgggcgacgaggagctgaccctgcggaggggcgatcgcgtccaggtgctttcccaagactgtgcggtgtccggcgacgagggctggtggaccgggcagctccccagcggccgcgtgggcgtcttccccagcaactacgtggcccccggcgcccccgctgcacccgcgggcctccagctgccccaggagatccccttccacgagctgcagctagaggagatcatcggtgtggggggctttggcaaggtctatcgggccctgtggcgtggcgaggaggtggcagtcaaggccgcccggctggaccctgagaaggacccggcagtgacagcggagcaggtgtgccaggaagcccggctctttggagccctgcagcaccccaacataattgcccttaggggcgcctgcctcaaccccccacacctctgcctagtgatggagtatgcccggggtggtgcactgagcagggtgctggcaggtcgccgggtgccacctcacgtgctggtcaactgggctgtgcaggtggcccggggcatgaactacctacacaatgatgcccctgtgcccatcatccaccgggacctcaagtccatcaacatcctgatcctggaggccatcgagaaccacaacctcgcagacacggtgctcaagatcacggacttcggcctcgcccgcgagtggcacaagaccaccaagatgagcgctgcggggacctacgcctggatggcgccggaggttatccgtctctccctcttctccaaaagcagtgatgtctggagcttcggggtgctgctgtgggagctgctgacgggggaggtcccctaccgtgagatcgacgccttggccgtggcgtatggcgtggctatgaataagctgacgctgcccattccctccacgtgccccgagccctttgcccgcctcctggaggaatgctgggacccagacccccacgggcggccagatttcggtagcatcttgaagcggcttgaagtcatcgaacagtcagccctgttccagatgccactggagtccttccactcgctgcaggaagactggaagctggagattcagcacatgtttgatgaccttcggaccaaggagaaggagcttcggagccgtgaggaggagctgctgcgggcggcacaggagcagcgcttccaggaggagcagctgcggcggcgggagcaggagctggcagaacgtgagatggacatcgtggaacgggagctgcacctgctcatgtgccagctgagccaggagaagccccgggtccgcaagcgcaagggcaacttcaagcgcagccgcctgctcaagctgcgggaaggcggcagccacatcagcctgccctctggctttgagcataagatcacagtccaggcctctccaactctggataagcggaaaggatccgatggggccagcccccctgcaagccccagcatcatcccccggctgagggccattcgcctgactcccgtggactgtggtggcagcagcagtggcagcagcagtggaggaagtgggacatggagccgcggtgggcccccaaagaaggaagaactggtcgggggcaagaagaagggacgaacgtgggggcccagctccaccctgcagaaggagcgggtgggaggagaggagaggctgaaggggctgggggaaggaagcaaacagtggtcatcaagtgcccccaacctgggcaagtcccccaaacacacacccatcgcccctggctttgccagcctcaatgagatggaggagttcgcggaggcagaggatggaggcagcagcgtgcccccttccccctactcgaccccgtcctacctctcagtgccactgcctgccgagccctccccgggggcgcgggcgccgtgggagccgacgccgtccgcgccccccgctcggtggggacacggcgcccggcggcgctgcgacctggcgctgctaggctgcgccacgctgctgggggctgtgggcctgggcgccgacgtggccgaggcgcgcgcggccgacggtgaggagcagcggcgctggctcgacggcctcttctttccccgcgccggccgcttcccgcggggcctcagcccacccgcgcgtccccacggccgccgcgaagacgtgggccccggcctgggcctggcgccctcggccaccctcgtgtcgctgtcgtccgtgtccgactgcaactccacgcgttcactgctgcgctctgacagtgacgaggccgcaccggccgcgccctccccaccaccctccccgcccgcgcccacacccacgccctcgcccagcaccaaccccctggtggacctggagctggagagcttcaagaaggacccccgccagtcgctcacgcccacccacgtcacggctgcatgcgctgtgagccgcgggcaccggcggacgccatcggacggggcgctggggcagcgggggccgcccgagcccgcgggccatggccctggccctcgtgaccttctggacttcccccgcctgcccgacccccaggccctgttcccagcccgccgccggccccctgagttcccaggccgccccaccaccctgacctttgccccgagacctcggccggctgccagtcgcccccgcttggacccctggaaactggtctccttcggccggacactcaccatctcgcctcccagcaggccagacactccggagagccctgggccccccagcgtgcagcccacactgctggacatggacatggaggggcagaaccaagacagcacagtgcccctgtgcggggcccacggctcccactaaggcctgcccaccaccgcccgcctgggcagccatgaatgtagcgccccaggccctgccccagcccgccatgccacaaggtgggggaggccctgggcaggatgttcactctatttattggggaaggagggaggggggggacacttaacttattcctttgtaccccagggggtggagccctgtgcccaccctgcactggggggagggtgggcagggatactcagggacagggcatcatgggggatttggcacaaaatggagcattaaaggtaacccctgccccct

SEQ ID NO: 18512 - DNA, 3566 bp, Homo sapiens
  source 1..3566: mol_type = unassigned DNA
gaggaggaagaagggagcggggtcggagccgtcggggccaaaggagacggggccaggaacaggcagtctcggcccaactgcggacgctccctccaccccctgcgcaaaaagacccaaccggagttgaggcgctgcccctgaaggccccaccttacacttggcgggggccggagccaggctcccaggactgctccagaaccgagggaagctcgggtccctccaagctagccatggtgaggcgccggaggccccggggccccacccccccggcctgaccacactgccctgggtgccctcctccagaagcccgagatgcggggggccgggagacaacactcctggctccccagagaggcgtgggtctggggctgagggccagggcccggatgcccaggttccgggactagggccttggcagccagcgggggtggggaccacgggcacccagagaaggtcctccacacatcccagcgccggctcccggccatggagcccttgaagagcctcttcctcaagagccctctagggtcatggaatggcagtggcagcgggggtggtgggggcggtggaggaggccggcctgaggggtctccaaaggcagcgggttatgccaacccggtgtggacagccctgttcgactacgagcccagtgggcaggatgagctggccctgaggaagggtgaccgtgtggaggtgctgtcccgggacgcagccatctcaggagacgagggctggtgggcgggccaggtgggtggccaggtgggcatcttcccgtccaactatgtgtctcggggtggcggcccgcccccctgcgaggtggccagcttccaggagctgcggctggaggaggtgatcggcattggaggctttggcaaggtgtacaggggcagctggcgaggtgagctggtggctgtgaaggcagctcgccaggaccccgatgaggacatcagtgtgacagccgagagcgttcgccaggaggcccggctcttcgccatgctggcacaccccaacatcattgccctcaaggctgtgtgcctggaggagcccaacctgtgcctggtgatggagtatgcagccggtgggcccctcagccgagctctggccgggcggcgcgtgcctccccatgtgctggtcaactgggctgtgcagattgcccgtgggatgcactacctgcactgcgaggccctggtgcccgtcatccaccgtgatctcaagtccaacaacattttgctgctgcagcccattgagagtgacgacatggagcacaagaccctgaagatcaccgactttggcctggcccgagagtggcacaaaaccacacaaatgagtgccgcgggcacctacgcctggatggctcctgaggttatcaaggcctccaccttctctaagggcagtgacgtctggagttttggggtgctgctgtgggaactgctgaccggggaggtgccataccgtggcattgactgccttgctgtggcctatggcgtagctgttaacaagctcacactgcccatcccatccacctgccccgagcccttcgcacagcttatggccgactgctgggcgcaggacccccaccgcaggcccgacttcgcctccatcctgcagcagttggaggcgctggaggcacaggtcctacgggaaatgccgcgggactccttccattccatgcaggaaggctggaagcgcgagatccagggtctcttcgacgagctgcgagccaaggaaaaggaactactgagccgcgaggaggagctgacgcgagcggcgcgcgagcagcggtcacaggcggagcagctgcggcggcgcgagcacctgctggcccagtgggagctagaggtgttcgagcgcgagctgacgctgctgctgcagcaggtggaccgcgagcgaccgcacgtgcgccgccgccgcgggacattcaagcgcagcaagctccgggcgcgcgacggcggcgagcgtatcagcatgccactcgacttcaagcaccgcatcaccgtgcaggcctcacccggccttgaccggaggagaaacgtcttcgaggtcgggcctggggattcgcccacctttccccggttccgagccatccagttggagcctgcagagccaggccaggcatggggccgccagtccccccgacgtctggaggactcaagcaatggagagcggcgagcatgctgggcttggggtcccagttcccccaagcctggggaagcccagaatgggaggagaaggtcccgcatggacgaagccacatggtacctggattcagatgactcatcccccttaggatctccttccacacccccagcactcaatggtaaccccccgcggcctagcctggagcccgaggagcccaagaggcctgtccccgcagagcgcggtagcagctctgggacgcccaagctgatccagcgggcgctgctgcgcggcaccgccctgctcgcctcgctgggccttggccgcgacctgcagccgccgggaggcccaggacgcgagcgcggggagtccccgacaacaccccccacgccaacgcccgcgccctgcccgaccgagccgcccccttccccgctcatctgcttctcgctcaagacgcccgactccccgcccactcctgcacccctgttgctggacctgggtatccctgtgggccagcggtcagccaagagcccccgacgtgaggaggagccccgcggaggcactgtctcacccccaccggggacatcacgctctgctcctggcaccccaggcaccccacgttcaccacccctgggcctcatcagccgacctcggccctcgccccttcgcagccgcattgatccctggagctttgtgtcagctgggccacggccttctcccctgccatcaccacagcctgcaccccgccgagcaccctggaccttgttcccggactcagaccccttctgggactccccacctgccaaccccttccaggggggcccccaggactgcagggcacagaccaaagacatgggtgcccaggccccgtgggtgccggaagcggggccttgagtgggccaggccactcccccgagctccagctgccttaggaggagtcacagcatacactggaacaggagctgggtcagcctctgcagctgcctcagtttccccagggaccccacccccctttgggggtcaggaacactacactgcacaggaagccttcacactggaagggggacctgcgcccccacatctgaaacctgtaggtccccccagctcacctgccctactggggcccaacactgtacccagctggttgggaggaccagagcctgtctcagggaattgcctgctggggtgatgcagggaggaggggaggtgcagggaagaggggccggcctcagctgtcaccagcacttttgaccaagtcctgctactgcggcccctgccctagggcttagagcatggacctcctgccctgggggtcatctggggccagggctctctggatgccttcctgctgccccagccagggttggagtcttagcctcgggatccagtgaagccagaagccaaataaactcaaaagctgtctccccaca

SEQ ID NO: 18513 - DNA, 2830 bp, Homo sapiens
  source 1..2830: mol_type = unassigned DNA
attctccaggcccacgagtcacaggactgaccagccagcccggcctgggcctgacctcccccagttctccccaaaaggactccccctcccaagtgggagacctggcccaggcctcccagaaaggagaagtagggaccacgggaggaaagcggaagaggtgtgagctgcccaggccactcccaagccccacagaggccagcccagggagggagctggtggccaggtccctatcagaggccagggagccctaaaggggcactgagagcttcccccagtttcggggtctctggcccattctcctctgggtgacccctgacctcccatgcctgggatctacatcagacaccagaacagcagttcgagttgggacagttgaaagcacagagaggagcttggagagaaagcagaggatggggcttagcagctggcagagccaggagcggggaggtagcagaaagaccacaagtacaaagaagtcctgaaactttggttttgctgctgcagcccattgagagtgacgacatggagcacaagaccctgaagatcaccgactttggcctggcccgagagtggcacaaaaccacacaaatgagtgccgcgggcacctacgcctggatggctcctgaggttatcaaggcctccaccttctctaagggcagtgacgtctggagttttggggtgctgctgtgggaactgctgaccggggaggtgccataccgtggcattgactgccttgctgtggcctatggcgtagctgttaacaagctcacactgcccatcccatccacctgccccgagcccttcgcacagcttatggccgactgctgggcgcaggacccccaccgcaggcccgacttcgcctccatcctgcagcagttggaggcgctggaggcacaggtcctacgggaaatgccgcgggactccttccattccatgcaggaaggctggaagcgcgagatccagggtctcttcgacgagctgcgagccaaggaaaaggaactactgagccgcgaggaggagctgacgcgagcggcgcgcgagcagcggtcacaggcggagcagctgcggcggcgcgagcacctgctggcccagtgggagctagaggtgttcgagcgcgagctgacgctgctgctgcagcaggtggaccgcgagcgaccgcacgtgcgccgccgccgcgggacattcaagcgcagcaagctccgggcgcgcgacggcggcgagcgtatcagcatgccactcgacttcaagcaccgcatcaccgtgcaggcctcacccggccttgaccggaggagaaacgtcttcgaggtcgggcctggggattcgcccacctttccccggttccgagccatccagttggagcctgcagagccaggccaggcatggggccgccagtccccccgacgtctggaggactcaagcaatggagagcggcgagcatgctgggcttggggtcccagttcccccaagcctggggaagcccagaatgggaggagaaggtcccgcatggacgaagccacatggtacctggattcagatgactcatcccccttaggatctccttccacacccccagcactcaatggtaaccccccgcggcctagcctggagcccgaggagcccaagaggcctgtccccgcagagcgcggtagcagctctgggacgcccaagctgatccagcgggcgctgctgcgcggcaccgccctgctcgcctcgctgggccttggccgcgacctgcagccgccgggaggcccaggacgcgagcgcggggagtccccgacaacaccccccacgccaacgcccgcgccctgcccgaccgagccgcccccttccccgctcatctgcttctcgctcaagacgcccgactccccgcccactcctgcacccctgttgctggacctgggtatccctgtgggccagcggtcagccaagagcccccgacgtgaggaggagccccgcggaggcactgtctcacccccaccggggacatcacgctctgctcctggcaccccaggcaccccacgttcaccacccctgggcctcatcagccgacctcggccctcgccccttcgcagccgcattgatccctggagctttgtgtcagctgggccacggccttctcccctgccatcaccacagcctgcaccccgccgagcaccctggaccttgttcccggactcagaccccttctgggactccccacctgccaaccccttccaggggggcccccaggactgcagggcacagaccaaagacatgggtgcccaggccccgtgggtgccggaagcggggccttgagtgggccaggccactcccccgagctccagctgccttaggaggagtcacagcatacactggaacaggagctgggtcagcctctgcagctgcctcagtttccccagggaccccacccccctttgggggtcaggaacactacactgcacaggaagccttcacactggaagggggacctgcgcccccacatctgaaacctgtaggtccccccagctcacctgccctactggggcccaacactgtacccagctggttgggaggaccagagcctgtctcagggaattgcctgctggggtgatgcagggaggaggggaggtgcagggaagaggggccggcctcagctgtcaccagcacttttgaccaagtcctgctactgcggcccctgccctagggcttagagcatggacctcctgccctgggggtcatctggggccagggctctctggatgccttcctgctgccccagccagggttggagtcttagcctcgggatccagtgaagccagaagccaaataaactcaaaagctgtctccccac

SEQ ID NO: 18514 - DNA, 3492 bp, Homo sapiens
  source 1..3492: mol_type = unassigned DNA
agaaagctgaagctgacacccgtgcatccggacaccgcacgagcatcgcctgtgacagcgccccgggtccggtggagggcagcggggggaggagggaaggaggaggagaaggaggaggaggcgggagcagcatccggagcggagctgcagcagcgccgccttttgtgctgcggccgcggagcccccgagggcccagtgttcaccatcataccaggggccagaggcgatggcttgcctccatgagacccgaacaccctctccttcctttgggggctttgtgtctaccctaagtgaggcatccatgcgcaagctggacccagacacttctgactgcactcccgagaaggacctgacgcctacccatgtcctgcagctacatgagcaggatgcagggggcccagggggagcagctgggtcacctgagagtcgggcatccagagttcgagctgacgaggtgcgactgcagtgccagagtggcagtggcttccttgagggcctctttggctgcctgcgccctgtctggaccatgattggcaaagcctactccactgagcacaagcagcagcaggaagacctttgggaggtcccctttgaggaaatcctggacctgcagtgggtgggctcaggggcccagggtgctgtcttcctggggcgcttccacggggaggaggtggctgtgaagaaggtgcgagacctcaaagaaaccgacatcaagcacttgcgaaagctgaagcaccccaacatcatcactttcaagggtgtgtgcacccaggctccctgctactgcatcctcatggagttctgcgcccagggccagctgtatgaggtactgcgggctggccgccctgtcaccccctccttactggttgactggtccatgggcatcgctggtggcatgaactacctgcacctgcacaagattatccacagggatctcaagtcacccaacatgctaatcacctacgacgatgtggtgaagatctcagattttggcacttccaaggagctgagtgacaagagcaccaagatgtcctttgcagggacagtagcctggatggcccctgaggtgatccgcaatgaacctgtgtctgagaaggtcgacatctggtcctttggcgtggtgctatgggaactgctgactggtgagatcccctacaaagacgtagattcctcagccattatctggggtgtgggaagcaacagtctccatctgcccgtgccctccagttgcccagatggtttcaagatcctgcttcgccagtgctggaatagcaaaccacgaaatcgcccatcattccgacagatcctgctgcatctggacattgcctcagctgatgtactctccacaccccaggagacttactttaagtcccaggcagagtggcgggaagaagtaaaactgcactttgaaaagattaagtcagaagggacctgtctgcaccgcctagaagaggaactggtgatgaggaggagggaggagctcagacacgccctggacatcagggagcactatgaaaggaagctggagagagccaacaacctgtatatggaacttaatgccctcatgttgcagctggaactcaaggagagggagctgctcaggcgagagcaagctttagagcggaggtgcccaggcctgctgaagccacacccttcccggggcctcctgcatggaaacacaatggagaagcttatcaagaagaggaatgtgccacagaagctgtcaccccatagcaaaaggccagatatcctcaagacggagtctttgctccctaaactagatgcagccctgagtggggtggggcttcctgggtgtcctaagggccccccctcaccaggacggagtcgccgtggcaagacccgtcaccgcaaggccagcgccaaggggagctgtggggacctgcctgggcttcgtacagctgtgccaccccatgaacctggaggaccaggaagcccagggggcctaggagggggaccctcagcctgggaggcctgccctcccgccctccgtgggcttcatcatgacctcctgctccgcaaaatgtcttcatcgtccccagacctgctgtcagcagcactagggtcccggggccggggggccacaggcggagctggggatcctggctcaccacctccggcccggggtgacaccccaccaagtgagggctcagcccctggctccaccagcccagattcacctgggggagccaaaggggaaccacctcctccagtagggcctggtgaaggtgtggggcttctgggaactggaagggaagggacctcaggccggggaggaagccgggctgggtcccagcacttgaccccagctgcactgctgtacagggctgccgtcacccgaagtcagaaacgtggcatctcatcggaagaggaggaaggagaggtagacagtgaagtagagctgacatcaagccagaggtggcctcagagcctgaacatgcgccagtcactatctaccttcagctcagagaatccatcagatggggaggaaggcacagctagtgaaccttcccccagtggcacacctgaagttggcagcaccaacactgatgagcggccagatgagcggtctgatgacatgtgctcccagggctcagaaatcccactggacccacctccttcagaggtcatccctggccctgaacccagctccctgcccattccacaccaggaacttctcagagagcggggccctcccaattctgaggactcagactgtgacagcactgaattggacaactccaacagcgttgatgccttgcggcccccagcttccctccctccatgaaagccactcgtattccttgtacatagagaaatatttatataaattatatatatatacatatatatatatatatgcgccacataatcaacagaaagatggggctgtcccagccgtaagtcaggctcgagggagactgatcccctgaccaattcacctgataaactctagggacactggcagctgtggaaatgaatgaggcacagccgtagagctgtggctaagggcaagccccttcctgccccaccccattccttatattcagcaagcaacaaggcaatagaaaagccagggttgtctttatattctttatccccaaataatagggggtggggggaggggcggtgggaggggcaggagagaaaaccacttagactgcacttttctgttccgtttactctgtttacacattttgcacttgggaggagggaggctaaggctgggtcctcccctctgaggtttctcaggtggcaatgtaactcatttttttgtcccaccatttatcttctctgcccaagccctgtcttaaggcccagggggaggttaggagactgatagcatgtgatggctcaggctgaagaaccggggtgctgtttaagtccctgcttttatcctggtgcctgattggggtggggactgtcctactgtaacccctgtgaaaaaccttgaaatataacactccatgcagg

SEQ ID NO: 18515 - DNA, 9876 bp, Homo sapiens
  source 1..9876: mol_type = unassigned DNA
ccctcttttttttttcatgacacacaccacagcgaagtctgtgcggaatcctaaaccagcccaatttacatccattcatgaatctgtgacgtcagcaagcctttgggctcctttgcggtgggctggaggattgtgtgggtggaatccccctcccctttatttttccaattctgcaaggcttttaaaattcaccttacatcttttcaaagcaagaaaatggaacagcatgtgtaggaattcttcgttgttgttttggagccctctcttaagtcagaactctgtcccaaaaatcttctgagtgtcatctcaggactttggttatactcatggcacgatggccaactttcaggagcacctgagctgctcctcttctccacacttacccttcagtgaaagcaaaaccttcaatggactacaagatgagctcacagctatggggaaccacccttctcccaagctgctcgaggaccagcaggaaaaggggatggtacgaacagagctaatcgagagcgtgcacagccccgtcaccacaacagtgttgacgagcgtaagtgaggattccagggaccagtttgagaacagcgttcttcagctaagggaacacgatgaatcagagacggcggtgtctcaggggaacagcaacacggtggacggagagagcacaagcggaactgaagacataaagattcagttcagcaggtcaggcagtggcagtggtgggtttcttgaaggactatttggatgcttaaggcctgtatggaatatcattgggaaggcatattccactgattacaaattgcagcagcaagatacttgggaagtgccatttgaggagatctcagagctgcagtggctgggtagtggagcccaaggagcggtcttcttgggcaagttccgggcggaagaggtggccatcaagaaagtgagagaacagaatgagacggatatcaagcatttgaggaagttgaagcaccctaacatcatcgcattcaagggtgtttgtactcaggccccatgttattgtattatcatggaatactgtgcccatggacaactctacgaggtcttacgagctggcaggaagatcacacctcgattgctagtagactggtccacaggaattgcaagtggaatgaattatttgcacctccataaaattattcatcgtgatctcaaatcacctaatgttttagtgacccacacagatgcggtaaaaatttcagattttggtacatctaaggaactcagtgacaaaagtaccaagatgtcatttgctggcacggtcgcatggatggcgccagaggtgatacggaatgaacctgtctctgaaaaagttgatatatggtcttttggagtggtgctttgggagctgctgacaggagagatcccttacaaagatgtagattcttcagccattatctggggtgttggaagcaacagcctccaccttccagttccttccacttgccctgatggattcaaaatccttatgaaacagacgtggcagagtaaacctcgaaaccgaccttcttttcggcagacactcatgcatttagacattgcctctgcagatgtacttgccaccccacaagaaacttacttcaagtctcaggctgaatggagagaagaagtgaaaaaacattttgagaagatcaaaagtgaaggaacttgtatacaccggttagatgaagaactgattcgaaggcgcagagaagagctcaggcatgcgctggatattcgtgaacactatgagcggaagcttgagcgggcgaataatttatacatggaattgagtgccatcatgctgcagctagaaatgcgggagaaggagctcattaagcgtgagcaagcagtggaaaagaagtatcctgggacctacaaacgacaccctgttcgtcctatcatccatcccaatgccatggagaaactcatgaaaaggaaaggagtgcctcacaaatctgggatgcagaccaaacggccagacttgttgagatcagaagggatccccaccacagaagtggctcccactgcatcccctttgtccggaagtcccaaaatgtccacttctagcagcaagagccgatatcgaagcaaaccacgccaccgccgagggaatagcagaggcagccatagtgactttgccgcaatcttgaaaaaccagccagcccaggaaaattcaccccatcccacttacctgcaccaagctcaatcccaatacccttctcttcatcaccataattctctgcagcagcaataccagcagccccctcctgccatgtcccagagtcaccatcccagactcaatatgcacggacaggacatagcaacctgcgccaacaacctgaggtatttcggcccagcagcagccctgcggagcccactcagcaaccatgctcagagacagctgcccggctcgagccctgacctcatctccacagccatggctgcagactgctggagaagttctgagcctgacaagggccaagctggtccctggggctgttgccaggctgacgcttatgacccctgccttcagtgcaggccagaacagtatgggtccttagacataccctctgctgagccagtggggaggagccctgacctttccaagtcaccagcacataatcctctcttggaaaacgcccagagttctgagaaaacggaagaaaatgaattcagcggctgtaggtctgagtcatccctcggcacctctcatctcggcacccctccagcgctacctcgaaaaacaaggcctctgcagaagagtggagatgactcctcagaagaggaagaaggggaagtagatagtgaagttgaatttccacgaagacagaggccccatcgctgtatcagcagctgccagtcatattcaacctttagctctgagaatttctctgtgtctgatggagaagagggaaataccagtgaccactcaaacagtcctgatgagttagctgataaacttgaagaccgcttggcagagaagctagacgacctgctgtcccagacgccagagattcccattgacatatcctcacactcggatgggctctctgacaaggagtgtgccgtgcgccgtgtgaagactcagatgtctctgggcaagctgtgtgtggaggaacgtggctatgagaaccccatgcagtttgaagaatcggactgtgactcttcagatggggagtgttctgatgccacagttaggaccaataaacactacagctctgctacctggtaatgaaggaatacacatcctgaagatctcgtgactatactggcatttcagatccaccccacccccagactcatcccactctctcccagcattttgtctgggaagagagactaccccatctttaccaccccctagaaatgagctgcaataacaggaacatgagacttcgcaaatctctggaaaataatatccaaatgaaattaagtctcactgaacatttcaatcaagaatggcagggatctattttattgaatattctagctactgtaacattgatatttatttttgtttgacattttaacactttgtactgcaaagagtgaactatatatgagatagagagacaataatttcttgcaaaaaaaaaaagagataaaagaaagaacagaaaaaaagaaataagtggaatttaagagcaacatccttgggaatttgtggggccgggaggtattattgctgcttgaacaggggaccaggtcttttggccataagtgactaaagaagagccagagcaagacattgaacattttagaacacaaagaacagcaaaagaaaagcaattccaggcaacttgtgaacagaccatattcacttcaaccagcttgtccaggtggcttacggaaatgacctagaaaagtctggtgaccagatacttgcacccaatgtcttcaagggcatgtgcttcctctaggagggaaaaacagacaaacaaacaaacaaacaaacctgtgtatgtggaagctggtttcatttttaaatgtttaagcagcagttggtagtgaggtttacagatagtgtcaaatcttgtttttggcaaatacgtccctttttagtgctgtcactgtcattaccttggcaaatgtgctaccttgacccaacgtgttgatctttcatactcaagtgccatttccttgtagctcatttcctttctgcctgctgaccacttcctgtaggaacaaaggttggggggcagtactgaggaggagaaaagggtgagagaggaagaacatctacagtggtgttaggaaaacgaacgtggaatttataaaactccattctcaggatcactcagttcagctacgaggagaagatggaaccacccctctctggagccaggttgcttgtctacttgagtcatattgattcaagcaggagaacagactttgaaggcagctaggatgtatgtgtgtctatacaatgtctgagcccaaaccatccctttgtttttattcaataactcattctatcttagaagttcttttttttttttttttttttgacagagttttgctctttttgcccaggctagagtgcaatggcacaatctcagttcactgcaacctccatctcccaggttcaagcgattctcctgcctcagcctcccgagtagctgggattacaggcgcccgcaaccacgcctggctaattttgtatttttagtagacacggggtttcaccatgttggccaggcttgtctcaaactcctgacctcaggtgatccgcctgcctcggcctcccaaagtgctgggattacaggcatcagccactgtgcccggcctatcttagaagtcttaatgactggctaccactgtcagaataaaagcaaaaacaagcagcttgcaaaaggcaactcctctcccagcacaatagcatttttgttcaatgctacttgtaaaatatcttttacttcactccaaatcaatgcagttttaaataactggatttgaacatttgtggaaagaacaagggatgctgagcagggataggaaggatttttacattgccaaaagcatgaggtcctgcctgtctccagggtcatgggctctgaaaagcattccaaggtacttcatggtgccttggccttaaggaaaaatttttttagaattttatgtacaaataggtgttgacctagtacctgtccctgtctccaagacagattaccgtcaaacaacctctctagattcactggactctttgacactgcatcatgttggacgttaggaaatacttgcacagacagctgttaaaccatttccaatgcacatgaaaatgttgccgctcctctgggttttactgattgcatcagccaaaaaggaaaggcaggagggaatttagagttccttttgcttgtttgatccatttgtttacactttatgttgatacattgatttaaaatgtagtgtctgtgatttatagctcttaggatgaaggaaaatgtttaatttatacaaagagcagtattgtttgcattaatttattccattttgtaaaaattctgtagctggactacatgaaagatcttaagttatggcattattatcattgttattttattttataatattatcattctcattttctgtcgatcagaaggtgtgatttatgatgtggcacaatggttgtgtttattgctaaccaggaattattatggattttatgattttaatgaaggaatgaaaatggaattcccatttgggagctccctggtattgatcttagctgtgttccctaattttctgtgtacaacaatcatctgaggacgcatgttctgccctgaagcccaatggatacattgtgattttgacttgatcatgaaagctcctgggtgggccgatgacccccaggatgtcaaatagtggatggacatatagttaaaaagctgtaaactttctaaagtttcttaggaaataaattcatgggactatattagaaataaaaagagaatgatttaatgtcctgagaggaacagacctagagggtttccgcacagggctcatggattcgtttcaagaattgacaacatagtttgcaatctccttcctgccagacccctttgttctcccacctttattctcctagtggagagtagcagggagactaaaaaaagaaatggtatacagtagtcccctcttacccatggcttcattttcatggtttcagttacgctcaacagcagtccaaaaatatttgatggaacattccagaaataaacaattcataaattttaattgcacagcattctgaggagcatgatgagatcttgccccttgctgccctggaggtgatcctccctctgtccagcatattcatgctgctcatccattagtcacttagtagcagtctcggtgatcagatcgactgtctcggttatcagatgactgtatcgcagtgcttgtgttcaagtacccctatttaattaataatagccccaaagggcaagagtgctgtgcctaatttacaaattaaattttatcatagatatgtaagtatagaaaaaaaaacatagtatatatagggtttggtactatcagagtttttaggcatccactgggggtcttggaatgtatcccccagaaataagggaggactaccgtatatacatgtagggcatgacataaaatgcctaactgtgatgtcatcctagaacaagactaaagaactttaagaaggaggcctggtcacttagaggaccaacgactggaaaaaaattcttgaaaggctatattttccatcctcttgacttcagatctcactgtactgtaaatctctctggttcattattccttggaacagagatgctacaactctatgtcttctttctatccaacataaaacactggcagttttgtccaattcttgcccacctttagtggcaacagagaaacatgagggtcagcttttatcttacatctttcagtgatggtcttcctagaaaacctacccctgatacctcgtaattttgatcagttttttttgaattctcatcttgattatctgttatgctattgtcatcatacaccttatgtggattaactgttatgagtatgttagggtagtacgtagtggctgaatctcagtcattcattgtatagtcgagagttgaataaagtccatattgaacacatttttttaagtagaattgactagaggtttcagaggagaataaggtccttagtggaggttaaaaagggaaataccttctctagcccagcctggtccttcgctgcctgccttgtgataaccgggaaaatcttgaattgatgtatgtttctttgagaacgactccacagtcatctgaagagtgttgaatcaagagctcagggaagttatgagctaattcttcagtcctgacaagtgtgttacaacagtgcttccaggaacctcacaagactgtgatttcaagctgcttcattgatggaaagtttcaccatcttgggatgaatgtccatgttccgttagcgtctgtttttaactgactgcaagatgatgagttttaatttgggttgcagatgagcatttggttctgattttcatctatttcaagatcatatcctctggataacagttccttttaaaattgctttgcagaggggctgagaagcctgcatctactttgaaattataatggaccttaccaccacttaagtttagacctgtttgcaagatggtggggagctcctactgagaaagatgaagatgctagctctattgtaaactggcgtcttcatctagctacttgaagttgagatactatattttaaaatgttggcatcaaacaaatctatccttctagaagtaaagacattttgagtaggatttagtaagtactggacatctcctgtagagcttcatcatgctaaattattcccctctccttttctaaataatagatgtgcttgggtttgggatttacctggcaccaacccagactttttttgggggggggtgagggcgcaggatctcactctgtcaccaggttggagtacagtggcatgattatggctcactgcagcctcaacctcctgggctcaagtgatcctcccacctcagcctcctgagtagctgggaccacaggtgtgtgccaccatgcacaacaattttttttttttttttgtagagatgggcgtctccctgtgttgcccaggctggtatcgaactctgggctctagcgatcctcctgctttggcctcccaaagtactgggattacaaacgtgagctgccatgcccagcctccagactattttaaatgccctctcccactgtggaacattggcatcctttaagaataaatgcatcctttttgatcaaatgatttactctttttttcttcaatgtcctcatgtctcaatttttttttccttttcttaaaacagtcccacttgaacttcctggaactgaattctccagaacataatatttataatccatagaattcctgccctgctctgcagtagagtgtgctatgttttgttttcccactgagccagaagccgaaatattatactaccacttaccaccatctaccacctccaagaccaagaccaacattatgtattgagcatcgtatctttcctactgagcctagacacagcctcagaacctctcaacatagcacttggagcaacaattgccgcttgattggaattgccatttgagcttgagttagccccaatggcagaacgacaggctcgcactagtgtccacctgtggctgtcaggggcggtaccacagaaaggggaaaggccacttgcctctacccactgcccttttggacaacaattccaattgaaggaacaccaatcactgatggatcccattccaaaatgtctcttcattcacatcatttaattctgttgaatgaatatgttcctccctcaccttttataaacagaaaattaatataagtcccagttacttgcttcttagactctgtgagactcatgtaccaaaacaatgtgacattcttttcgagactttgacttgtacggtcagtatgaatttagtgcctttccaggcagcaaaatgtttcttctttgctgatttcataggacaaatatcctagcatactcacaccaccagtgtcccaccctcacagactggcacattagaatcatattaatctgcttgtttgcatgttacaactgatactgcaaaagcctattcaagtcggactgaactaggctaagcagaggacccttgtggaacctggagcatttctcagggacaggtggctaaagaggggagctctaaaatcactgctctgagaaacaggaggtgggttaaggcttttgttaactgtcatgtggccagggtacgatggcaggacttcacagagcagagccctaagcagatggcaaggccactgtaaggaagctcccggcagcatcccaggtctgctctccagagccacttcacagcactcagggatcgctggctcccggccctaggctgctgtccagtgaccaggtggacagggtcctccagtgactgcaggccaagggaaccccagccagcatgtgcaagctattaggaagatgtcccatcttgcccatatcaccccagtggctcttcaccttcagagtgaccacttcccagactctggaagtgggaagaccctctttgacgctttattacagtaatttgagctcctatcgacttggagcgaatgaatttctcttttgtggttaggtctccaaatgaacctccttacctggctcccctctggtctcctgtactgtcagtccccagctcccagtgttgttttctgatgccggctccctctctgtattgaacggcaatgggaacaagaatgactatcaaagcaaacaaatgcatggaattaaacaaaaagtgtacttcactg

SEQ ID NO: 18516 - DNA, 3156 bp, Homo sapiens
  source 1..3156: mol_type = unassigned DNA
tgggtggggcggagcgtctgggatgcgctgggagcctaggatccccgacagaacactgaaatctatggactctaaaatggacttcatttaaagaaacccacggaccattaatggacaaaaacatgagtcaatatgtattgtggcattcaaatcctagcactctgggagaggttttggagccctctcttaagtcagaactctgtcccaaaaatcttctgagtgtcatctcaggactttggttatactcatggcacgatggccaactttcaggagcacctgagctgctcctcttctccacacttacccttcagtgaaagcaaaaccttcaatggactacaagatgagctcacagctatggggaaccacccttctcccaagctgctcgaggaccagcaggaaaaggggatggtacgaacagagctaatcgagagcgtgcacagccccgtcaccacaacagtgttgacgagcgtaagtgaggattccagggaccagtttgagaacagcgttcttcagctaagggaacacgatgaatcagagacggcggtgtctcaggggaacagcaacacggtggacggagagagcacaagcggaactgaagacataaagattcagttcagcaggtcaggcagtggcagtggtgggtttcttgaaggactatttggatgcttaaggcctgtatggaatatcattgggaaggcatattccactgattacaaattgcagcagcaagatacttgggaagtgccatttgaggagatctcagagctgcagtggctgggtagtggagcccaaggagcggtcttcttgggcaagttccgggcggaagaggtggccatcaagaaagtgagagaacagaatgagacggatatcaagcatttgaggaagttgaagcaccctaacatcatcgcattcaagggtgtttgtactcaggccccatgttattgtattatcatggaatactgtgcccatggacaactctacgaggtcttacgagctggcaggaagatcacacctcgattgctagtagactggtccacaggaattgcaagtggaatgaattatttgcacctccataaaattattcatcgtgatctcaaatcacctaatgttttagtgacccacacagatgcggtaaaaatttcagattttggtacatctaaggaactcagtgacaaaagtaccaagatgtcatttgctggcacggtcgcatggatggcgccagaggtgatacggaatgaacctgtctctgaaaaagttgatatatggtcttttggagtggtgctttgggagctgctgacaggagagatcccttacaaagatgtagattcttcagccattatctggggtgttggaagcaacagcctccaccttccagttccttccacttgccctgatggattcaaaatccttatgaaacagacgtggcagagtaaacctcgaaaccgaccttcttttcggcagacactcatgcatttagacattgcctctgcagatgtacttgccaccccacaagaaacttacttcaagtctcaggctgaatggagagaagaagtgaaaaaacattttgagaagatcaaaagtgaaggaacttgtatacaccggttagatgaagaactgattcgaaggcgcagagaagagctcaggcatgcgctggatattcgtgaacactatgagcggaagcttgagcgggcgaataatttatacatggaattgagtgccatcatgctgcagctagaaatgcgggagaaggagctcattaagcgtgagcaagcagtggaaaagaagtatcctgggacctacaaacgacaccctgttcgtcctatcatccatcccaatgccatggagaaactcatgaaaaggaaaggagtgcctcacaaatctgggatgcagaccaaacggccagacttgttgagatcagaagggatccccaccacagaagtggctcccactgcatcccctttgtccggaagtcccaaaatgtccacttctagcagcaagagccgatatcgaagcaaaccacgccaccgccgagggaatagcagaggcagccatagtgactttgccgcaatcttgaaaaaccagccagcccaggaaaattcaccccatcccacttacctgcaccaagctcaatcccaatacccttctcttcatcaccataattctctgcagcagcaataccagcagccccctcctgccatgtcccagagtcaccatcccagactcaatatgcacggacaggacatagcaacctgcgccaacaacctgaggtatttcggcccagcagcagccctgcggagcccactcagcaaccatgctcagagacagctgcccggctcgagccctgacctcatctccacagccatggctgcagactgctggagaagttctgagcctgacaagggccaagctggtccctggggctgttgccaggctgacgcttatgacccctgccttcagtgcaggccagaacagtatgggtccttagacataccctctgctgagccagtggggaggagccctgacctttccaagtcaccagcacataatcctctcttggaaaacgcccagagttctgagaaaacggaagaaaatgaattcagcggctgtaggtctgagtcatccctcggcacctctcatctcggcacccctccagcgctacctcgaaaaacaaggcctctgcagaagagtggagatgactcctcagaagaggaagaaggggaagtagatagtgaagttgaatttccacgaagacagaggccccatcgctgtatcagcagctgccagtcatattcaacctttagctctgagaatttctctgtgtctgatggagaagagggaaataccagtgaccactcaaacagtcctgatgagttagctgataaacttgaagaccgcttggcagagaagctagacgacctgctgtcccagacgccagagattcccattgacatatcctcacactcggatgggctctctgacaaggagtgtgccgtgcgccgtgtgaagactcagatgtctctgggcaagctgtgtgtggaggaacgtggctatgagaaccccatgcagtttgaagaatcggactgtgactcttcagatggggagtgttctgatgccacagttaggaccaataaacactacagctctgctacctggtaa

SEQ ID NO: 18517 - DNA, 573 bp, Homo sapiens
  source 1..573: mol_type = unassigned DNA
aaagtttagtttagtctgtgaggaaactggcggctgctggtagttccatgctgtctgttcagacttcagcttggtgttttggagccctctcttaagtcagaactctgtcccaaaaatcttctgagtgtcatctcaggactttggttatactcatggcacgatggccaactttcaggagcacctgagctgctcctcttctccacacttacccttcagtgaaagcaaaaccttcaatggactacaagatgagctcacagctatggggaaccacccttctcccaagctgctcgaggaccagcaggaaaaggggatggtacgaacagagctaatcgagagcgtgcacagccccgtcaccacaacagtgttgacgagcgtaagtgaggattccagggaccagtttgagaacagcgttcttcagctaagggaacacgatgaatcagagacggcggtgtctcaggggaacagcaacacggtggacggagagagcacaagcggaactgaagacataaagattcagttcagcaggtcaggcagtggcagtggtgggtttcttgaaggactatttggatgctt

SEQ ID NO: 18518 - DNA, 618 bp, Homo sapiens
  source 1..618: mol_type = unassigned DNA
gtggagggtgacgccatgggtggggcggagcgtctgggatgcgctgggagcctaggatccccgacagttttgcagaacactgaaatctatggactctaaaatggacttcatttaaagaaacccacggaccattaatggacaaaaacatgagtcaatatgtattgtggcattcaaatcctagcactctgggagaggttttggagccctctcttaagtcagaactctgtcccaaaaatcttctgagtgtcatctcaggactttggttatactcatggcacgatggccaactttcaggagcacctgagctgctcctcttctccacacttacccttcagtgaaagcaaaaccttcaatggactacaagatgagctcacagctatggggaaccacccttctcccaagctgctcgaggaccagcaggaaaaggggatggtacgaacagagctaatcgagagcgtgcacagccccgtcaccacaacagtgttgacgagcgtaagtgaggattccagggaccagtttgagaacagcgttcttcagctaagggaacacgatgaatcagagacggcggtgtctcaggggaacagcaacacggtggacggagagagcacaagcggaact

SEQ ID NO: 18519 - DNA, 2824 bp, Homo sapiens
  source 1..2824: mol_type = unassigned DNA
atgtcttatgttgagtgcaagtgtttacagttagaaaataaaaatacttgggaagtgccatttgaggagatctcagagctgcagtggctgggtagtggagcccaaggagcggtcttcttgggcaagttccgggcggaagaggtggccatcaagaaagtgagagaacagaatgagacggatatcaagcatttgaggaagttgaagcaccctaacatcatcgcattcaagggtgtttgtactcaggccccatgttattgtattatcatggaatactgtgcccatggacaactctacgaggtcttacgagctggcaggaagatcacacctcgattgctagtagactggtccacaggaattgcaagtggaatgaattatttgcacctccataaaattattcatcgtgatctcaaatcacctaatgttttagtgacccacacagatgcggtaaaaatttcagattttggtacatctaaggaactcagtgacaaaagtaccaagatgtcatttgctggcacggtcgcatggatggcgccagaggtgatacggaatgaacctgtctctgaaaaagttgatatatggtcttttggagtggtgctttgggagctgctgacaggagagatcccttacaaagatgtagattcttcagccattatctggggtgttggaagcaacagcctccaccttccagttccttccacttgccctgatggattcaaaatccttatgaaacagacgtggcagagtaaacctcgaaaccgaccttcttttcggcagacactcatgcatttagacattgcctctgcagatgtacttgccaccccacaagaaacttacttcaagtctcaggctgaatggagagaagaagtgaaaaaacattttgagaagatcaaaagtgaaggaacttgtatacaccggttagatgaagaactgattcgaaggcgcagagaagagctcaggcatgcgctggatattcgtgaacactatgagcggaagcttgagcgggcgaataatttatacatggaattgagtgccatcatgctgcagctagaaatgcgggagaaggagctcattaagcgtgagcaagcagtggaaaagaagtatcctgggacctacaaacgacaccctgttcgtcctatcatccatcccaatgccatggagaaactcatgaaaaggaaaggagtgcctcacaaatctgggatgcagaccaaacggccagacttgttgagatcagaagggatccccaccacagaagtggctcccactgcatcccctttgtccggaagtcccaaaatgtccacttctagcagcaagagccgatatcgaagcaaaccacgccaccgccgagggaatagcagaggcagccatagtgactttgccgcaatcttgaaaaaccagccagcccaggaaaattcaccccatcccacttacctgcaccaagctcaatcccaatacccttctcttcatcaccataattctctgcagcagcaataccagcagccccctcctgccatgtcccagagtcaccatcccagactcaatatgcacggacaggacatagcaacctgcgccaacaacctgaggtatttcggcccagcagcagccctgcggagcccactcagcaaccatgctcagagacagctgcccggctcgagccctgacctcatctccacagccatggctgcagactgctggagaagttctgagcctgacaagggccaagctggtccctggggctgttgccaggctgacgcttatgacccctgccttcagtgcaggccagaacagtatgggtccttagacataccctctgctgagccagtggggaggagccctgacctttccaagtcaccagcacataatcctctcttggaaaacgcccagagttctgagaaaacggaagaaaatgaattcagcggctgtaggtctgagtcatccctcggcacctctcatctcggcacccctccagcgctacctcgaaaaacaaggcctctgcagaagagtggagatgactcctcagaagaggaagaaggggaagtagatagtgaagttgaatttccacgaagacagaggccccatcgctgtatcagcagctgccagtcatattcaacctttagctctgagaatttctctgtgtctgatggagaagagggaaataccagtgaccactcaaacagtcctgatgagttagctgataaacttgaagaccgcttggcagagaagctagacgacctgctgtcccagacgccagagattcccattgacatatcctcacactcggatgggctctctgacaaggagtgtgccgtgcgccgtgtgaagactcagatgtctctgggcaagctgtgtgtggaggaacgtggctatgagaaccccatgcagtttgaagaatcggactgtgactcttcagatggggagtgttctgatgccacagttaggaccaataaacactacagctctgctacctggtaatgaaggaatacacatcctgaagatctcgtgactatactggcatttcagatccaccccacccccagactcatcccactctctcccagcattttgtctgggaagagagactaccccatctttaccaccccctagaaatgagctgcaataacaggaacatgagacttcgcaaatctctggaaaataatatccaaatgaaattaagtctcactgaacatttcaatcaagaatggcagggatctattttattgaatattctagctactgtaacattgatatttatttttgtttgacattttaacactttgtactgcaaagagtgaactatatatgagatagagagacaataatttcttgc

SEQ ID NO: 18520 - DNA, 2737 bp, Homo sapiens
  source 1..2737: mol_type = unassigned DNA
acctggttgtggagggtgacgccatgggtggggcggagcgtctgggatgcgctgggagcctaggatccccgacagttttgcagaacactgaaatctatggactctaaaatggacttcatttaaagaaacccacggaccattaatggacaaaaacatgagtcaatatgtattgtggcattcaaatcctagcactctgggagaggggtgtttgtactcaggccccatgttattgtattatcatggaatactgtgcccatggacaactctacgaggtcttacgagctggcaggaagatcacacctcgattgctagtagactggtccacaggaattgcaagtggaatgaattatttgcacctccataaaattattcatcgtgatctcaaatcacctaatgttttagtgacccacacagatgcggtaaaaatttcagattttggtacatctaaggaactcagtgacaaaagtaccaagatgtcatttgctggcacggtcgcatggatggcgccagaggtgatacggaatgaacctgtctctgaaaaagttgatatatggtcttttggagtggtgctttgggagctgctgacaggagagatcccttacaaagatgtagattcttcagccattatctggggtgttggaagcaacagcctccaccttccagttccttccacttgccctgatggattcaaaatccttatgaaacagacgtggcagagtaaacctcgaaaccgaccttcttttcggcagacactcatgcatttagacattgcctctgcagatgtacttgccaccccacaagaaacttacttcaagtctcaggctgaatggagagaagaagtgaaaaaacattttgagaagatcaaaagtgaaggaacttgtatacaccggttagatgaagaactgattcgaaggcgcagagaagagctcaggcatgcgctggatattcgtgaacactatgagcggaagcttgagcgggcgaataatttatacatggaattgagtgccatcatgctgcagctagaaatgcgggagaaggagctcattaagcgtgagcaagcagtggaaaagaagtatcctgggacctacaaacgacaccctgttcgtcctatcatccatcccaatgccatggagaaactcatgaaaaggaaaggagtgcctcacaaatctgggatgcagaccaaacggccagacttgttgagatcagaagggatccccaccacagaagtggctcccactgcatcccctttgtccggaagtcccaaaatgtccacttctagcagcaagagccgatatcgaagcaaaccacgccaccgccgagggaatagcagaggcagccatagtgactttgccgcaatcttgaaaaaccagccagcccaggaaaattcaccccatcccacttacctgcaccaagctcaatcccaatacccttctcttcatcaccataattctctgcagcagcaataccagcagccccctcctgccatgtcccagagtcaccatcccagactcaatatgcacggacaggacatagcaacctgcgccaacaacctgaggtatttcggcccagcagcagccctgcggagcccactcagcaaccatgctcagagacagctgcccggctcgagccctgacctcatctccacagccatggctgcagactgctggagaagttctgagcctgacaagggccaagctggtccctggggctgttgccaggctgacgcttatgacccctgccttcagtgcaggccagaacagtatgggtccttagacataccctctgctgagccagtggggaggagccctgacctttccaagtcaccagcacataatcctctcttggaaaacgcccagagttctgagaaaacggaagaaaatgaattcagcggctgtaggtctgagtcatccctcggcacctctcatctcggcacccctccagcgctacctcgaaaaacaaggcctctgcagaagagtggagatgactcctcagaagaggaagaaggggaagtagatagtgaagttgaatttccacgaagacagaggccccatcgctgtatcagcagctgccagtcatattcaacctttagctctgagaatttctctgtgtctgatggagaagagggaaataccagtgaccactcaaacagtcctgatgagttagctgataaacttgaagaccgcttggcagagaagctagacgacctgctgtcccagacgccagagattcccattgacatatcctcacactcggatgggctctctgacaaggagtgtgccgtgcgccgtgtgaagactcagatgtctctgggcaagctgtgtgtggaggaacgtggctatgagaaccccatgcagtttgaagaatcggactgtgactcttcagatggggagtgttctgatgccacagttaggaccaataaacactacagctctgctacctggtaatgaaggaatacacatcctgaagatctcgtgactatactggcatttcagatccaccccacccccagactcatcccactctctcccagcattttgtctgggaagagagactaccccatctttaccaccccctagaaatgagctgcaataacaggaacatgagacttcgcaaatctctggaaaataatatccaaatgaaattaagtctcactgaacatttcaatcaagaatggcagggatctattttattgaatattctagctactgtaacattgatatttatttttgtttgacat

SEQ ID NO: 18521 - DNA, 4465 bp, Homo sapiens
  source 1..4465: mol_type = unassigned DNA
gggagctcagcggtcggcggccggcggcgggagatcgcgggcgagcggagcgcaacactcgcttggttggggagatcggcgcttggccggatgagcacaagcctgggagatggcagtgatggaaatggcctgcccaggtgcccctggctcagcagtggggcagcagaaggaactccccaaagccaaggagaagacgccgccactggggaagaaacagagctccgtctacaagcttgaggccgtggagaagagccctgtgttctgcggaaagtgggagatcctgaatgacgtgattaccaagggcacagccaaggaaggctccgaggcagggccagctgccatctctatcatcgcccaggctgagtgtgagaatagccaagagttcagccccaccttttcagaacgcattttcatcgctgggtccaaacagtacagccagtccgagagtcttgatcagatccccaacaatgtggcccatgctacagagggcaaaatggcccgtgtgtgttggaagggaaagcgtcgcagcaaagcccggaagaaacggaagaagaagagctcaaagtccctggctcatgcaggagtggccttggccaaacccctccccaggacccctgagcaggagagctgcaccatcccagtgcaggaggatgagtctccactcggcgccccatatgttagaaacaccccgcagttcaccaagcctctgaaggaaccaggccttgggcaactctgttttaagcagcttggcgagggcctacgggctctgcctcgatcagaactccacaaactgatcagccccttgcaatgtctgaaccacgtgtggaaactgcaccacccccaggacggaggccccctgcccctgcccacgcaccccttcccctatagcagactgcctcatcccttcccattccaccctctccagccctggaaacctcaccctctggagtccttcctgggcaaactggcctgtgtagacagccagaaacccttgcctgacccacacctgagcaaactggcctgtgtagacagtccaaagcccctgcctggcccacacctggagcccagctgcctgtctcgtggtgcccatgagaagttttctgtggaggaatacctagtgcatgctctgcaaggcagcgtgagctcaggccaggcccacagcctgaccagcctggccaagacctgggcagcaaggggctccagatcccgggagcccagccccaaaactgaggacaacgagggtgtcctgctcactgagaaactcaagccagtggattatgagtaccgagaagaagtccactgggccacgcaccagctccgcctgggcagaggctccttcggagaggtgcacaggatggaggacaagcagactggcttccagtgcgctgtcaaaaaggtgcggctggaagtatttcgggcagaggagctgatggcatgtgcaggattgacctcacccagaattgtccctttgtatggagctgtgagagaagggccttgggtcaacatcttcatggagctgctggaaggtggctccctgggccagctggtcaaggagcagggctgtctcccagaggaccgggccctgtactacctgggccaggccctggagggtctggaatacctccactcacgaaggattctgcatggggacgtcaaagctgacaacgtgctcctgtccagcgatgggagccacgcagccctctgtgactttggccatgctgtgtgtcttcaacctgatggcctgggaaagtccttgctcacaggggactacatccctggcacagagacccacatggctccggaggtggtgctgggcaggagctgcgacgccaaggtggatgtctggagcagctgctgtatgatgctgcacatgctcaacggctgccacccctggactcagttcttccgagggccgctctgcctcaagattgccagcgagcctccgcctgtgagggagatcccaccctcctgcgcccctctcacagcccaggccatccaagaggggctgaggaaagagcccatccaccgcgtgtctgcagcggagctgggagggaaggtgaaccgggcactacagcaagtgggaggtctgaagagcccttggaggggagaatataaagaaccaagacatccaccgccaaatcaagccaattaccaccagaccctccatgcccagccgagagagctttcgccaagggccccagggccccggccagctgaggagacaacaggcagagcccctaagctccagcctcctctcccaccagagcccccagagccaaacaagtctcctcccttgactttgagcaaggaggagtctgggatgtgggaacccttacctctgtcctccctggagccagcccctgccagaaaccccagctcaccagagcggaaagcaaccgtcccggagcaggaactgcagcagctggaaatagaattattcctcaacagcctgtcccagccattttctctggaggagcaggagcaaattctctcgtgcctcagcatcgacagcctctccctgtcggatgacagtgagaagaacccatcaaaggcctctcaaagctcgcgggacaccctgagctcaggcgtacactcctggagcagccaggccgaggctcgaagctccagctggaacatggtgctggcccgggggcggcccaccgacaccccaagctatttcaatggtgtgaaagtccaaatacagtctcttaatggtgaacacctgcacatccgggagttccaccgggtcaaagtgggagacatcgccactggcatcagcagccagatcccagctgcagccttcagcttggtcaccaaagacgggcagcctgttcgctacgacatggaggtgccagactcgggcatcgacctgcagtgcacactggcccctgatggcagcttcgcctggagctggagggtcaagcatggccagctggagaacaggccctaaccctgccctccaccgccggctccacactgccggaagcagccttcctgctcggtgcacgatgctgccctgaaacacaggctcagccgttcccagggatctgccagcccccggctcagcagtgggaccagggcctcgcagcagcaaggtgggggcaagcagaatgcctcccaggatttcacacctgagccctgccccaccctgctgagaaaacactccgccacgtgaagagacagaggaggatggcaggagttacctcgggaaacaaacaggatcttctctgccctgctccagtcgagttggcctgacccgcttggatcagtgaccatttgctggcagacaggggagagcagcttccagcctgggtcagaaggggtgggcgagcccctcggcccctcaccctccaggctgctgtgagagtgtcaagtgtgtaagggcccaaactcaggttcagtgcagaaccaggtcagcaggtatgcccgcccgtaggttaagggggccctctaaaccccttgcctggcctcacctggccagctcaccccttttgggtgtaggggaaaagaatgcctgaccctgggaaggctccctggtagaatacaccacacttttcaggttgttgcaacacaggtcctgagttgacctctggttcagccaaggaccaaagaaggtgtgtaagtgaagtggttctcagtccccagacatgtgcccctttgctgctggctaccactcttccccagagcagcaggccccgagccccttcaggcccagcactgccccagactcgctggcactcagttccctcatctgtaaaggtgaagggtgatgcaggatatgcctgacaggaacagtctgtggatggacatgatcagtgctaaggaaagcagcagagagagacgctccggcgccccagccccactatcagtgtccagcgtgctggttccccagagcacagctcagcatcacactgacactcaccctgccctgcccctggccagagggtactgccgacggcactttgcactctgatgacctcaaagcactttcatggctgccctctggcagggcagggcagggcagtgacactgtaggagcatagcaagccaggagatggggtgaagggacacagtcttgagctgtccacatgcatgtgactcctcaaacctcttccagatttctctaagaatagcacccccttccccattgccccagcttagcctcttctcccaggggagctactcaggactcacgtagcattaaatcagctgtgaatcgtcagggggtgtctgctagcctcaacctcctggggcaggggacgccgagactccgtgggagaagctcattcccacatcttgccaagacagcctttgtccagctgtccacattgagtcagactgctcccggggagagagccccggcccccagcacataaagaactgcagccttggtactgcagagtctgggttgtagagaactctttgtaagcaataaagtttggggtgatgacaaatgtttccaggc

SEQ ID NO: 18522 - DNA, 1476 bp, Homo sapiens
  source 1..1476: mol_type = unassigned DNA
tgttttaagcagcttggcgagggcctacgggctctgcctcgatcagaactccacaaactgatcagccccttgcaatgtctgaaccacgtgtggaaactgcaccacccccaggacggaggccccctgcccctgcccacgcaccatcccttcccattccaccctctccagccctggaaacctcaccctctggagtccttcctgggcaaactggcctgtgtagacagccagaaacccttgcctgacccacacctgagcaaactggcctgtgtagacagtccaaagcccctgcctggcccacacctggagcccagctgcctgtctcgtggtgcccatgagaagttttctgtggaggaatacctagtgcatgctctgcaaggcagcgtgagctcaggccaggcccacagcctgaccagcctggccaagacctgggcagcaaggggctccagatcccgggagcccagccccaaaactgaggacaacgagggtgtcctgctcactgagaaactcaagccagtggattatgagtaccgagaagaagtccactgggccacgcaccagctccgcctgggcagaggctccttcggagaggtgcacaggatggaggacaagcagactggcttccagtgcgctgtcaaaaaggtgcggctggaagtatttcgggcagaggagctgatggcatgtgcaggattgacctcacccagaattgtccctttgtatggagctgtgagagaagggccttgggtcaacatcttcatggagctgctggaaggtggctccctgggccagctggtcaaggagcagggctgtctcccagaggaccgggccctgtactacctgggccaggccctggagggtctggaatacctccactcacgaaggattctgcatggggacgtcaaagctgacaacgtgctcctgtccagcgatgggagccacgcagccctctgtgactttggccatgctgtgtgtcttcaacctgatggcctgggaaagtccttgctcacaggggactacatccctggcacagagacccacatggctccggaggtggtgctgggcaggagctgcgacgccaaggtggatgtctggagcagctgctgtatgatgctgcacatgctcaacggctgccacccctggactcagttcttccgagggccgctctgcctcaaggtcggtgacggcacccagcatggccaacagggggagctgcagggccctggggcccaggctgcaggctggaggggctgctctgcggtggcagatggagcaaggggaggcctggtcatccatgtgggatcctaattcaaatacttgccacccaaatctgggggtacaaggggagatccagctgcggaggctcaccaagttcatggcaggtgagaactctcttctgtccataccctgggccccatccacctgcctcctaacgggccgggcctggaggctgtgggcgtcttgctgcctggctctggcctg

SEQ ID NO: 18523 - DNA, 4635 bp, Homo sapiens
  source 1..4635: mol_type = unassigned DNA
atggagagcggcggtgggaatgctccggccggggccctcggggcggcgagcgagtcccctcagtgcccgccgccgccgggggtggagggcgcggccgggccggcggagcccgacggggcggcggagggcgcggcaggcggcagcggcgagggcgagagtgggggcgggccgcggcgggctctgcgggcagtatacgtgcgcagtgagagctcccagggcggcgcggccggcggcccggaggctggggcgcggcagtgcctgctgcgggcctgcgaggccgagggcgctcacctcacctccgtgcccttcggggagctggacttcggggagacggccgtgctcgacgccttctacgacgcagatgttgctgtggtagacatgagcgatgtctccagacagccttccctcttctaccatcttggagtccgagaaagctttgacatggccaataatgtgatcttgtaccatgacaccgatgccgacactgctctctctttgaaggacatggtaactcaaaaaaacacagcatccagtggaaattattatttcatcccatacatcgtgacaccgtgcgctgattatttttgctgcgagagtgatgcccagagacgagcctccgagtacatgcagcccaactgggacaacatcctgggcccgctgtgcatgcctttggtggacaggttcattagcctccttaaggacatccacgtgacctcatgtgtttattacaaagaaaccttgttaaatgacatccggaaagccagagagaaataccaaggtgaggaactggcgaaggagctagctcggatcaagctccgcatggataatactgaggttctgacctcagacatcatcattaacttactcctgtcctaccgtgatatccaggactatgatgcgatggtgaagctggtggaaacactggagatgctgcctacgtgtgatttggccgatcagcataacattaaattccactatgcgtttgcactgaataggagaaacagcacaggtgaccgtgagaaggctctgcagatcatgctccaggttctgcagagctgtgatcacccgggccccgacatgttctgcctgtgtgggaggatctacaaggacatcttcttggattcagactgcaaagatgacaccagccgcgacagcgccattgagtggtatcgcaaagggtttgaactccagtcatccctctattcgggaattaatcttgcagttttgctgattgttgctggacaacaatttgaaacttccttggaactaaggaaaataggtgtccggctgaacagtttgttgggaagaaaagggagcttggagaaaatgaacaattactgggatgtgggtcagttcttcagcgtcagcatgctggcccatgatgtcgggaaagccgtccaggcagcagagaggttgttcaaactgaaacctccagtctggtacctgcgatcattagttcagaacttgttactaattcggcgcttcaagaaaaccattattgaacactcgcccaggcaagagcggctgaacttctggttagatataatttttgaggcaacaaatgaagtcactaatggactcagatttccagttctggtcatagagccaaccaaagtgtaccagccttcttatgtttccataaacaatgaagccgaggagagaacagtttctttatggcatgtctcacccacagaaatgaaacagatgcacgaatggaattttacagcctcttccataaagggaataagcctatcaaagtttgatgaaaggtgttgttttctttatgtccatgataattctgatgactttcaaatctacttttccaccgaagagcagtgcagtagatttttctctttggtcaaagagatgataaccaatacagcaggcagtacggtggagctggagggagagaccgatggagacaccttggagtatgagtatgaccatgatgcaaatggtgagagagttgtcttggggaaaggcacgtatgggattgtgtatgctggccgagatctgagcaatcaagtgcgaatagccatcaaagaaatcccggagagagatagcaggtattctcagcctctgcacgaggagatagccctgcacaagtaccttaagcaccgcaatatcgttcagtacctgggctctgtttcagagaacggctacattaagatatttatggagcaggtgcctggaggaagcctttctgctcttctgcgatccaaatgggggccgatgaaggaaccgacaatcaagttttacaccaaacagatcctggagggccttaagtatcttcatgaaaaccagatcgtgcacagagacataaagggcgataatgttctggtgaacacctacagcggagtggtgaaaatctccgattttggaacctcgaaacgtcttgcgggtgtgaacccctgcacagagacttttactggcaccctgcagtacatggcacctgagataattgaccaagggcctcgcggatatggtgccccagccgatatctggtccctgggctgcaccatcattgagatggccaccagcaagcctccgttccatgagcttggtgagccgcaggcagccatgttcaaagtgggcatgtttaagatccaccctgagattccagaagccctttcagctgaagcccgagccttcattttatcctgtttcgagcctgacccccacaaacgtgccaccactgctgagctactgagagagggtttcttaaggcaggtgaacaagggcaagaagaaccgaattgccttcaagccctcagaaggtccccgcggtgtcgtcctggccctgcccacacagggagagcccatggccaccagcagcagcgagcacggctctgtctccccagactccgacgcccagcctgacgcactctttgagaggacccgggcgcccaggcaccaccttggccacctcctcagtgttccagacgagagctcagccttggaagaccggggcttggcctcgtccccggaggacagggaccagggcctcttcctgctacgcaaggacagtgagcgccgtgccatcctgtacaaaatcctctgggaggagcagaaccaggtggcttccaacctgcaggagtgtgtggcccagagttccgaagagttgcatctctcagttggacacatcaagcaaatcattgggatcctgagggacttcatccgctccccagagcaccgggtgatggcgaccacaatatcaaagctcaaggtggacctggactttgacagctcgtccatcagtcagattcacctggtgctgttcggatttcaggatgccgtaaataaaattttgaggaaccacttaattaggccccactggatgttcgcgatggacaacatcatccgccgagcggtgcaggccgcggtcaccattctcatcccagagctccgagcccactttgagcctacctgtgagactgaaggggtagataaggacatggatgaagcggaagagggctatcccccagccaccggacctggccaggaggcccagccccaccagcagcacctgagcctccagctgggtgagctcagacaggagaccaacagacttttggaacacctagttgaaaaagagagagagtaccagaatcttctgcggcaaactctagaacagaaaactcaagaattgtatcaccttcagttaaaattaaaatcgaattgtattacagagaacccagcaggcccctacgggcagagaacagataaagagcttatagactggttgcggctgcaaggagctgatgcaaagacaattgaaaagattgttgaagagggttatacactttcggatattcttaatgagatcactaaggaagatctaagataccttcgactacggggtggtctcctctgcagactctggagtgcggtctcccagtacagaagggctcaggaggcctcagaaaccaaagacaaggcttgataccaatcagctaagctgtggcagagtgtcccaccacgctacatgttttgttaaagcttctgttagtgtatacacgaattccgctgtgtttacatatttaaaaatgccattgttcaattaatagtttaagaacttgttttaaatactgtcctgagtttcttttgaaacctgttatttataaacatagaactgtgtgtattgtgaaaacagtgagccttggttttgacctcccggaatattaggaaattcacttgtagtcccagctatgcaggaggctgaggtgggaggattgcttgagcccaggaggtgtggaggctgcagtgagccatgatcacaccactgcactccagcctgggcaacagagcccgaccctgtctcaaaaaaagtacacccttcagcacttgctggaatggtgaaacaaacaaggggtatttaacaaacatggaagctgggacactgcctcagaactggtatggtacttcaatttgagaaacacaaaactgatacgaatgtgccttgtagttaatgtttgatatgaacagaaaatagcttcatatttatactgaatgtgtaagtagagaaaactaagttatgtggcctttgaaatgattacaaaattggaatgattacaaaagtcttattttaaaatggaactgtcctcttgcctgataataaatattgtatcttgtagag

SEQ ID NO: 18524 - DNA, 5397 bp, Homo sapiens
  source 1..5397: mol_type = unassigned DNA
gatctgggaggcttgtccctcgccgcccaccgtagccccggcgctcggccggtcgccgtttccaagatggccgcggcgcgcacggctcctgcggcggggtagaggcggaggcggagtcgagtcactcccgcacttcggggctccggtgccccgcgccaggctgcagcttactgcccgccgcggccatgcggggctccgtgcacggatgagagaagccgctgccgcgctggtccctcctcccgcctttgccgtcacgcctgccgccgccatggaggagccgccgccaccgccgccgccgccaccaccgccaccggaacccgagaccgagtcagaacccgagtgctgcttggcggcgaggcaagagggcacattgggagattcagcttgcaagagtcctgaatctgatctagaagacttctccgatgaaacaaatacagagaatctttatggtacctctccccccagcacacctcgacagatgaaacgcatgtcaaccaaacatcagaggaataatgtggggaggccagccagtcggtctaatttgaaagaaaaaatgaatgcaccaaatcagcctccacataaagacactggaaaaacagtggagaatgtggaagaatacagctataagcaggagaaaaagatccgagcagctcttagaacaacagagcgtgatcgtaaaaaaaatgtacagtgctcattcatgttagactcagtgggtggatctttgccaaaaaaatcaattccagatgtggatctcaataagccttacctcagccttggctgtagcaatgctaagcttccagtatctgtgcccatgcctatagccagacctgcacgccagacttctaggactgactgtccagcagatcgtttaaagttttttgaaactttacgacttttgctaaagcttacctcagtctcaaagaaaaaagacagggagcaaagaggacaagaaaatacgtctggtttctggcttaaccgatctaacgaactgatctggttagagctacaagcctggcatgcaggacggacaattaacgaccaggacttctttttatatacagcccgtcaagccatcccagatattattaatgaaatccttactttcaaagtcgactatgggagcttcgcctttgttagagatagagctggttttaatggtacttcagtagaagggcagtgcaaagccactcctggaacaaagattgtaggttactcaacacatcatgagcatctccaacgccagagggtctcatttgagcaggtaaaacggataatggagctgctagagtacatagaagcactttatccatcattgcaggctcttcagaaggactatgaaaaatatgctgcaaaagacttccaggacagggtgcaggcactctgtttgtggttaaacatcacaaaagacttaaatcagaaattaaggattatgggcactgttttgggcatcaagaatttatcagacattggctggccagtgtttgaaatcccttcccctcgaccatccaaaggtaatgagccggagtatgagggtgatgacacagaaggagaattaaaggagttggaaagtagtacggatgagagtgaagaagaacaaatctctgatcctagggtaccggaaatcagacagcccatagataacagcttcgacatccagtcgcgggactgcatatccaagaagcttgagaggctcgaatctgaggatgattctcttggctggggagcaccagactggagcacagaagcaggctttagtagacattgtctgacttctatttatagaccatttgtagacaaagcactgaagcagatggggttaagaaagttaattttaagacttcacaagctaatggatggttccttgcaaagggcacgtatagcattggtaaagaacgatcgtccagtggagttttctgaatttccagatcccatgtggggttcagattatgtgcagttgtcaaggacaccaccttcatctgaggagaaatgcagtgctgtgtcgtgggaggagctgaaggccatggatttaccttcattcgaacctgccttcctagttctctgccgagtccttctgaatgtcatacatgagtgtctgaagttaagattggagcagagacctgctggagaaccatctctcttgagtattaagcagctggtgagagagtgtaaggaggtcctgaagggcggcctgctgatgaagcagtactaccagttcatgctgcaggaggttctggaggacttggagaagcccgactgcaacattgacgcttttgaagaggatctacataaaatgcttatggtgtattttgattacatgagaagctggatccaaatgctacagcaattacctcaagcatcgcatagtttaaaaaatctgttagaagaagaatggaatttcaccaaagaaataactcattacatacggggaggagaagcacaggccgggaagcttttctgtgacattgcaggaatgctgctgaaatctacaggaagttttttagaatttggcttacaggagagctgtgctgaattttggactagtgcggatgacagcagtgcttccgacgaaatcaggaggtctgttatagagatcagtcgagccctgaaggagctcttccatgaagccagagaaagggcttccaaagcacttggatttgctaaaatgttgagaaaggacctggaaatagcagcagaattcaggctttcagccccagttagagacctcctggatgttctgaaatcaaaacagtatgtcaaggtgcaaattcctgggttagaaaacttgcaaatgtttgttccagacactcttgctgaggagaagagtattattttgcagttactcaatgcagctgcaggaaaggactgttcaaaagattcagatgacgtactcatcgatgcctatctgcttctgaccaagcacggtgatcgagcccgtgattcagaggacagctggggcacctgggaggcacagcctgtcaaagtcgtgcctcaggtggagactgttgacaccctgagaagcatgcaggtggataatcttttactagttgtcatgcagtctgcgcatctcacaattcagagaaaagctttccagcagtccattgagggacttatgactctgtgccaggagcagacatccagtcagccggtcatcgccaaagctttgcagcagctgaagaatgatgcattggagctatgcaacaggataagcaatgccattgaccgcgtggaccacatgttcacatcagaatttgatgctgaggttgatgaatctgaatctgtcaccttgcaacagtactaccgagaagcaatgattcaggggtacaattttggatttgagtatcataaagaagttgttcgtttgatgtctggggagtttagacagaagataggagacaaatatataagctttgcccggaagtggatgaattatgtcctgactaaatgtgagagtggtagaggtacaagacccaggtgggcgactcaaggatttgattttctacaagcaattgaacctgcctttatttcagctttaccagaagatgacttcttgagtttacaagccttgatgaatgaatgcattggccatgtcataggaaaaccacacagtcctgttacaggtttgtaccttgccattcatcggaacagcccccgtcctatgaaggtacctcgatgccatagtgaccctcctaacccacacctcattatccccactccagagggattcaggggttccagcgttcctgaaaatgatcgattggcttccatagctgctgaattgcagtttaggtccctgagtcgtcactcaagccccacggaggagcgagatgaaccagcatatccaagaggagattcaagtgggtccacaagaagaagttgggaacttcggacactaatcagccagagtaaagatactgcttctaaactaggacccatagaagctatccagaagtcagtccgattgtttgaagaaaagaggtaccgagaaatgaggagaaagaatatcattggtcaagtttgtgatacgcctaagtcctatgataatgttatgcacgttggcttgaggaaggtgaccttcaaatggcaaagaggaaacaaaattggagaaggccagtatgggaaggtgtacacctgcatcagcgtcgacaccggggagctgatggccatgaaagagattcgatttcaacctaatgaccataagactatcaaggaaactgcagacgaattgaaaatattcgaaggcatcaaacaccccaatctggttcggtattttggtgtggagctccatagagaagaaatgtacatcttcatggagtactgcgatgaggggactttagaagaggtgtcaaggctgggacttcaggaacatgtgattaggctgtattcaaagcagatcaccattgcgatcaacgtcctccatgagcatggcatagtccaccgtgacattaaaggtgccaatatcttccttacctcatctggattaatcaaactgggagattttggatgttcagtaaagctcaaaaacaatgcccagaccatgcctggtgaagtgaacagcaccctggggacagcagcatacatggcacctgaagtcatcactcgtgccaaaggagagggccatgggcgtgcggccgacatctggagtctggggtgtgttgtcatagagatggtgactggcaagaggccttggcatgagtatgagcacaactttcaaattatgtataaagtggggatgggacataagccaccaatccctgaaagattaagccctgaaggaaaggacttcctttctcactgccttgagagtgacccaaagatgagatggaccgccagccagctcctcgaccattcgtttgtcaaggtttgcacagatgaagaatgaagcctagtagaatatggacttggaaaattctcttaatcactactgtatgtaatatttacataaagactgtgctgagaagcagtataagcctttttaaccttccaagactgaagactgcacaggtgacaagcgtcacttctcctgctgctcctgtttgtctgatgtggcaaaaggccctctggagggctggtggccacgaggttaaagaagctgcatgttaagtgccattactactgtacacggaccatcgcctctgtctcctccgtgtctcgcgcgactgagaaccgtgacatcagcgtagtgttttgacctttctaggttcaaaagaagttgtagtgttatcaggcgtcccataccttgtttttaatctcctgtttgttgagtgcactgactgtgaaacctttaccttttttgttgttgttggcaagctgcaggtttgtaatgcaaaaggctgattactgaaatttaagaaaaaggttcttttttcaataaatggtttattttaggaaagctca

SEQ ID NO: 18525 - DNA, 5490 bp, Homo sapiens
  source 1..5490: mol_type = unassigned DNA
gtttccaagatggccgcggcgcgcacggctcctgcggcggggtagaggcggaggcggagtcgagtcactcccgcacttcggggctccggtgccccgcgccaggctgcagcttactgcccgccgcggccatgcggggctccgtgcacggatgagagaagccgctgccgcgctggtccctcctcccgcctttgccgtcacgcctgccgccgccatggaggagccgccgccaccgccgccgccgccaccaccgccaccggaacccgagaccgagtcagaacccgagtgctgcttggcggcgaggcaagagggcacattgggagattcagcttgcaagagtcctgaatctgatctagaagacttctccgatgaaacaaatacagagaatctttatggtacctctccccccagcacacctcgacagatgaaacgcatgtcaaccaaacatcagaggaataatgtggggaggccagccagtcggtctaatttgaaagaaaaaatgaatgcaccaaatcagcctccacataaagacactggaaaaacagtggagaatgtggaagaatacagctataagcaggagaaaaagatccgagcagctcttagaacaacagagcgtgatcgtaaaaaaaatgtacagtgctcattcatgttagactcagtgggtggatctttgccaaaaaaatcaattccagatgtggatctcaataagccttacctcagccttggctgtagcaatgctaagcttccagtatctgtgcccatgcctatagccagacctgcacgccagacttctaggactgactgtccagcagatcgtttaaagttttttgaaactttacgacttttgctaaagcttacctcagtctcaaagaaaaaagacagggagcaaagaggacaagaaaatacgtctggtttctggcttaaccgatctaacgaactgatctggttagagctacaagcctggcatgcaggacggacaattaacgaccaggacttctttttatatacagcccgtcaagccatcccagatattattaatgaaatccttactttcaaagtcgactatgggagcttcgcctttgttagagatagagctggttttaatggtacttcagtagaagggcagtgcaaagccactcctggaacaaagattgtaggttactcaacacatcatgagcatctccaacgccagagggtctcatttgagcaggtaaaacggataatggagctgctagagtacatagaagcactttatccatcattgcaggctcttcagaaggactatgaaaaatatgctgcaaaagacttccaggacagggtgcaggcactctgtttgtggttaaacatcacaaaagacttaaatcagaaattaaggattatgggcactgttttgggcatcaagaatttatcagacattggctggccagtgtttgaaatcccttcccctcgaccatccaaaggtaatgagccggagtatgagggtgatgacacagaaggagaattaaaggagttggaaagtagtacggatgagagtgaagaagaacaaatctctgatcctagggtaccggaaatcagacagcccatagataacagcttcgacatccagtcgcgggactgcatatccaagaagcttgagaggctcgaatctgaggatgattctcttggctggggagcaccagactggagcacagaagcaggctttagtagacattgtctgacttctatttatagaccatttgtagacaaagcactgaagcagatggggttaagaaagttaattttaagacttcacaagctaatggatggttccttgcaaagggcacgtatagcattggtaaagaacgatcgtccagtggagttttctgaatttccagatcccatgtggggttcagattatgtgcagttgtcaaggacaccaccttcatctgaggagaaatgcagtgctgtgtcgtgggaggagctgaaggccatggatttaccttcattcgaacctgccttcctagttctctgccgagtccttctgaatgtcatacatgagtgtctgaagttaagattggagcagagacctgctggagaaccatctctcttgagtattaagcagctggtgagagagtgtaaggaggtcctgaagggcggcctgctgatgaagcagtactaccagttcatgctgcaggaggttctggaggacttggagaagcccgactgcaacattgacgcttttgaagaggatctacataaaatgcttatggtgtattttgattacatgagaagctggatccaaatgctacagcaattacctcaagcatcgcatagtttaaaaaatctgttagaagaagaatggaatttcaccaaagaaataactcattacatacggggaggagaagcacaggccgggaagcttttctgtgacattgcaggaatgctgctgaaatctacaggaagttttttagaatttggcttacaggagagctgtgctgaattttggactagtgcggatgacagcagtgcttccgacgaaatcaggaggtctgttatagagatcagtcgagccctgaaggagctcttccatgaagccagagaaagggcttccaaagcacttggatttgctaaaatgttgagaaaggacctggaaatagcagcagaattcaggctttcagccccagttagagacctcctggatgttctgaaatcaaaacagtatgtcaaggtgcaaattcctgggttagaaaacttgcaaatgtttgttccagacactcttgctgaggagaagagtattattttgcagttactcaatgcagctgcaggaaaggactgttcaaaagattcagatgacgtactcatcgatgcctatctgcttctgaccaagcacggtgatcgagcccgtgattcagaggacagctggggcacctgggaggcacagcctgtcaaagtcgtgcctcaggtggagactgttgacaccctgagaagcatgcaggtggataatcttttactagttgtcatgcagtctgcgcatctcacaattcagagaaaagctttccagcagtccattgagggacttatgactctgtgccaggagcagacatccagtcagccggtcatcgccaaagctttgcagcagctgaagaatgatgcattggagctatgcaacaggataagcaatgccattgaccgcgtggaccacatgttcacatcagaatttgatgctgaggttgatgaatctgaatctgtcaccttgcaacagtactaccgagaagcaatgattcaggggtacaattttggatttgagtatcataaagaagttgttcgtttgatgtctggggagtttagacagaagataggagacaaatatataagctttgcccggaagtggatgaattatgtcctgactaaatgtgagagtggtagaggtacaagacccaggtgggcgactcaaggatttgattttctacaagcaattgaacctgcctttatttcagctttaccagaagatgacttcttgagtttacaagccttgatgaatgaatgcattggccatgtcataggaaaaccacacagtcctgttacaggtttgtaccttgccattcatcggaacagcccccgtcctatgaaggtacctcgatgccatagtgaccctcctaacccacacctcattatccccactccagagggattcagcactcggagcatgccttccgacgcgcggagccatggcagccctgctgctgctgctgctgctgctgctgctgctgttgctgccagtcggcccagcccctctggtggtgactctgtgctgcccaaatccatcagcagtgcccatgataccaggggttccagcgttcctgaaaatgatcgattggcttccatagctgctgaattgcagtttaggtccctgagtcgtcactcaagccccacggaggagcgagatgaaccagcatatccaagaggagattcaagtgggtccacaagaagaagttgggaacttcggacactaatcagccagagtaaagatactgcttctaaactaggacccatagaagctatccagaagtcagtccgattgtttgaagaaaagaggtaccgagaaatgaggagaaagaatatcattggtcaagtttgtgatacgcctaagtcctatgataatgttatgcacgttggcttgaggaaggtgaccttcaaatggcaaagaggaaacaaaattggagaaggccagtatgggaaggtgtacacctgcatcagcgtcgacaccggggagctgatggccatgaaagagattcgatttcaacctaatgaccataagactatcaaggaaactgcagacgaattgaaaatattcgaaggcatcaaacaccccaatctggttcggtattttggtgtggagctccatagagaagaaatgtacatcttcatggagtactgcgatgaggggactttagaagaggtgtcaaggctgggacttcaggaacatgtgattaggctgtattcaaagcagatcaccattgcgatcaacgtcctccatgagcatggcatagtccaccgtgacattaaaggtgccaatatcttccttacctcatctggattaatcaaactgggagattttggatgttcagtaaagctcaaaaacaatgcccagaccatgcctggtgaagtgaacagcaccctggggacagcagcatacatggcacctgaagtcatcactcgtgccaaaggagagggccatgggcgtgcggccgacatctggagtctggggtgtgttgtcatagagatggtgactggcaagaggccttggcatgagtatgagcacaactttcaaattatgtataaagtggggatgggacataagccaccaatccctgaaagattaagccctgaaggaaaggacttcctttctcactgccttgagagtgacccaaagatgagatggaccgccagccagctcctcgaccattcgtttgtcaaggtttgcacagatgaagaatgaagcctagtagaatatggacttggaaaattctcttaatcactactgtatgtaatatttacataaagactgtgctgagaagcagtataagcctttttaaccttccaagactgaagactgcacaggtgacaagcgtcacttctcctgctgctcctgtttgtctgatgtggcaaaaggccctctggagggctggtggccacgaggttaaagaagctgcatgttaagtgccattactactgtacacggaccatcgcctctgtctcctccgtgtctcgcgcgactgagaaccgtgacatcagcgtagtgttttgacctttctaggttcaaaagaagttgtagtgttatcaggcgtcccataccttgtttttaatctcctgtttgttgagtgcactgactgtgaaacctttaccttttttgttgttgttggcaagctgcaggtttgtaatgcaaaaggctgattactgaaatttaagaaaaaggttcttttttcaataaatggtttattttaggaaagctca

SEQ ID NO: 18526 - DNA, 4636 bp, Homo sapiens
  source 1..4636: mol_type = unassigned DNA
aagatggccgcggcgcgcacggctcctgcggcggggtagaggcggaggcggagtcgagtcactcccgcacttcggggctccggtgccccgcgccaggctgcagcttactgcccgccgcggccatgcggggctccgtgcacggatgagagaagccgctgccgcgctggtccctcctcccgcctttgccgtcacgcctgccgccgccatggaggagccgccgccaccgccgccgccgccaccaccgccaccggaacccgagaccgagtcagaacccgagtgctgcttggcggcgaggcaagagggcacattgggagattcagcttgcaagagtcctgaatctgatctagaagacttctccgatgaaacaaatacagagaatctttatggtacctctccccccagcacacctcgacagatgaaacgcatgtcaaccaaacatcagaggaataatgtggggaggccagccagtcggtctaatttgaaagaaaaaatgaatgcaccaaatcagcctccacataaagacactggaaaaacagtggagaatgtggaagaatacagctataagcaggagaaaaagatccgagcagctcttagaacaacagagcgtgatcgtaaaaaaaatgtacagtgctcattcatgttagactcagtgggtggatctttgccaaaaaaatcaattccagatgtggatctcaataagccttacctcagccttggctgtagcaatgctaagcttccagtatctgtgcccatgcctatagccagacctgcacgccagacttctaggactgactgtccagcagatcgtttaaagttttttgaaactttacgacttttgctaaagcttacctcagtctcaaagaaaaaagacagggagcaaagaggacaagaaaatacgtctggtttctggcttaaccgatctaacgaactgatctggttagagctacaagcctggcatgcaggacggacaattaacgaccaggacttctttttatatacagcccgtcaagccatcccagatattattaatgaaatccttactttcaaagtcgactatgggagcttcgcctttgttagagatagagctggttttaatggtacttcagtagaagggcagtgcaaagccactcctggaacaaagattgtaggttactcaacacatcatgagcatctccaacgccagagggtctcatttgagcaggtaaaacggataatggagctgctagagtacatagaagcactttatccatcattgcaggctcttcagaaggactatgaaaaatatgctgcaaaagacttccaggacagggtgcaggcactctgtttgtggttaaacatcacaaaagacttaaatcagaaattaaggattatgggcactgttttgggcatcaagaatttatcagacattggctggccagtgtttgaaatcccttcccctcgaccatccaaaggtaatgagccggagtatgagggtgatgacacagaaggagaattaaaggagttggaaagtagtacggatgagagtgaagaagaacaaatctctgatcctagggtaccggaaatcagacagcccatagataacagcttcgacatccagtcgcgggactgcatatccaagaagcttgagaggctcgaatctgaggatgattctcttggctggggagcaccagactggagcacagaagcaggctttagtagacattgtctgacttctatttatagaccatttgtagacaaagcactgaagcagatggggttaagaaagttaattttaagacttcacaagctaatggatggttccttgcaaagggcacgtatagcattggtaaagaacgatcgtccagtggagttttctgaatttccagatcccatgtggggttcagattatgtgcagttgtcaaggacaccaccttcatctgaggagaaatgcagtgctgtgtcgtgggaggagctgaaggccatggatttaccttcattcgaacctgccttcctagttctctgccgagtccttctgaatgtcatacatgagtgtctgaagttaagattggagcagagacctgctggagaaccatctctcttgagtattaagcagctggtgagagagtgtaaggaggtcctgaagggcggcctgctgatgaagcagtactaccagttcatgctgcaggaggttctggaggacttggagaagcccgactgcaacattgacgcttttgaagaggatctacataaaatgcttatggtgtattttgattacatgagaagctggatccaaatgctacagcaattacctcaagcatcgcatagtttaaaaaatctgttagaagaagaatggaatttcaccaaagaaataactcattacatacggggaggagaagcacaggccgggaagcttttctgtgacattgcaggaatgctgctgaaatctacaggaagttttttagaatttggcttacaggagagctgtgctgaattttggactagtgcggatgacagcagtgcttccgacgaaatcaggaggtctgttatagagatcagtcgagccctgaaggagctcttccatgaagccagagaaagggcttccaaagcacttggatttgctaaaatgttgagaaaggacctggaaatagcagcagaattcaggctttcagccccagttagagacctcctggatgttctgaaatcaaaacagtatgtcaaggtgcaaattcctgggttagaaaacttgcaaatgtttgttccagacactcttgctgaggagaagagtattattttgcagttactcaatgcagctgcaggaaaggactgttcaaaagattcagatgacgtactcatcgatgcctatctgcttctgaccaagcacggtgatcgagcccgtgattcagaggacagctggggcacctgggaggcacagcctgtcaaagtcgtgcctcaggtggagactgttgacaccctgagaagcatgcaggtggataatcttttactagttgtcatgcagtctgcgcatctcacaattcagagaaaagctttccagcagtccattgagggacttatgactctgtgccaggagcagacatccagtcagccggtcatcgccaaagctttgcagcagctgaagaatgatgcattggagctatgcaacaggataagcaatgccattgaccgcgtggaccacatgttcacatcagaatttgatgctgaggttgatgaatctgaatctgtcaccttgcaacagtactaccgagaagcaatgattcaggggtacaattttggatttgagtatcataaagaagttgttcgtttgatgtctggggagtttagacagaagataggagacaaatatataagctttgcccggaagtggatgaattatgtcctgactaaatgtgagagtggtagaggtacaagacccaggtgggcgactcaaggatttgattttctacaagcaattgaacctgcctttatttcagctttaccagaagatgacttcttgagtttacaagccttgatgaatgaatgcattggccatgtcataggaaaaccacacagtcctgttacaggtttgtaccttgccattcatcggaacagcccccgtcctatgaaggtacctcgatgccatagtgaccctcctaacccacacctcattatccccactccagagggattcaggggttccagcgttcctgaaaatgatcgattggcttccatagctgctgaattgcagtttaggtccctgagtcgtcactcaagccccacggaggagcgagatgaaccagcatatccaagaggagattcaagtgggtccacaagaagaagttgggaacttcggacactaatcagccagagtaaagatactgcttctaaactaggacccatagaagctatccagaagtcagtccgattgtttgaagaaaagaggtaccgagaaatgaggagaaagaatatcattggtcaagtttgtgatacgcctaagtcctatgataatgttatgcacgttggcttgaggaaggtgaccttcaaatggcaaagaggaaacaaaattggagaaggccagtatgggaaggtgtacacctgcatcagcgtcgacaccggggagctgatggccatgaaagagattcgatttcaacctaatgaccataagactatcaaggaaactgcagacgaattgaaaatattcgaaggcatcaaacaccccaatctggttcggtattttggtgtggagctccatagagaagaaatgtacatcttcatggagtactgcgatgaggggactttagaagaggtgtcaaggctgggacttcaggaacatgtgattaggctgtattcaaagcagatcaccattgcgatcaacgtcctccatgagcatggcatagtccaccgtgacattaaaggtgccaatatcttccttacctcatctggattaatcaaactgggagattttggatgttcagtaaagctcaaaaacaatgcccagaccatgcctggtgaagtgaacagcaccctggggacagcagcatacatggcacctgaagtcatcactcgtgccaaaggagagggccatgggcgtgcggccgacatctggagtctggggtgtgttgtcatagagatggtgactggcaagatctgcaaagatacagag

SEQ ID NO: 18527 - DNA, 461 bp, Homo sapiens
  source 1..461: mol_type = unassigned DNA
acttcggggctccggtgccccgcgccaggctgcagcttactgcccgccgcggccatgcggggctccgtgcacggatgagagaagccgctgccgcgctggtccctcctcccgcctttgccgtcacgcctgccgccgccatggaggagccgccgccaccgccgccgccgccaccaccgccaccggaacccgagaccgagtcagaacccgagtgctgcttggcggcgaggcaagagggcacattgggagattcagcttgcaagagtcctgaatctgatctagaagacttctccgatgaaacaaatacagagaatctttatggtacctctccccccagcacacctcgacagatgaaacgcatgtcaaccaaacatcagaggaataatgtggggaggccagccagtcggtctaatttgaaaggtgtccgtcagatctcccatgctgtttcttcctccttaaattga

SEQ ID NO: 18528 - DNA, 2999 bp, Homo sapiens
  source 1..2999: mol_type = unassigned DNA
ggtacctcaagtctattgtagagacaattttaatatataagcattttgtgaaactgaccacagaacagcctgtggccaagcaagaacttgtggacttttggatggatttcctggtcgaggccacaaagacagatgttactgtggttaggtttccagtattaatattagaaccaaccaaaatctatcaaccttcttatttgtctatcaacaatgaagttgaggaaaagacaatctctatttggcacgtgcttcctgatgacaagaaaggtatacatgagtggaattttagtgcctcttctgtcaggggagtgagtatttctaaatttgaagaaagatgctgctttctttatgtgcttcacaattctgatgatttccaaatctatttctgtacagaacttcattgtaaaaagttttttgagatggtgaacaccattaccgaagagaaggggagaagcacagaggaaggagactgtgaaagtgacttgctggagatactctcagcccctgcatgaagaaatagcattgcataaacacctgaagcacaaaaatattgtccagtatctgggctctttcagtgagaatggtttcattaaaatcttcatggagcaggtccctggaggaagtctttctgctctccttcgttccaaatggggtccattaaaagacaatgagcaaacaattggcttttatacaaagcaaatactggaaggattaaaatatctccatgacaatcagatagttcaccgggacataaagggtgacaatgtgttgattaatacctacagtggtgttctcaagatctctgacttcggaacatcaaagaggcttgctggcataaacccctgtactgaaacttttactggtaccctccagtatatggcaccagaaataatagataaaggaccaagaggctacggaaaagcagcagacatctggtctctgggctgtacaatcattgaaatggccacaggaaaacccccattttatgaactgggagaaccacaagcagctatgttcaaggtgggaatgtttaaagtccaccctgagatcccagagtccatgtctgcagaggccaaggcattcatactgaaatgttttgaaccagatcctgacaagagagcctgtgctaacgacttgcttgttgatgagtttttaaaagtttcaagcaaaaagaaaaagacacaacctaagctttcagctctttcagctggatcaaatgaatatctcaggagtatatccttgccggtacctgtgctggtggaggacaccagcagcagcagtgagtacggctcagtttcacccgacacggagttgaaagtggaccccttctctttcaaaacaagagccaagtcctgcggagaaagagatgtcaagggaattcggacactctttttgggcattccagatgagaattttgaagatcacagtgctcctccttcccctgaagaaaaagattctggattcttcatgctgaggaaggacagtgagaggcgagctacccttcacaggatcctgacggaagaccaagacaaaattgtgagaaacctaatggaatctttagctcagggggctgaagaaccgaaactaaaatgggaacacatcacaaccctcattgcaagcctcagagaatttgtgagatccactgaccgaaaaatcatagccaccacactgtcaaagctgaaactggagctggacttcgacagccatggcattagccaagtccaggtggtactctttggttttcaagatgctgtcaataaagttcttcggaatcataacatcaagccgcactggatgtttgccttagacagtatcattcggaaggcggtacagacagccattaccatcctggttccagaactaaggccacatttcagccttgcatctgagagtgatactgctgatcaagaagacttggatgtagaagatgaccatgaggaacagccttcaaatcaaactgtccgaagacctcaggctgtcattgaagatgctgtggctacctcaggcgtgagcacgctcagttctactgtgtctcatgattcccagagtgctcaccggtcactgaatgtacagcttggaaggatgaaaatagaaaccaatagattactggaagaattggttcggaaagagaaagaattacaagcactccttcatcgagctattgaagaaaaagaccaagaaattaaacacctgaagcttaagtcccaacccatagaaattcctgaattgcctgtatttcatctaaattcttctggcacaaatactgaagattctgaacttaccgactggctgagagtgaatggagctgatgaagacactataagccggtttttggctgaagattatacactattggatgttctctactatgttacacgtgatgacttaaaatgcttgagactaaggggagggatgctgtgcacactgtggaaggctatcattgactttcgaaacaaacagacttgactgttgctcaatctaatcttcgatggaaattctaaaaattaatacagagctgatcttcttgggggtgggaaaatcgaagggagaggagaaaggcgctgcactttaaatccagtatttgtttactcatgttaaaaaaaaaaaaaacagacaaaacacactgaaatttcctaactacatctatttctataatttttaaggactcttcataaggactcttaaaataatcctgaacattagaaccctaatgttcaggaagattttaatctaagcatttttatggaaatatttttaatgcagcagctattgcacttcagccaaatgtttatttcacacaaaacggatgtaacatttcatgtgatcgtgcaccactggaacaaaaccaaaatgtgaccataactgtttaggcttctgtgtgtttgtaatatgctctaataatctgagtagaaatgcgtaatttcaattactgtataaagtttatgtttttttaagtgtgcagaatctgagagcaatggtttttacttctctgtgttaat

SEQ ID NO: 18529 - DNA, 5197 bp, Homo sapiens
  source 1..5197: mol_type = unassigned DNA
cgagcgcggcgcccttgagctgcaccgcggcgcaggtttgcgagccgacttgtcagccggccaagaaaaggaagctccgtcccttcccgctcacccggcttccccaccccttgtactctaaactctgcagagggcgagcggcgcggccacggaggcgccgaggaggagcgagccgccgccgggcagcggcgtgccctcgggggagagggcgccggagaggaggcggcggcgcggcggcgagggcgcggcgcgcgatggcagctgcttagcccggcgggcgcggagcagccccgagctgtggctggccaggcggtgcggctgggcgggggacgccgccgccgttgctgcccggcccggagagatgagcacggaggcggacgagggcatcactttctctgtgccacccttcgccccctcgggcttctgcaccatccccgagggcggcatctgcaggaggggaggagcggcggcggtgggcgagggcgaggagcaccagctgccaccgccgccgccgggcagcttctggaacgtggagagcgccgctgcccctggcatcggttgtccggcggccacctcctcgagcagtgccacccgaggccggggcagctctgttggcgggggcagccgacggaccacggtggcatatgtgatcaacgaagcgagccaagggcaactggtggtggccgagagcgaggccctgcagagcttgcgggaggcgtgcgagacagtgggcgccaccctggaaaccctgcattttgggaaactcgactttggagaaaccaccgtgctggaccgcttttacaatgcagatattgcggtggtggagatgagcgatgccttccggcagccgtccttgttttaccaccttggggtgagagaaagtttcagcatggccaacaacatcatcctctactgtgatactaactcggactctctgcagtcactgaaggaaataatttgccagaagaatactatgtgcactgggaactacacctttgttccttacatgataactccacataacaaagtctactgctgtgacagcagcttcatgaaggggttgacagagctcatgcaaccgaacttcgagctgcttcttggacccatctgcttacctcttgtggatcgttttattcaacttttgaaggtggcacaagcaagttctagccagtacttccgggaatctatactcaatgacatcaggaaagctcgtaatttatacactggtaaagaattggcagctgagttggcaagaattcggcagcgagtagataatatcgaagtcttgacagcagatattgtcataaatctgttactttcctacagagatatccaggactatgattctattgtgaagctggtagagactttagaaaaactgccaacctttgatttggcctcccatcaccatgtgaagtttcattatgcatttgcactgaataggagaaatctccctggtgacagagcaaaagctcttgatattatgattcccatggtgcaaagcgaaggacaagttgcttcagatatgtattgcctagttggtcgaatctacaaagatatgtttttggactctaatttcacggacactgaaagcagagaccatggagcttcttggttcaaaaaggcatttgaatctgagccaacactacagtcaggaattaattatgcggtcctcctcctggcagctggacaccagtttgaatcttcctttgagctccggaaagttggggtgaagctaagtagtcttcttggtaaaaagggaaacttggaaaaactccagagctactgggaagttggattttttctgggggccagcgtcctagccaatgaccacatgagagtcattcaagcatctgaaaagctttttaaactgaagacaccagcatggtacctcaagtctattgtagagacaattttaatatataagcattttgtgaaactgaccacagaacagcctgtggccaagcaagaacttgtggacttttggatggatttcctggtcgaggccacaaagacagatgttactgtggttaggtttccagtattaatattagaaccaaccaaaatctatcaaccttcttatttgtctatcaacaatgaagttgaggaaaagacaatctctatttggcacgtgcttcctgatgacaagaaaggtatacatgagtggaattttagtgcctcttctgtcaggggagtgagtatttctaaatttgaagaaagatgctgctttctttatgtgcttcacaattctgatgatttccaaatctatttctgtacagaacttcattgtaaaaagttttttgagatggtgaacaccattaccgaagagaaggggagaagcacagaggaaggagactgtgaaagtgacttgctggagtatgactatgaatatgatgaaaatggtgacagagtcgttttaggaaaaggcacttatgggatagtctacgcaggtcgggacttgagcaaccaagtcagaattgctattaaggaaatcccagagagagacagcagatactctcagcccctgcatgaagaaatagcattgcataaacacctgaagcacaaaaatattgtccagtatctgggctctttcagtgagaatggtttcattaaaatcttcatggagcaggtccctggaggaagtctttctgctctccttcgttccaaatggggtccattaaaagacaatgagcaaacaattggcttttatacaaagcaaatactggaaggattaaaatatctccatgacaatcagatagttcaccgggacataaagggtgacaatgtgttgattaatacctacagtggtgttctcaagatctctgacttcggaacatcaaagaggcttgctggcataaacccctgtactgaaacttttactggtaccctccagtatatggcaccagaaataatagataaaggaccaagaggctacggaaaagcagcagacatctggtctctgggctgtacaatcattgaaatggccacaggaaaacccccattttatgaactgggagaaccacaagcagctatgttcaaggtgggaatgtttaaagtccaccctgagatcccagagtccatgtctgcagaggccaaggcattcatactgaaatgttttgaaccagatcctgacaagagagcctgtgctaacgacttgcttgttgatgagtttttaaaagtttcaagcaaaaagaaaaagacacaacctaagctttcagctctttcagctggatcaaatgaatatctcaggagtatatccttgccggtacctgtgctggtggaggacaccagcagcagcagtgagtacggctcagtttcacccgacacggagttgaaagtggaccccttctctttcaaaacaagagccaagtcctgcggagaaagagatgtcaagggaattcggacactctttttgggcattccagatgagaattttgaagatcacagtgctcctccttcccctgaagaaaaagattctggattcttcatgctgaggaaggacagtgagaggcgagctacccttcacaggatcctgacggaagaccaagacaaaattgtgagaaacctaatggaatctttagctcagggggctgaagaaccgaaactaaaatgggaacacatcacaaccctcattgcaagcctcagagaatttgtgagatccactgaccgaaaaatcatagccaccacactgtcaaagctgaaactggagctggacttcgacagccatggcattagccaagtccaggtggtactctttggttttcaagatgctgtcaataaagttcttcggaatcataacatcaagccgcactggatgtttgccttagacagtatcattcggaaggcggtacagacagccattaccatcctggttccagaactaaggccacatttcagccttgcatctgagagtgatactgctgatcaagaagacttggatgtagaagatgaccatgaggaacagccttcaaatcaaactgtccgaagacctcaggctgtcattgaagatgctgtggctacctcaggcgtgagcacgctcagttctactgtgtctcatgattcccagagtgctcaccggtcactgaatgtacagcttggaaggatgaaaatagaaaccaatagattactggaagaattggttcggaaagagaaagaattacaagcactccttcatcgagctattgaagaaaaagaccaagaaattaaacacctgaagcttaagtcccaacccatagaaattcctgaattgcctgtatttcatctaaattcttctggcacaaatactgaagattctgaacttaccgactggctgagagtgaatggagctgatgaagacactataagccggtttttggctgaagattatacactattggatgttctctactatgttacacgtgatgacttaaaatgcttgagactaaggggagggatgctgtgcacactgtggaaggctatcattgactttcgaaacaaacagacttgactgttgctcaatctaatcttcgatggaaattctaaaaattaatacagagctgatcttcttgggggtgggaaaatcgaagggagaggagaaaggcgctgcactttaaatccagtatttgtttactcatgttaaaaaaaaaaaaaacagacaaaacacactgaaatttcctaactacatctatttctataatttttaaggactcttcataaggactcttaaaataatcctgaacattagaaccctaatgttcaggaagattttaatctaagcatttttatggaaatatttttaatgcagcagctattgcacttcagccaaatgtttatttcacacaaaacggatgtaacatttcatgtgatcgtgcaccactggaacaaaaccaaaatgtgaccataactgtttaggcttctgtgtgtttgtaatatgctctaataatctgagtagaaatgcgtaatttcaattactgtataaagtttatgtttttttaagtgtgcagaatctgagagcaatggtttttacttctctgtgttaattgtaatattgactctattttgtaacttaagtttctgacctgtcgtacatttgtttgagtcgtttatgtactactgaactgtaccagttgcacatgcttgaactgtagtaatgttagcttgttctaaagctatccattgtgtcatatttactctaaaaattaaagagactctcaacata

SEQ ID NO: 18530 - DNA, 3889 bp, Homo sapiens
  source 1..3889: mol_type = unassigned DNA
cgagcgcggcgcccttgagctgcaccgcggcgcaggtttgcgagccgacttgtcagccggccaagaaaaggaagctccgtcccttcccgctcacccggcttccccaccccttgtactctaaactctgcagagggcgagcggcgcggccacggaggcgccgaggaggagcgagccgccgccgggcagcggcgtgccctcgggggagagggcgccggagaggaggcggcggcgcggcggcgagggcgcggcgcgcgatggcagctgcttagcccggcgggcgcggagcagccccgagctgtggctggccaggcggtgcggctgggcgggggacgccgccgccgttgctgcccggcccggagagatgagcacggaggcggacgagggcatcactttctctgtgccacccttcgccccctcgggcttctgcaccatccccgagggcggcatctgcaggaggggaggagcggcggcggtgggcgagggcgaggagcaccagctgccaccgccgccgccgggcagcttctggaacgtggagagcgccgctgcccctggcatcggttgtccggcggccacctcctcgagcagtgccacccgaggccggggcagctctgttggcgggggcagccgacggaccacggtggcatatgtgatcaacgaagcgagccaagggcaactggtggtggccgagagcgaggccctgcagagcttgcgggaggcgtgcgagacagtgggcgccaccctggaaaccctgcattttgggaaactcgactttggagaaaccaccgtgctggaccgcttttacaatgcagatattgcggtggtggagatgagcgatgccttccggcagccgtccttgttttaccaccttggggtgagagaaagtttcagcatggccaacaacatcatcctctactgtgatactaactcggactctctgcagtcactgaaggaaataatttgccagaagaatactatgtgcactgggaactacacctttgttccttacatgataactccacataacaaagtctactgctgtgacagcagcttcatgaaggggttgacagagctcatgcaaccgaacttcgagctgcttcttggacccatctgcttacctcttgtggatcgttttattcaacttttgaaggtggcacaagcaagttctagccagtacttccgggaatctatactcaatgacatcaggaaagctcgtaatttatacactggtaaagaattggcagctgagttggcaagaattcggcagcgagtagataatatcgaagtcttgacagcagatattgtcataaatctgttactttcctacagagatatccaggactatgattctattgtgaagctggtagagactttagaaaaactgccaacctttgatttggcctcccatcaccatgtgaagtttcattatgcatttgcactgaataggagaaatctccctggtgacagagcaaaagctcttgatattatgattcccatggtgcaaagcgaaggacaagttgcttcagatatgtattgcctagttggtcgaatctacaaagatatgtttttggactctaatttcacggacactgaaagcagagaccatggagcttcttggttcaaaaaggcatttgaatctgagccaacactacagtcaggaattaattatgcggtcctcctcctggcagctggacaccagtttgaatcttcctttgagctccggaaagttggggtgaagctaagtagtcttcttggtaaaaagggaaacttggaaaaactccagagctactgggaagttggattttttctgggggccagcgtcctagccaatgaccacatgagagtcattcaagcatctgaaaagctttttaaactgaagacaccagcatggtacctcaagtctattgtagagacaattttaatatataagcattttgtgaaactgaccacagaacagcctgtggccaagcaagaacttgtggacttttggatggatttcctggtcgaggccacaaagacagatgttactgtggttaggtttccagtattaatattagaaccaaccaaaatctatcaaccttcttatttgtctatcaacaatgaagttgaggaaaagacaatctctatttggcacgtgcttcctgatgacaagaaaggtatacatgagtggaattttagtgcctcttctgtcaggggagtgagtatttctaaatttgaagaaagatgctgctttctttatgtgcttcacaattctgatgatttccaaatctatttctgtacagaacttcattgtaaaaagttttttgagatggtgaacaccattaccgaagagaaggggagaagcacagaggaaggagactgtgaaagtgacttgctggagtatgactatgaatatgatgaaaatggtgacagagtcgttttaggaaaaggcacttatgggatagtctacgcaggtcgggacttgagcaaccaagtcagaattgctattaaggaaatcccagagagagacagcagatactctcagcccctgcatgaagaaatagcattgcataaacacctgaagcacaaaaatattgtccagtatctgggctctttcagtgagaatggtttcattaaaatcttcatggagcaggtccctggaggaagtctttctgctctccttcgttccaaatggggtccattaaaagacaatgagcaaacaattggcttttatacaaagcaaatactggaaggattaaaatatctccatgacaatcagatagttcaccgggacataaagggtgacaatgtgttgattaatacctacagtggtgttctcaagatctctgacttcggaacatcaaagaggcttgctggcataaacccctgtactgaaacttttactggtaccctccagtatatggcaccagaaataatagataaaggaccaagaggctacggaaaagcagcagacatctggtctctgggctgtacaatcattgaaatggccacaggaaaacccccattttatgaactgggagaaccacaagcagctatgttcaaggtgggaatgtttaaagtccaccctgagatcccagagtccatgtctgcagaggccaaggcattcatactgaaatgttttgaaccagatcctgacaagagagcctgtgctaacgacttgcttgttgatgagtttttaaaagtttcaagcaaaaagaaaaagacacaacctaagctttcagatctgtccatagcacaagcagaatatctcaggagtatatccttgccggtacctgtgctggtggaggacaccagcagcagcagtgagtacggctcagtttcacccgacacggagttgaaagtggaccccttctctttcaaaacaagagccaagtcctgcggagaaagagatgtcaagggaattcggacactctttttgggcattccagatgagaattttgaagatcacagtgctcctccttcccctgaagaaaaagattctggattcttcatgctgaggaaggacagtgagaggcgagctacccttcacaggatcctgacggaagaccaagacaaaattgtgagaaacctaatggaatctttagctcagggggctgaagaaccgaaactaaaatgggaacacatcacaaccctcattgcaagcctcagagaatttgtgagatccactgaccgaaaaatcatagccaccacactgtcaaagctgaaactggagctggacttcgacagccatggcattagccaagtccaggtggtactctttggttttcaagatgctgtcaataaagttcttcggaatcataacatcaagccgcactggatgtttgccttagacagtatcattcggaaggcggtacagacagccattaccatcctggttccaggaataaagccc

SEQ ID NO: 18531 - DNA, 4136 bp, Homo sapiens
  source 1..4136: mol_type = unassigned DNA
tgagctgccgatcaccggatgccccagattcctgggacccaatcccggatttcagaacctcaggaccttgcaagtccgagctaggatttctccctggactttagattcctggaacgggacgtcaggccgtattccggatccctagatcccgtgggagattctccgattccgaacggattccagatcccaagattcctgatctgccggcccaggctcctgccccgcccccggttcccagtgcgcggcgccccgcgcctgagcgcccccgcatggcggggccgtgtccccggtccggggcggagcgcgccggcagctgctggcaggacccgctggccgtggcgctgagccggggccggcagctcgcggcgcccccgggccggggctgcgcgcggagccggccgctcagcgtggtctacgtgctgacccgggagccgcagcccgggctcgagcctcgggagggaaccgaggcggagccgctgcccctgcgctgcctgcgcgaggcttgcgcgcaggtcccccggccgcggccgcccccgcagctgcgcagcctgcccttcgggacgctggagctaggcgacaccgcggctctggatgccttctacaacgcggatgtggtggtgctggaggtgagcagctcgctggtacagccctccctgttctaccaccttggtgtgcgtgagagcttcagcatgaccaacaatgtgctcctctgctcccaggccgacctccctgacctgcaggccctgcgggaggatgttttccagaagaactcggattgcgttggcagctacacactgatcccctatgtggtgacggccactggtcgggtgctgtgtggtgatgcaggccttctgcggggcctggctgatgggctggtacaggctggagtggggaccgaggccctgctcactcccctggtgggccggcttgcccgcctgctggaggccacacccacagactcttgtggctatttccgggagaccattcggcgggacatccggcaggcgcgggagcggttcagtgggccacagctgcggcaggagctggctcgcctgcagcggagactggacagcgtggagctgctgagccccgacatcatcatgaacttgctgctctcctaccgcgatgtgcaggactactcggccatcattgagctggtggagacgctgcaggccttgcccacctgtgatgtggccgagcagcataatgtctgcttccactacacttttgccctcaaccggaggaacaggcctggggaccgggcgaaggccctgtctgtgctgctgccgctggtacagcttgagggctctgtggcgcccgatctgtactgcatgtgtggccgtatctacaaggacatgttcttcagctcgggtttccaggatgctgggcaccgggagcaggcctatcactggtatcgcaaggcttttgacgtagagcccagccttcactcaggcatcaatgcagctgtgctcctcattgctgccgggcagcactttgaggattccaaagagctccggctaataggcatgaagctgggctgcctgctggcccgcaaaggctgcgtggagaagatgcagtattactgggatgtgggtttctacctgggagcccagatcctcgccaatgaccccacccaggtggtgctggctgcagagcagctgtataagctcaatgcccccatatggtacctggtgtccgtgatggagaccttcctgctctaccagcacttcaggcccacgccagagccccctggagggccaccacgccgtgcccacttctggctccacttcttgctacagtcctgccaaccattcaagacagcctgtgcccagggcgaccagtgcttggtgctggtcctggagatgaacaaggtgctgctgcctgcaaagctcgaggttcggggtactgacccagtaagcacagtgaccctgagcctgctggagcctgagacccaggacattccctccagctggaccttcccagtcgcctccatatgcggagtcagcgcctcaaagcgcgacgagcgctgctgcttcctctatgcactccccccggctcaggacgtccagctgtgcttccccagcgtagggcactgccagtggttctgcggcctgatccaggcctgggtgacgaacccggattccacggcgcccgcggaggaggcggagggcgcgggggagatgttggagtttgattatgagtacacggagacgggcgagcggctggtgctgggcaagggcacgtatggggtggtgtacgcgggccgcgatcgccacacgagggtgcgcatcgccatcaaggagatcccggagcgggacagcaggttctctcagcccctgcatgaagagatcgctcttcacagacgcctgcgccacaagaacatagtgcgctatctgggctcagctagccagggcggctaccttaagatcttcatggaggaagtgcctggaggcagcctgtcctccttgctgcggtcggtgtggggacccctgaaggacaacgagagcaccatcagtttctacacccgccagatcctgcagggacttggctacttgcacgacaaccacatcgtgcacagggacataaaaggggacaatgtgctgatcaacaccttcagtgggctgctcaagatttctgacttcggcacctccaagcggctggcaggcatcacaccttgcactgagaccttcacaggaactctgcagtatatggccccagaaatcattgaccagggcccacgcgggtatgggaaagcagctgacatctggtcactgggctgcactgtcattgagatggccacaggtcgcccccccttccacgagctcgggagcccacaggctgccatgtttcaggtgggtatgtacaaggtccatccgccaatgcccagctctctgtcggccgaggcccaagcctttctcctccgaacttttgagccagacccccgcctccgagccagcgcccagacactgctgggggaccccttcctgcagcctgggaaaaggagccgcagccccagctccccacgacatgctccacggccctcagatgccccttctgccagtcccactccttcagccaactcaaccacccagtctcagacattcccgtgccctcaggcaccctctcagcacccacccagccccccgaagcgctgcctcagttatgggggcaccagccagctccgggtgcccgaggagcctgcggccgaggagcctgcgtctccggaggagagttcggggctgagcctgctgcaccaggagagcaagcgtcgggccatgctggccgcagtattggagcaggagctgccagcgctggcggagaatctgcaccaggagcagaagcaagagcagggggcccgtctgggcagaaaccatgtggaagagctgctgcgctgcctcggggcacacatccacactcccaaccgccggcagctcgcccaggagctgcgggcgctgcaaggacggctgagggcccagggccttgggcctgcgcttctgcacagaccgctgtttgccttcccggatgcggtgaagcagatcctccgcaagcgccagatccgtccacactggatgttcgttctggactcactgctcagccgtgctgtgcgggcagccctgggtgtgctaggaccggaggtggagaaggaggcggtctcaccgaggtcagaggagctgagtaatgaaggggactcccagcagagcccaggccagcagagcccgcttccggtggagcccgagcagggccccgctcctctgatggtgcagctgagcctcttgagggcagagactgatcggctgcgcgaaatcctggcggggaaggaacgggagtaccaggccctggtgcagcgggctctacagcggctgaatgaggaagcccggacctatgtcctggccccagagcctccaactgctctttcaacggaccagggcctggtgcagtggctacaggaactgaatgtggattcaggcaccatccaaatgctgttgaaccatagcttcaccctccacactctgctcacctatgccactcgagatgacctcatctacacccgcatcaggggagggatggtatgccgcatctggagggccatcttggcacagcgagcaggatccacaccagtcacctctggaccctga

SEQ ID NO: 18532 - DNA, 1496 bp, Homo sapiens
  source 1..1496: mol_type = unassigned DNA
cgggtatgggaaagcagctgacatctggtcactgggctgcactgtcattgagatggccacaggtcgcccccccttccacgagctcgggagcccacaggctgccatgtttcaggtgggtatgtacaaggtccatccgccaatgcccagctctctgtcggccgaggcccaagcctttctcctccgaacttttgagccagacccccgcctccgagccagcgcccagacactgctgggggaccccttcctgcagcctgggaaaaggagccgcagccccagctccccacgacatgctccacggccctcagatgccccttctgccagtcccactccttcagccaactcaaccacccagtctcagacattcccgtgccctcaggcaccctctcagcacccacccagccccccgaagcgctgcctcagttatgggggcaccagccagctccgggtgcccgaggagcctgcggccgaggagcctgcgtctccggaggagagttcggggctgagcctgctgcaccaggagagcaagcgtcgggccatgctggccgcagtattggagcaggagctgccagcgctggcggagaatctgcaccaggagcagaagcaagagcagggggcccgtctgggcagaaaccatgtggaagagctgctgcgctgcctcggggcacacatccacactcccaaccgccggcagctcgcccaggagctgcgggcgctgcaaggacggctgagggcccagggccttgggcctgcgcttctgcacagaccgctgtttgccttcccggatgcggtgaagcagatcctccgcaagcgccagatccgtccacactggatgttcgttctggactcactgctcagccgtgctgtgcgggcagccctgggtgtgctaggaccggaggtggagaaggaggcggtctcaccgaggtcagaggagctgagtaatgaaggggactcccagcagagcccaggccagcagagcccgcttccggtggagcccgagcagggccccgctcctctgatggtgcagctgagcctcttgagggcagagactgatcggctgcgcgaaatcctggcggggaaggaacgggagtaccaggccctggtgcagcgggctctacagcggctgaatgaggaagcccggacctatgtcctggccccagagcctccaactgctctttcaacggaccagggcctggtgcagtggctacaggaactgaatgtggattcaggcaccatccaaatggggagggatggtatgccgcatctggagggccatcttggcacagcgagcaggatccacaccagtcacctctggaccctgagagctgaatgagggcatcataggccagacaggcccaaggatggatgaatggagaggacaaaggcagcttctgacacaccagccccaggacctggggcgactggaggaagccaggcgagtggggcccaggactggttccagtgagagaaaccaaccacaggcacccaagcactaccag

SEQ ID NO: 18533 - DNA, 4304 bp, Homo sapiens
  source 1..4304: mol_type = unassigned DNA
gccccagattcctgggacccaatcccggatttcagaacctcaggaccttgcaagtccgagctaggatttctccctggactttagattcctggaacgggacgtcaggccgtattccggatccctagatcccgtgggagattctccgattccgaacggattccagatcccaagattcctgatctgccggcccaggctcctgccccgcccccggttcccagtgcgcggcgccccgcgcctgagcgcccccgcatggcggggccgtgtccccggtccggggcggagcgcgccggcagctgctggcaggacccgctggccgtggcgctgagccggggccggcagctcgcggcgcccccgggccggggctgcgcgcggagccggccgctcagcgtggtctacgtgctgacccgggagccgcagcccgggctcgagcctcgggagggaaccgaggcggagccgctgcccctgcgctgcctgcgcgaggcttgcgcgcaggtcccccggccgcggccgcccccgcagctgcgcagcctgcccttcgggacgctggagctaggcgacaccgcggctctggatgccttctacaacgcggatgtggtggtgctggaggtgagcagctcgctggtacagccctccctgttctaccaccttggtgtgcgtgagagcttcagcatgaccaacaatgtgctcctctgctcccaggccgacctccctgacctgcaggccctgcgggattgcgttggcagctacacactgatcccctatgtggtgacggccactggtcgggtgctgtgtggtgatgcaggccttctgcggggcctggctgatgggctggtacaggctggagtggggaccgaggccctgctcactcccctggtgggccggcttgcccgcctgctggaggccacacccacagactcttgtggctatttccgggagaccattcggcgggacatccggcaggcgcgggagcggttcagtgggccacagctgcggcaggagctggctcgcctgcagcggagactggacagcgtggagctgctgagccccgacatcatcatgaacttgctgctctcctaccgcgatgtgcaggactactcggccatcattgagctggtggagacgctgcaggccttgcccacctgtgatgtggccgagcagcataatgtctgcttccactacacttttgccctcaaccggaggaacaggcctggggaccgggcgaaggccctgtctgtgctgctgccgctggtacagcttgagggctctgtggcgcccgatctgtactgcatgtgtggccgtatctacaaggacatgttcttcagctcgggtttccaggatgctgggcaccgggagcaggcctatcactggtatcgcaaggcttttgacgtagagcccagccttcactcaggcatcaatgcagctgtgctcctcattgctgccgggcagcactttgaggattccaaagagctccggctaataggcatgaagctgggctgcctgctggcccgcaaaggctgcgtggagaagatgcagtattactgggatgtgggtttctacctgggagcccagatcctcgccaatgaccccacccaggtggtgctggctgcagagcagctgtataagctcaatgcccccatatggtacctggtgtccgtgatggagaccttcctgctctaccagcacttcaggcccacgccagagccccctggagggccaccacgccgtgcccacttctggctccacttcttgctacagtcctgccaaccattcaagacagcctgtgcccagggcgaccagtgcttggtgctggtcctggagatgaacaaggtgctgctgcctgcaaagctcgaggttcggggtactgacccagtaagcacagtgaccctgagcctgctggagcctgagacccaggacattccctccagctggaccttcccagtcgcctccatatgcggagtcagcgcctcaaagcgcgacgagcgctgctgcttcctctatgcactccccccggctcaggacgtccagctgtgcttccccagcgtagggcactgccagtggttctgcggcctgatccaggcctgggtgacgaacccggattccacggcgcccgcggaggaggcggagggcgcgggggagatgttggagtttgattatgagtacacggagacgggcgagcggctggtgctgggcaagggcacgtatggggtggtgtacgcgggccgcgatcgccacacgagggtgcgcatcgccatcaaggagatcccggagcgggacagcaggttctctcagcccctgcatgaagagatcgctcttcacagacgcctgcgccacaagaacatagtgcgctatctgggctcagctagccagggcggctaccttaagatcttcatggaggaagtgcctggaggcagcctgtcctccttgctgcggtcggtgtggggacccctgaaggacaacgagagcaccatcagtttctacacccgccagatcctgcagggacttggctacttgcacgacaaccacatcgtgcacagggacataaaaggggacaatgtgctgatcaacaccttcagtgggctgctcaagatttctgacttcggcacctccaagcggctggcaggcatcacaccttgcactgagaccttcacaggaactctgcagtatatggccccagaaatcattgaccagggcccacgcgggtatgggaaagcagctgacatctggtcactgggctgcactgtcattgagatggccacaggtcgcccccccttccacgagctcgggagcccacaggctgccatgtttcaggtgggtatgtacaaggtccatccgccaatgcccagctctctgtcggccgaggcccaagcctttctcctccgaacttttgagccagacccccgcctccgagccagcgcccagacactgctgggggaccccttcctgcagcctgggaaaaggagccgcagccccagctccccacgacatgctccacggccctcagatgccccttctgccagtcccactccttcagccaactcaaccacccagtctcagacattcccgtgccctcaggcaccctctcagcacccacccagccccccgaagcgctgcctcagttatgggggcaccagccagctccgggtgcccgaggagcctgcggccgaggagcctgcgtctccggaggagagttcggggctgagcctgctgcaccaggagagcaagcgtcgggccatgctggccgcagtattggagcaggagctgccagcgctggcggagaatctgcaccaggagcagaagcaagagcagggggcccgtctgggcagaaaccatgtggaagagctgctgcgctgcctcggggcacacatccacactcccaaccgccggcagctcgcccaggagctgcgggcgctgcaaggacggctgagggcccagggccttgggcctgcgcttctgcacagaccgctgtttgccttcccggatgcggtgaagcagatcctccgcaagcgccagatccgtccacactggatgttcgttctggactcactgctcagccgtgctgtgcgggcagccctgggtgtgctaggaccggaggtggagaaggaggcggtctcaccgaggtcagaggagctgagtaatgaaggggactcccagcagagcccaggccagcagagcccgcttccggtggagcccgagcagggccccgctcctctgatggtgcagctgagcctcttgagggcagagactgatcggctgcgcgaaatcctggcggggaaggaacgggagtaccaggccctggtgcagcgggctctacagcggctgaatgaggaagcccggacctatgtcctggccccagagcctccaactgctctttcaacggaccagggcctggtgcagtggctacaggaactgaatgtggattcaggcaccatccaaatgctgttgaaccatagcttcaccctccacactctgctcacctatgccactcgagatgacctcatctacacccgcatcaggggagggatggtatgccgcatctggagggccatcttggcacagcgagcaggatccacaccagtcacctctggaccctgagagctgaatgagggcatcataggccagacaggcccaaggatggatgaatggagaggacaaaggcagcttctgacacaccagccccaggacctggggcgactggaggaagccaggcgagtggggcccaggactggttccagtgagagaaaccaaccacaggcacccaagcactaccagacaaagcgtattaaacagaacacttttgaaccttt

SEQ ID NO: 18534 - DNA, 2530 bp, Homo sapiens
  source 1..2530: mol_type = unassigned DNA
tcatgaacttgctgctctcctaccgcgatgtgcaggactactcggccatcattgagctggtggagacgctgcaggccttgcccacctgtgatgtggccgagcagcataatgtctgcttccactacacttttgccctcaaccggaggaacaggcctggggaccgggcgaaggccctgtctgtgctgctgccgctggtacagcttgagggctctgtggcgcccgatctgtactgcatgtgtggccgtatctacaaggacatgttcttcagctcgggtttccaggatgctgggcaccgggagcaggcctatcactggtatcgcaaggcttttgacgtagagcccagccttcactcaggcatcaatgcagctgtgctcctcattgctgccgggcagcactttgaggattccaaagagctccggctaataggcatgaagctgggctgcctgctggcccgcaaaggctgcgtggagaagatgcagtattactgggatgtgggtttctacctgggagcccagatcctcgccaatgaccccacccaggtggtgctggctgcagagcagctgtataagctcaatgcccccatatggtacctggtgtccgtgatggagaccttcctgctctaccagcacttcaggcccacgccagagccccctggagggccaccacgccgtgcccacttctggctccacttcttgctacagtcctgccaaccattcaagacagcctgtgcccagggcgaccagtgcttggtgctggtcctggagatgaacaaggtgctgctgcctgcaaagctcgaggttcggggtactgacccagtaagcacagtgaccctgagcctgctggagcctgagacccaggacattccctccagctggaccttcccagtcgcctccatatgcggagtcagcgcctcaaagcgcgacgagcgctgctgcttcctctatgcactccccccggctcaggacgtccagctgtgcttccccagcgtagggcactgccagtggttctgcggcctgatccaggcctgggtgacgaacccggattccacggcgcccgcggaggaggcggagggcgcgggggagatgttggagtttgattatgagtacacggagacgggcgagcggctggtgctgggcaagggcacgtatggggtggtgtacgcgggccgcgatcgccacacgagggtgcgcatcgccatcaaggagatcccggagcgggacagcaggttctctcagcccctgcatgaagagatcgctcttcacagacgcctgcgccacaagaacatagtgcgctatctgggctcagctagccagggcggctaccttaagatcttcatggaggaagtgcctggaggcagcctgtcctccttgctgcggtcggtgtggggacccctgaaggacaacgagagcaccatcagtttctacacccgccagatcctgcagggacttggctacttgcacgacaaccacatcgtgcacagggacataaaaggggacaatgtgctgatcaacaccttcagtgggctgctcaagatttctgacttcggcacctccaagcggctggcaggcatcacaccttgcactgagaccttcacaggaactctgcagtatatggccccagaaatcattgaccagggcccacgcgggtatgggaaagcagctgacatctggtcactgggctgcactgtcattgagatggccacaggtcgcccccccttccacgagctcgggagcccacaggctgccatgtttcaggtgggtatgtacaaggtccatccgccaatgcccagctctctgtcggccgaggcccaagcctttctcctccgaacttttgagccagacccccgcctccgagccagcgcccagacactgctgggggaccccttcctgcagcctgggaaaaggagccgcagccccagctccccacgacatgctccacggccctcagatgccccttctgccagtcccactccttcagccaactcaaccacccagtctcagacattcccgtgccctcaggcaccctctcagcacccacccagccccccgaagcgctgcctcagttatgggggcaccagccagctccgggtgcccgaggagcctgcggccgaggagcctgcgtctccggaggagagttcggggctgagcctgctgcaccaggagagcaagcgtcgggccatgctggccgcagtattggagcaggagctgccagcgctggcggagaatctgcaccaggagcagaagcaagagcagggggcccgtctgggcagaaaccatgtggaagagctgctgcgctgcctcggggcacacatccacactcccaaccgccggcagctcgcccaggagctgcgggcgctgcaaggatggatgaatggagaggacaaaggcagcttctgacacaccagccccaggacctggggcgactggaggaagccaggcgagtggggcccaggactggttccagtgagagaaaccaaccacaggcacccaagcactaccagacaaagcgtattaaacagaacacttttgaa

SEQ ID NO: 18535 - DNA, 444 bp, Homo sapiens
  source 1..444: mol_type = unassigned DNA
gggagtaccaggccctggtgcagcgggctctacagcggctgaatgaggaagcccggacctatgtcctggccccagagcctccaactgctctttcaacggaccagggcctggtgcagtggctacaggaactgaatgtggattcaggcaccatccaaatggggagggatggtatgccgcatctggagggccatcttggcacagcgagcaggatccacaccagtcacctctggaccctgagagctgaatgagggcatcataggccagacaggcccaaggatggatgaatggagaggacaaaggcagcttctgacacaccagccccaggacctggggcgactggaggaagccaggcgagtggggcccaggactggttccagtgagagaaaccaaccacaggcacccaagcactaccagacaaagcgtattaaacagaacacttttgaa

SEQ ID NO: 18536 - DNA, 4309 bp, Homo sapiens
  source 1..4309: mol_type = unassigned DNA
gattcccaggatcccccaagtggctctgagctgccgatcaccggatgccccagattcctgggacccaatcccggatttcagaacctcaggaccttgcaagtccgagctaggatttctccctggactttagattcctggaacgggacgtcaggccatcccaagattcctgatctgccggcccaggctcctgccccgcccccggttcccagtgcgcggcgccccgcgcctgagcgcccccgcatggcggggccgtgtccccggtccggggcggagcgcgccggcagctgctggcaggacccgctggccgtggcgctgagccggggccggcagctcgcggcgcccccgggccggggctgcgcgcggagccggccgctcagcgtggtctacgtgctgacccgggagccgcagcccgggctcgagcctcgggagggaaccgaggcggagccgctgcccctgcgctgcctgcgcgaggcttgcgcgcaggtcccccggccgcggccgcccccgcagctgcgcagcctgcccttcgggacgctggagctaggcgacaccgcggctctggatgccttctacaacgcggatgtggtggtgctggaggtgagcagctcgctggtacagccctccctgttctaccaccttggtgtgcgtgagagcttcagcatgaccaacaatgtgctcctctgctcccaggccgacctccctgacctgcaggccctgcgggaggatgttttccagaagaactcggattgcgttggcagctacacactgatcccctatgtggtgacggccactggtcgggtgctgtgtggtgatgcaggccttctgcggggcctggctgatgggctggtacaggctggagtggggaccgaggccctgctcactcccctggtgggccggcttgcccgcctgctggaggccacacccacagactcttgtggctatttccgggagaccattcggcgggacatccggcaggcgcgggagcggttcagtgggccacagctgcggcaggagctggctcgcctgcagcggagactggacagcgtggagctgctgagccccgacatcatcatgaacttgctgctctcctaccgcgatgtgcaggactactcggccatcattgagctggtggagacgctgcaggccttgcccacctgtgatgtggccgagcagcataatgtctgcttccactacacttttgccctcaaccggaggaacaggcctggggaccgggcgaaggccctgtctgtgctgctgccgctggtacagcttgagggctctgtggcgcccgatctgtactgcatgtgtggccgtatctacaaggacatgttcttcagctcgggtttccaggatgctgggcaccgggagcaggcctatcactggtatcgcaaggcttttgacgtagagcccagccttcactcaggcatcaatgcagctgtgctcctcattgctgccgggcagcactttgaggattccaaagagctccggctaataggcatgaagctgggctgcctgctggcccgcaaaggctgcgtggagaagatgcagtattactgggatgtgggtttctacctgggagcccagatcctcgccaatgaccccacccaggtggtgctggctgcagagcagctgtataagctcaatgcccccatatggtacctggtgtccgtgatggagaccttcctgctctaccagcacttcaggcccacgccagagccccctggagggccaccacgccgtgcccacttctggctccacttcttgctacagtcctgccaaccattcaagacagcctgtgcccagggcgaccagtgcttggtgctggtcctggagatgaacaaggtgctgctgcctgcaaagctcgaggttcggggtactgacccagtaagcacagtgaccctgagcctgctggagcctgagacccaggacattccctccagctggaccttcccagtcgcctccatatgcggagtcagcgcctcaaagcgcgacgagcgctgctgcttcctctatgcactccccccggctcaggacgtccagctgtgcttccccagcgtagggcactgccagtggttctgcggcctgatccaggcctgggtgacgaacccggattccacggcgcccgcggaggaggcggagggcgcgggggagatgttggagtttgattatgagtacacggagacgggcgagcggctggtgctgggcaagggcacgtatggggtggtgtacgcgggccgcgatcgccacacgagggtgcgcatcgccatcaaggagatcccggagcgggacagcaggttctctcagcccctgcatgaagagatcgctcttcacagacgcctgcgccacaagaacatagtgcgctatctgggctcagctagccagggcggctaccttaagatcttcatggaggaagtgcctggaggcagcctgtcctccttgctgcggtcggtgtggggacccctgaaggacaacgagagcaccatcagtttctacacccgccagatcctgcagggacttggctacttgcacgacaaccacatcgtgcacagggacataaaaggggacaatgtgctgatcaacaccttcagtgggctgctcaagatttctgacttcggcacctccaagcggctggcaggcatcacaccttgcactgagaccttcacaggaactctgcagtatatggccccagaaatcattgaccagggcccacgcgggtatgggaaagcagctgacatctggtcactgggctgcactgtcattgagatggccacaggtcgcccccccttccacgagctcgggagcccacaggctgccatgtttcaggtgggtatgtacaaggtccatccgccaatgcccagctctctgtcggccgaggcccaagcctttctcctccgaacttttgagccagacccccgcctccgagccagcgcccagacactgctgggggaccccttcctgcagcctgggaaaaggagccgcagccccagctccccacgacatgctccacggccctcagatgccccttctgccagtcccactccttcagccaactcaaccacccagtctcagacattcccgtgccctcaggcaccctctcagcacccacccagccccccgaagcgctgcctcagttatgggggcaccagccagctccgggtgcccgaggagcctgcggccgaggagcctgcgtctccggaggagagttcggggctgagcctgctgcaccaggagagcaagcgtcgggccatgctggccgcagtattggagcaggagctgccagcgctggcggagaatctgcaccaggagcagaagcaagagcagggggcccgtctgggcagaaaccatgtggaagagctgctgcgctgcctcggggcacacatccacactcccaaccgccggcagctcgcccaggagctgcgggcgctgcaaggacggctgagggcccagggccttgggcctgcgcttctgcacagaccgctgtttgccttcccggatgcggtgaagcagatcctccgcaagcgccagatccgtccacactggatgttcgttctggactcactgctcagccgtgctgtgcgggcagccctgggtgtgctaggaccggaggtggagaaggaggcggtctcaccgaggtcagaggagctgagtaatgaaggggactcccagcagagcccaggccagcagagcccgcttccggtggagcccgagcagggccccgctcctctgatggtgcagctgagcctcttgagggcagagactgatcggctgcgcgaaatcctggcggggaaggaacgggagtaccaggccctggtgcagcgggctctacagcggctgaatgaggaagcccggacctatgtcctggccccagagcctccaactgctctttcaacggaccagggcctggtgcagtggctacaggaactgaatgtggattcaggcaccatccaaatgctgttgaaccatagcttcaccctccacactctgctcacctatgccactcgagatgacctcatctacacccgcatcaggggagggatggtatgccgcatctggagggccatcttggcacagcgagcaggatccacaccagtcacctctggaccctgagagctgaatgagggcatcataggccagacaggcccaaggatggatgaatggagaggacaaaggcagcttctgacacaccagccccaggacctggggcgactggaggaagccaggcgagtggggcccaggactggttccagtgagagaaaccaaccacaggcacccaagcactaccagacaaagcgtattaaacagaacactt

SEQ ID NO: 18537 - DNA, 3474 bp, Homo sapiens
  source 1..3474: mol_type = unassigned DNA
gccccagattcctgggacccaatcccggatttcagaacctcaggaccttgcaagtccgagctaggatttctccctggactttagattcctggaacgggacgtcaggccgtattccggatccctagatcccgtgggagattctccgattccgaacggattccagatcccaagattcctgatctgccggcccaggctcctgccccgcccccggttcccagtgcgcggcgccccgcgcctgagcgcccccgcatggcggggccgtgtccccggtccggggcggagcgcgccggcagctgctggcaggacccgctggccgtggcgctgagccggggccggcagctcgcggcgcccccgggccggggctgcgcgcggagccggccgctcagcgtggtctacgtgctgacccgggagccgcagcccgggctcgagcctcgggagggaaccgaggcggagccgctgcccctgcgctgcctgcgcgaggcttgcgcgcaggtcccccggccgcggccgcccccgcagctgcgcagcctgcccttcgggacgctggagctaggcgacaccgcggctctggatgccttctacaacgcggatgtggtggtgctggaggtgagcagctcgctggtacagccctccctgttctaccaccttggtgtgcgtgagagcttcagcatgaccaacaatgtgctcctctgctcccaggccgacctccctgacctgcaggccctgcgggaggatgttttccagaagaactcggattgcgttggcagctacacactgatcccctatgtggtgacggccactggtcgggtgctgtgtggtgatgcaggccttctgcggggcctggctgatgggctggtacaggctggagtggggaccgaggccctgctcactcccctggtgggccggcttgcccgcctgctggaggccacacccacagactcttgtggctatttccgggagaccattcggcgggacatccggcaggcgcgggagcggttcagtgggccacagctgcggcaggagctggctcgcctgcagcggagactggacagcgtggagctgctgagccccgacatcatcatgaacttgctgctctcctaccgcgatgtgcaggactactcggccatcattgagctggtggagacgctgcaggccttgcccacctgtgatgtggccgagcagcataatgtctgcttccactacacttttgccctcaaccggaggaacaggcctggggaccgggcgaaggccctgtctgtgctgctgccgctggtacagcttgagggctctgtggcgcccgatctgtactgcatgtgtggccgtatctacaaggacatgttcttcagctcgggtttccaggatgctgggcaccgggagcaggcctatcactggtatcgcaaggcttttgacgtagagcccagccttcactcaggcatcaatgcagctgtgctcctcattgctgccgggcagcactttgaggattccaaagagctccggctaataggcatgaagctgggctgcctgctggcccgcaaaggctgcgtggagaagatgcagtattactgggatgtgggtttctacctgggagcccagatcctcgccaatgaccccacccaggtggtgctggctgcagagcagctgtataagctcaatgcccccatatggtacctggtgtccgtgatggagaccttcctgctctaccagcacttcaggcccacgccagagccccctggagggccaccacgccgtgcccacttctggctccacttcttgctacagtcctgccaaccattcaagacagcctgtgcccagggcgaccagtgcttggtgctggtcctggagatgaacaaggtgctgctgcctgcaaagctcgaggttcggggtactgacccagtaagcacagtgaccctgagcctgctggagcctgagacccaggacattccctccagctggaccttcccagtcgcctccatatgcggagtcagcgcctcaaagcgcgacgagcgctgctgcttcctctatgcactccccccggctcaggacgtccagctgtgcttccccagcgtagggcactgccagtggttctgcggcctgatccaggcctgggtgacgaacccggattccacggcgcccgcggaggaggcggagggcgcgggggagatgttggagtttgattatgagtacacggagacgggcgagcggctggtgctgggcaagggcacgtatggggtggtgtacgcgggccgcgatcgccacacgagggtgcgcatcgccatcaaggagatcccggagcgggacagcaggttctctcagcccctgcatgaagagatcgctcttcacagacgcctgcgccacaagaacatagtgcgctatctgggctcagctagccagggcggctaccttaagatcttcatggaggaagtgcctggaggcagcctgtcctccttgctgcggtcggtgtggggacccctgaaggacaacgagagcaccatcagtttctacacccgccagatcctgcagggacttggctacttgcacgacaaccacatcgtgcacagggacataaaaggggacaatgtgctgatcaacaccttcagtgggctgctcaagatttctgacttcggcacctccaagcggctggcaggcatcacaccttgcactgagaccttcacaggaactctgcagtatatggccccagaaatcattgaccagggcccacgcgggtatgggaaagcagctgacatctggtcactgggctgcactgtcattgagatggccacaggtcgcccccccttccacgagctcgggagcccacaggctgccatgtttcaggtgggtatgtacaaggtccatccgccaatgcccagctctctgtcggccgaggcccaagcctttctcctccgaacttttgagccagacccccgcctccgagccagcgcccagacactgctgggggaccccttcctgcagcctgggaaaaggagccgcagccccagctccccacgacatgctccacggccctcagatgccccttctgccagtcccactccttcagccaactcaaccacccagtctcagacattcccgtgccctcaggcaccctctcagcacccacccagccccccgaagcgctgcctcagttatgggggcaccagccagctccgggtgcccgaggagcctgcggccgaggagcctgcgtctccggaggagagttcggggctgagcctgctgcaccaggagagcaagcgtcgggccatgctggccgcagtattggagcaggagctgccagcgctggcggagaatctgcaccaggagcagaagcaagagcagggggcccgtctgggcagaaaccatgtggaagagctgctgcgctgcctcggggcacacatccacactcccaaccgccggcagctcgcccaggagctgcgggcgctgcaaggatggatgaatggagaggacaaaggcagcttctga

SEQ ID NO: 18538 - DNA, 3328 bp, Homo sapiens
  source 1..3328: mol_type = unassigned DNA
cataatggtactcgaccaccactgataaaaaatttacctaagcccattgagagcctgatgactcgttgttggtctaaagatccttcccagcgcccttcaatggaggaaattgtgaaaataatgactcacttgatgcgggtataatccttcttttgaggggctttggatttaggggaatttaatatgtgctgagttttaatggaattttaaaagggatgttattactatattctgctttatatattgctatgttttctaagtgagaatgggcatttattactcatagtcagaagaggaaacatttcgagagggaaaatctagttctttatcactggaaagatggctagactaggtttctagacttgcttttttctttttgcttacattagtggacaagtatgtttgtctctgggcctgttgcctcatttgtaatgtgggagaaactgaaatagatagtctctaaagccatcacaggacttggatatattaatattatgacttcaatacatgataaactaaattttacatttttctgataccaattttcatcaagcatttagtcatttatgcaaggcaataggttgcattctcagacacatttatttgagtgacttttactatttggcctattttcaggtttttatatcccagtaaaaagttaaactttcttctatttagaagaacccttttaaatgattatcaaattttcctagtctgtgaatcaagcgcctttagaattatttggaatattttacgcctctggtttttggtacattaacaaaaactgtgaagtggtatcttggctttaaaaagttcaaatatctatgaaagtgcctgaattttgaaacagtttgttcagtagaagaatcttacaatctccttaaatatagactaagtaatttcctaaatggtaaaacgttgtttattcaatctattgaaaatttcttacgcaaagcagcttgaactaatctactaaaagtttaccatcgtatttggataccagtcatatatagaagcctaggccttaaaggtgtgtgcataagaaaacaacttagtctctgtagtcagattacttaaaactttaggatatataagttattgcagttgtaattttgcttctctgttccttgtctaatttgaggagaatacgtttcctttttttctctaaattctaacatttttgtccagcagatactttgagtattatgcctccagtttgtagaaagacattcataatctatcctcttaatatttaaaatgttctaacaattattctatggtatactagtctcagtcttcagactaacagtcactggaagtttacatcactactgtaagaacatgagtatgttttacataattatgagaaatgatactattttatttcatatgtttctctagagaaatatttgctgttttcttcaagactatctagactccaatgtaagctagattcttaggtaggtgcatggcattgatcaaagttgaaatccaagagtacattattgtaatctttgtaaaataaaaaacttaggcacctacaaatttagtatataacttagggaaaataaaacattaatcaggatttaatttgtattaaggaaattttaagctgtggtttacttttttatatatagtactttccaggagcagatgagccattacagtatccttgtcagtattcagatgaaggacagagcaactctgccaccagtacaggctcattcatggacattgcttctacaaatacgagtaacaaaagtgacactaatatggagcaagttcctgccacaaatgatactattaagcgcttagaatcaaaattgttgaaaaatcaggcaaagcaacagagtgaatctggacgtttaagcttgggagcctcccgtgggagcagtgtggagagcttgcccccaacctctgagggcaagaggatgagtgctgacatgtctgaaatagaagctaggatcgccgcaaccacaggcaacggacagccaagacgtagatccatccaagacttgactgtaactggaacagaacctggtcaggtgagcagtaggtcatccagtcccagtgtcagaatgattactacctcaggaccaacctcagaaaagccaactcgaagtcatccatggacccctgatgattccacagataccaatggatcagataactccatcccaatggcttatcttacactggatcaccaactacagcctctagcaccgtgcccaaactccaaagaatctatggcagtgtttgaacagcattgtaaaatggcacaagaatatatgaaagttcaaacagaaattgcattgttattacagagaaagcaagaactagttgcagaactggaccaggatgaaaaggaccagcaaaatacatctcgcctggtacaggaacataaaaagcttttagatgaaaacaaaagcctttctacttactaccagcaatgcaaaaaacaactagaggtcatcagaagtcagcagcagaaacgacaaggcacttcatgattctctgggaccgttacattttgaaatatgcaaagaaagactttttttttaaggaaaggaaaaccttataatgacgattcatgagtgttagctttttggcgtgttctgaatgccaactgcctatatttgctgcatttttttcattgtttattttccttttctcatggtggacatacaattttactgtttcattgcataacatggtagcatctgtgacttgaatgagcagcactttgcaacttcaaaacagatgcagtgaactgtggctgtatatgcatgctcattgtgtgaaggctagcctaacagaacaggaggtatcaaactagctgctatgtgcaaacagcgtccattttttcatattagaggtggaacctcaagaatgactttattcttgtatctcatctcaaaatattaataatttttttcccaaaagatggtatataccaagttaaagacagggtattataaatttagagtgattggtggtatattacggaaatacggaacctttagggatagttccgtgtaagggctttgatgccagcatccttggatcagtactgaactcagttccatccgtaaaatatgtaaaggtaagtggcagctgctctatttaatgaaagcagttttaccggattttgttagactaaaatttgattgtgatacattgaacaaaatggaactcatttttttttaaggagtaaagatttttaattctgtgattgtgtgtatgtgtgttgaaactgtaaagcttttatgactctaatattaatctcttaaatgaaattaaaaggcaaaagaacatgattgagcttaaa

SEQ ID NO: 18539 - DNA, 4633 bp, Homo sapiens
  source 1..4633: mol_type = unassigned DNA
atgtctacagcctctgccgcctcctcctcctcctcgtcttcggccggtgagatgatcgaagccccttcccaggtcctcaactttgaagagatcgactacaaggagatcgaggtggaagaggttgttggaagaggagcctttggagttgtttgcaaagctaagtggagagcaaaagatgttgctattaaacaaatagaaagtgaatctgagaggaaagcgtttattgtagagcttcggcagttatcccgtgtgaaccatcctaatattgtaaagctttatggagcctgcttgaatccagtgtgtcttgtgatggaatatgctgaagggggctctttatataatgtgctgcatggtgctgaaccattgccatattatactgctgcccacgcaatgagttggtgtttacagtgttcccaaggagtggcttatcttcacagcatgcaacccaaagcgctaattcacagggacctgaaaccaccaaacttactgctggttgcaggggggacagttctaaaaatttgtgattttggtacagcctgtgacattcagacacacatgaccaataacaaggggagtgctgcttggatggcacctgaagtttttgaaggtagtaattacagtgaaaaatgtgacgtcttcagctggggtattattctttgggaagtgataacgcgtcggaaaccctttgatgagattggtggcccagctttccgaatcatgtgggctgttcataatggtactcgaccaccactgataaaaaatttacctaagcccattgagagcctgatgactcgttgttggtctaaagatccttcccagcgcccttcaatggaggaaattgtgaaaataatgactcacttgatgcggtactttccaggagcagatgagccattacagtatccttgtcagtattcagatgaaggacagagcaactctgccaccagtacaggctcattcatggacattgcttctacaaatacgagtaacaaaagtgacactaatatggagcaagttcctgccacaaatgatactattaagcgcttagaatcaaaattgttgaaaaatcaggcaaagcaacagagtgaatctggacgtttaagcttgggagcctcccgtgggagcagtgtggagagcttgcccccaacctctgagggcaagaggatgagtgctgacatgtctgaaatagaagctaggatcgccgcaaccacagcctattccaagcctaaacggggccaccgtaaaactgcttcatttggcaacattctggatgtccctgagatcgtcatatcaggcaacggacagccaagacgtagatccatccaagacttgactgtaactggaacagaacctggtcaggtgagcagtaggtcatccagtcccagtgtcagaatgattactacctcaggaccaacctcagaaaagccaactcgaagtcatccatggacccctgatgattccacagataccaatggatcagataactccatcccaatggcttatcttacactggatcaccaactacaggcaagaactagttgcagaactggaccaggatgaaaaggaccagcaaaatacatctcgcctggtacaggaacataaaaagcttttagatgaaaacaaaagcctttctacttactaccagcaatgcaaaaaacaactagaggtcatcagaagtcagcagcagaaacgacaaggcacttcatgattctctgggaccgttacattttgaaatatgcaaagaaagactttttttttaaggaaaggaaaaccttataatgacgattcatgagtgttagctttttggcgtgttctgaatgccaactgcctatatttgctgcatttttttcattgtttattttccttttctcatggtggacatacaattttactgtttcattgcataacatggtagcatctgtgacttgaatgagcagcactttgcaacttcaaaacagatgcagtgaactgtggctgtatatgcatgctcattgtgtgaaggctagcctaacagaacaggaggtatcaaactagctgctatgtgcaaacagcgtccattttttcatattagaggtggaacctcaagaatgactttattcttgtatctcatctcaaaatattaataatttttttcccaaaagatggtatataccaagttaaagacagggtattataaatttagagtgattggtggtatattacggaaatacggaacctttagggatagttccgtgtaagggctttgatgccagcatccttggatcagtactgaactcagttccatccgtaaaatatgtaaaggtaagtggcagctgctctatttaatgaaagcagttttaccggattttgttagactaaaatttgattgtgatacattgaacaaaatggaactcatttttttttaaggagtaaagatttttaattctgtgattgtgtgtatgtgtgttgaaactgtaaagcttttatgactctaatattaatctcttaaatgaaattaaaaggcaaaagaacatgattgagcttaaatgatcatttcttcctgcagtgattcttggattgttttctcatgtatttgaaaaaaaaaaaatgaagaaaaataatggaaaatggaagtaattactccagctaaaaaaagcttggacttagatttctttttatgataccaaatgagaaataaaccaggcaaatcagaaggaagttaaagaagcaaatataaattcaacaagtgtcctaattatcctggatattggaatatttgattttccttacaatcccgttctagaatgcctgccgcctttcaacactttcaagagaatttcaacacttacagagtatttatattgttaacagtaattttgctaccaaaaccttcagaataactttaataataaaatgacactgaaataatagactatacaaactctatattttttcagttggtgttaaaataagtcacattttgataccagtacaagatgtcttttaaataaggatgtcatcagtctgatttttatagcattaatgttttatgaagaaaaagttcaaaatgaaagcattaattgctgtgattattagaattctatcatgactgtattgtagtttttgctctatttcagataagcaagatctaagaagttatcaaaactattctttaaaatgctaaagcaggtaactttttcttccattattttttcctcctaccactgagttttgtaatgaattccttgtgtatacaagcaatacaggtgaatactaaactgttatttttagcttcttcaaaagctattttagaaagcttcctggaaataaatgtcttctgtcatttaatttaaataaaaggagtgttaattgttcccaaatttgattacctagctgaaacagatattggattcagcatagtaatagtaaaataaaattggcagagaaaataactgtagactaggataaagcatgactcctccatagcattgttgcttgtatgtacatctgtcactccactgaaagggacctagtcactttaaagaggccttttatctcagcacgagatatccaagcgtgaatgctaaggcttgatgtttccattaggatttagcattcgagatttcagattttatttatagtcattgatgtgttttgctgtattataacacatttaagggaaattttattatggtttttacatgtagtcatttcataaaaatatccagataggtaaatggaagaaaatagtagattttagtcatggtaccaaatgcaagaggctgttgaacagttgcttgtttgtttacagtaagttccttgagattttcagtactgtagttgccctggacattgagtacagttcagccttactctgtttttaagtagttgtgttgtcaatttcatgcttttaagtcctgatgatccttggagatgggagaaaaagataccagggataattaaaatccacagccagtttcatcagtttcctcatccatcctgcaaataaaaatgttaacaaggagccaaacttattcgttctggttttacaatttattttgaccgttttttgggtgaaaattgcaaacagccaagcaagtggctggaatgccccagtctaagaaattcaaaaacaatcactgagtaagccctaattacattaattacattttactcttgactccaggaaaagaaagcaagcttttatctaatctagagggaagtattcgtgagcaataaaaatcacttttttgagttgaataataatcagttaagaatatttaccgcatagcaacacaacatataaagatttgttacaagttgtttacggatgtttgactatttttgctgaagtattttagagtattgaatgtcttctctcttcaagtttctttcatgttcctaatttcagctcctgtagccagagatcacaggtcttccctgtgaaactttggtttctttctataaatgtgtgtggttttcagcgctcaactcctgtcttcaaatggtagtaagttctacttctacttctgtcattcagaacattttatgtcaaatgatgtaatgcagaaattcttgtgcatatttgtaactgaaggaagctttttagatttatttttgtttttaataaaattcagattcctattctaaactggta

SEQ ID NO: 18540 - DNA, 4558 bp, Homo sapiens
  source 1..4558: mol_type = unassigned DNA
gggatcatgtctacagcctctgccgcctcctcctcctcctcgtcttcggccggtgagatgatcgaagccccttcccaggtcctcaactttgaagagatcgactacaaggagatcgaggtggaagaggttgttggaagaggagcctttggagttgtttgcaaagctaagtggagagcaaaagatgttgctattaaacaaatagaaagtgaatctgagaggaaagcgtttattgtagagcttcggcagttatcccgtgtgaaccatcctaatattgtaaagctttatggagcctgcttgaatccagtgtgtcttgtgatggaatatgctgaagggggctctttatataatgtgctgcatggtgctgaaccattgccatattatactgctgcccacgcaatgagttggtgtttacagtgttcccaaggagtggcttatcttcacagcatgcaacccaaagcgctaattcacagggacctgaaaccaccaaacttactgctggttgcaggggggacagttctaaaaatttgtgattttggtacagcctgtgacattcagacacacatgaccaataacaaggggagtgctgcttggatggcacctgaagtttttgaaggtagtaattacagtgaaaaatgtgacgtcttcagctggggtattattctttgggaagtgataacgcgtcggaaaccctttgatgagattggtggcccagctttccgaatcatgtgggctgttcataatggtactcgaccaccactgataaaaaatttacctaagcccattgagagcctgatgactcgttgttggtctaaagatccttcccagcgcccttcaatggaggaaattgtgaaaataatgactcacttgatgcggtactttccaggagcagatgagccattacagtatccttgtcagtattcagatgaaggacagagcaactctgccaccagtacaggctcattcatggacattgcttctacaaatacgagtaacaaaagtgacactaatatggagcaagttcctgccacaaatgatactattaagcgcttagaatcaaaattgttgaaaaatcaggcaaagcaacagagtgaatctggacgtttaagcttgggagcctcccgtgggagcagtgtggagagcttgcccccaacctctgagggcaagaggatgagtgctgacatgtctgaaatagaagctaggatcgccgcaaccacaggcaacggacagccaagacgtagatccatccaagacttgactgtaactggaacagaacctggtcaggtgagcagtaggtcatccagtcccagtgtcagaatgattactacctcaggaccaacctcagaaaagccaactcgaagtcatccatggacccctgatgattccacagataccaatggatcagataactccatcccaatggcttatcttacactggatcaccaactacaggcaagaactagttgcagaactggaccaggatgaaaaggaccagcaaaatacatctcgcctggtacaggaacataaaaagcttttagatgaaaacaaaagcctttctacttactaccagcaatgcaaaaaacaactagaggtcatcagaagtcagcagcagaaacgacaaggcacttcatgattctctgggaccgttacattttgaaatatgcaaagaaagactttttttttaaggaaaggaaaaccttataatgacgattcatgagtgttagctttttggcgtgttctgaatgccaactgcctatatttgctgcatttttttcattgtttattttccttttctcatggtggacatacaattttactgtttcattgcataacatggtagcatctgtgacttgaatgagcagcactttgcaacttcaaaacagatgcagtgaactgtggctgtatatgcatgctcattgtgtgaaggctagcctaacagaacaggaggtatcaaactagctgctatgtgcaaacagcgtccattttttcatattagaggtggaacctcaagaatgactttattcttgtatctcatctcaaaatattaataatttttttcccaaaagatggtatataccaagttaaagacagggtattataaatttagagtgattggtggtatattacggaaatacggaacctttagggatagttccgtgtaagggctttgatgccagcatccttggatcagtactgaactcagttccatccgtaaaatatgtaaaggtaagtggcagctgctctatttaatgaaagcagttttaccggattttgttagactaaaatttgattgtgatacattgaacaaaatggaactcatttttttttaaggagtaaagatttttaattctgtgattgtgtgtatgtgtgttgaaactgtaaagcttttatgactctaatattaatctcttaaatgaaattaaaaggcaaaagaacatgattgagcttaaatgatcatttcttcctgcagtgattcttggattgttttctcatgtatttgaaaaaaaaaaaatgaagaaaaataatggaaaatggaagtaattactccagctaaaaaaagcttggacttagatttctttttatgataccaaatgagaaataaaccaggcaaatcagaaggaagttaaagaagcaaatataaattcaacaagtgtcctaattatcctggatattggaatatttgattttccttacaatcccgttctagaatgcctgccgcctttcaacactttcaagagaatttcaacacttacagagtatttatattgttaacagtaattttgctaccaaaaccttcagaataactttaataataaaatgacactgaaataatagactatacaaactctatattttttcagttggtgttaaaataagtcacattttgataccagtacaagatgtcttttaaataaggatgtcatcagtctgatttttatagcattaatgttttatgaagaaaaagttcaaaatgaaagcattaattgctgtgattattagaattctatcatgactgtattgtagtttttgctctatttcagataagcaagatctaagaagttatcaaaactattctttaaaatgctaaagcaggtaactttttcttccattattttttcctcctaccactgagttttgtaatgaattccttgtgtatacaagcaatacaggtgaatactaaactgttatttttagcttcttcaaaagctattttagaaagcttcctggaaataaatgtcttctgtcatttaatttaaataaaaggagtgttaattgttcccaaatttgattacctagctgaaacagatattggattcagcatagtaatagtaaaataaaattggcagagaaaataactgtagactaggataaagcatgactcctccatagcattgttgcttgtatgtacatctgtcactccactgaaagggacctagtcactttaaagaggccttttatctcagcacgagatatccaagcgtgaatgctaaggcttgatgtttccattaggatttagcattcgagatttcagattttatttatagtcattgatgtgttttgctgtattataacacatttaagggaaattttattatggtttttacatgtagtcatttcataaaaatatccagataggtaaatggaagaaaatagtagattttagtcatggtaccaaatgcaagaggctgttgaacagttgcttgtttgtttacagtaagttccttgagattttcagtactgtagttgccctggacattgagtacagttcagccttactctgtttttaagtagttgtgttgtcaatttcatgcttttaagtcctgatgatccttggagatgggagaaaaagataccagggataattaaaatccacagccagtttcatcagtttcctcatccatcctgcaaataaaaatgttaacaaggagccaaacttattcgttctggttttacaatttattttgaccgttttttgggtgaaaattgcaaacagccaagcaagtggctggaatgccccagtctaagaaattcaaaaacaatcactgagtaagccctaattacattaattacattttactcttgactccaggaaaagaaagcaagcttttatctaatctagagggaagtattcgtgagcaataaaaatcacttttttgagttgaataataatcagttaagaatatttaccgcatagcaacacaacatataaagatttgttacaagttgtttacggatgtttgactatttttgctgaagtattttagagtattgaatgtcttctctcttcaagtttctttcatgttcctaatttcagctcctgtagccagagatcacaggtcttccctgtgaaactttggtttctttctataaatgtgtgtggttttcagcgctcaactcctgtcttcaaatggtagtaagttctacttctacttctgtcattcagaacattttatgtcaaatgatgtaatgcagaaattcttgtgcatatttgtaactgaaggaagctttttagatttatttttgtttttaataaaattcagattcctattctaaactggta

SEQ ID NO: 18541 - DNA, 4911 bp, Homo sapiens
  source 1..4911: mol_type = unassigned DNA
ggacacggctgtggccgctgcctctacccccgccacggatcgccgggtagtaggactgcgcggctccaggctgagggtcggtccggaggcgggtgggcgcgggtctcacccggattgtccgggtggcaccgttcccggccccaccgggcgccgcgagggatcatgtctacagcctctgccgcctcctcctcctcctcgtcttcggccggtgagatgatcgaagccccttcccaggtcctcaactttgaagagatcgactacaaggagatcgaggtggaagaggttgttggaagaggagcctttggagttgtttgcaaagctaagtggagagcaaaagatgttgctattaaacaaatagaaagtgaatctgagaggaaagcgtttattgtagagcttcggcagttatcccgtgtgaaccatcctaatattgtaaagctttatggagcctgcttgaatccagtgtgtcttgtgatggaatatgctgaagggggctctttatataatgtgctgcatggtgctgaaccattgccatattatactgctgcccacgcaatgagttggtgtttacagtgttcccaaggagtggcttatcttcacagcatgcaacccaaagcgctaattcacagggacctgaaaccaccaaacttactgctggttgcaggggggacagttctaaaaatttgtgattttggtacagcctgtgacattcagacacacatgaccaataacaaggggagtgctgcttggatggcacctgaagtttttgaaggtagtaattacagtgaaaaatgtgacgtcttcagctggggtattattctttgggaagtgataacgcgtcggaaaccctttgatgagattggtggcccagctttccgaatcatgtgggctgttcataatggtactcgaccaccactgataaaaaatttacctaagcccattgagagcctgatgactcgttgttggtctaaagatccttcccagcgcccttcaatggaggaaattgtgaaaataatgactcacttgatgcggtactttccaggagcagatgagccattacagtatccttgtcagtattcagatgaaggacagagcaactctgccaccagtacaggctcattcatggacattgcttctacaaatacgagtaacaaaagtgacactaatatggagcaagttcctgccacaaatgatactattaagcgcttagaatcaaaattgttgaaaaatcaggcaaagcaacagagtgaatctggacgtttaagcttgggagcctcccgtgggagcagtgtggagagcttgcccccaacctctgagggcaagaggatgagtgctgacatgtctgaaatagaagctaggatcgccgcaaccacagcctattccaagcctaaacggggccaccgtaaaactgcttcatttggcaacattctggatgtccctgagatcgtcatatcaggcaacggacagccaagacgtagatccatccaagacttgactgtaactggaacagaacctggtcaggtgagcagtaggtcatccagtcccagtgtcagaatgattactacctcaggaccaacctcagaaaagccaactcgaagtcatccatggacccctgatgattccacagataccaatggatcagataactccatcccaatggcttatcttacactggatcaccaactacagcctctagcaccgtgcccaaactccaaagaatctatggcagtgtttgaacagcattgtaaaatggcacaagaatatatgaaagttcaaacagaaattgcattgttattacagagaaagcaagaactagttgcagaactggaccaggatgaaaaggaccagcaaaatacatctcgcctggtacaggaacataaaaagcttttagatgaaaacaaaagcctttctacttactaccagcaatgcaaaaaacaactagaggtcatcagaagtcagcagcagaaacgacaaggcacttcatgattctctgggaccgttacattttgaaatatgcaaagaaagactttttttttaaggaaaggaaaaccttataatgacgattcatgagtgttagctttttggcgtgttctgaatgccaactgcctatatttgctgcatttttttcattgtttattttccttttctcatggtggacatacaattttactgtttcattgcataacatggtagcatctgtgacttgaatgagcagcactttgcaacttcaaaacagatgcagtgaactgtggctgtatatgcatgctcattgtgtgaaggctagcctaacagaacaggaggtatcaaactagctgctatgtgcaaacagcgtccattttttcatattagaggtggaacctcaagaatgactttattcttgtatctcatctcaaaatattaataatttttttcccaaaagatggtatataccaagttaaagacagggtattataaatttagagtgattggtggtatattacggaaatacggaacctttagggatagttccgtgtaagggctttgatgccagcatccttggatcagtactgaactcagttccatccgtaaaatatgtaaaggtaagtggcagctgctctatttaatgaaagcagttttaccggattttgttagactaaaatttgattgtgatacattgaacaaaatggaactcatttttttttaaggagtaaagatttttaattctgtgattgtgtgtatgtgtgttgaaactgtaaagcttttatgactctaatattaatctcttaaatgaaattaaaaggcaaaagaacatgattgagcttaaatgatcatttcttcctgcagtgattcttggattgttttctcatgtatttgaaaaaaaaaaaatgaagaaaaataatggaaaatggaagtaattactccagctaaaaaaagcttggacttagatttctttttatgataccaaatgagaaataaaccaggcaaatcagaaggaagttaaagaagcaaatataaattcaacaagtgtcctaattatcctggatattggaatatttgattttccttacaatcccgttctagaatgcctgccgcctttcaacactttcaagagaatttcaacacttacagagtatttatattgttaacagtaattttgctaccaaaaccttcagaataactttaataataaaatgacactgaaataatagactatacaaactctatattttttcagttggtgttaaaataagtcacattttgataccagtacaagatgtcttttaaataaggatgtcatcagtctgatttttatagcattaatgttttatgaagaaaaagttcaaaatgaaagcattaattgctgtgattattagaattctatcatgactgtattgtagtttttgctctatttcagataagcaagatctaagaagttatcaaaactattctttaaaatgctaaagcaggtaactttttcttccattattttttcctcctaccactgagttttgtaatgaattccttgtgtatacaagcaatacaggtgaatactaaactgttatttttagcttcttcaaaagctattttagaaagcttcctggaaataaatgtcttctgtcatttaatttaaataaaaggagtgttaattgttcccaaatttgattacctagctgaaacagatattggattcagcatagtaatagtaaaataaaattggcagagaaaataactgtagactaggataaagcatgactcctccatagcattgttgcttgtatgtacatctgtcactccactgaaagggacctagtcactttaaagaggccttttatctcagcacgagatatccaagcgtgaatgctaaggcttgatgtttccattaggatttagcattcgagatttcagattttatttatagtcattgatgtgttttgctgtattataacacatttaagggaaattttattatggtttttacatgtagtcatttcataaaaatatccagataggtaaatggaagaaaatagtagattttagtcatggtaccaaatgcaagaggctgttgaacagttgcttgtttgtttacagtaagttccttgagattttcagtactgtagttgccctggacattgagtacagttcagccttactctgtttttaagtagttgtgttgtcaatttcatgcttttaagtcctgatgatccttggagatgggagaaaaagataccagggataattaaaatccacagccagtttcatcagtttcctcatccatcctgcaaataaaaatgttaacaaggagccaaacttattcgttctggttttacaatttattttgaccgttttttgggtgaaaattgcaaacagccaagcaagtggctggaatgccccagtctaagaaattcaaaaacaatcactgagtaagccctaattacattaattacattttactcttgactccaggaaaagaaagcaagcttttatctaatctagagggaagtattcgtgagcaataaaaatcacttttttgagttgaataataatcagttaagaatatttaccgcatagcaacacaacatataaagatttgttacaagttgtttacggatgtttgactatttttgctgaagtattttagagtattgaatgtcttctctcttcaagtttctttcatgttcctaatttcagctcctgtagccagagatcacaggtcttccctgtgaaactttggtttctttctataaatgtgtgtggttttcagcgctcaactcctgtcttcaaatggtagtaagttctacttctacttctgtcattcagaacattttatgtcaaatgatgtaatgcagaaattcttgtgcatatttgtaactgaaggaagctttttagatttatttttgtttttaataaaattcagattcctattctaaactggta

SEQ ID NO: 18542 - DNA, 4830 bp, Homo sapiens
  source 1..4830: mol_type = unassigned DNA
ggacacggctgtggccgctgcctctacccccgccacggatcgccgggtagtaggactgcgcggctccaggctgagggtcggtccggaggcgggtgggcgcgggtctcacccggattgtccgggtggcaccgttcccggccccaccgggcgccgcgagggatcatgtctacagcctctgccgcctcctcctcctcctcgtcttcggccggtgagatgatcgaagccccttcccaggtcctcaactttgaagagatcgactacaaggagatcgaggtggaagaggttgttggaagaggagcctttggagttgtttgcaaagctaagtggagagcaaaagatgttgctattaaacaaatagaaagtgaatctgagaggaaagcgtttattgtagagcttcggcagttatcccgtgtgaaccatcctaatattgtaaagctttatggagcctgcttgaatccagtgtgtcttgtgatggaatatgctgaagggggctctttatataatgtgctgcatggtgctgaaccattgccatattatactgctgcccacgcaatgagttggtgtttacagtgttcccaaggagtggcttatcttcacagcatgcaacccaaagcgctaattcacagggacctgaaaccaccaaacttactgctggttgcaggggggacagttctaaaaatttgtgattttggtacagcctgtgacattcagacacacatgaccaataacaaggggagtgctgcttggatggcacctgaagtttttgaaggtagtaattacagtgaaaaatgtgacgtcttcagctggggtattattctttgggaagtgataacgcgtcggaaaccctttgatgagattggtggcccagctttccgaatcatgtgggctgttcataatggtactcgaccaccactgataaaaaatttacctaagcccattgagagcctgatgactcgttgttggtctaaagatccttcccagcgcccttcaatggaggaaattgtgaaaataatgactcacttgatgcggtactttccaggagcagatgagccattacagtatccttgtcagtattcagatgaaggacagagcaactctgccaccagtacaggctcattcatggacattgcttctacaaatacgagtaacaaaagtgacactaatatggagcaagttcctgccacaaatgatactattaagcgcttagaatcaaaattgttgaaaaatcaggcaaagcaacagagtgaatctggacgtttaagcttgggagcctcccgtgggagcagtgtggagagcttgcccccaacctctgagggcaagaggatgagtgctgacatgtctgaaatagaagctaggatcgccgcaaccacaggcaacggacagccaagacgtagatccatccaagacttgactgtaactggaacagaacctggtcaggtgagcagtaggtcatccagtcccagtgtcagaatgattactacctcaggaccaacctcagaaaagccaactcgaagtcatccatggacccctgatgattccacagataccaatggatcagataactccatcccaatggcttatcttacactggatcaccaactacagcctctagcaccgtgcccaaactccaaagaatctatggcagtgtttgaacagcattgtaaaatggcacaagaatatatgaaagttcaaacagaaattgcattgttattacagagaaagcaagaactagttgcagaactggaccaggatgaaaaggaccagcaaaatacatctcgcctggtacaggaacataaaaagcttttagatgaaaacaaaagcctttctacttactaccagcaatgcaaaaaacaactagaggtcatcagaagtcagcagcagaaacgacaaggcacttcatgattctctgggaccgttacattttgaaatatgcaaagaaagactttttttttaaggaaaggaaaaccttataatgacgattcatgagtgttagctttttggcgtgttctgaatgccaactgcctatatttgctgcatttttttcattgtttattttccttttctcatggtggacatacaattttactgtttcattgcataacatggtagcatctgtgacttgaatgagcagcactttgcaacttcaaaacagatgcagtgaactgtggctgtatatgcatgctcattgtgtgaaggctagcctaacagaacaggaggtatcaaactagctgctatgtgcaaacagcgtccattttttcatattagaggtggaacctcaagaatgactttattcttgtatctcatctcaaaatattaataatttttttcccaaaagatggtatataccaagttaaagacagggtattataaatttagagtgattggtggtatattacggaaatacggaacctttagggatagttccgtgtaagggctttgatgccagcatccttggatcagtactgaactcagttccatccgtaaaatatgtaaaggtaagtggcagctgctctatttaatgaaagcagttttaccggattttgttagactaaaatttgattgtgatacattgaacaaaatggaactcatttttttttaaggagtaaagatttttaattctgtgattgtgtgtatgtgtgttgaaactgtaaagcttttatgactctaatattaatctcttaaatgaaattaaaaggcaaaagaacatgattgagcttaaatgatcatttcttcctgcagtgattcttggattgttttctcatgtatttgaaaaaaaaaaaatgaagaaaaataatggaaaatggaagtaattactccagctaaaaaaagcttggacttagatttctttttatgataccaaatgagaaataaaccaggcaaatcagaaggaagttaaagaagcaaatataaattcaacaagtgtcctaattatcctggatattggaatatttgattttccttacaatcccgttctagaatgcctgccgcctttcaacactttcaagagaatttcaacacttacagagtatttatattgttaacagtaattttgctaccaaaaccttcagaataactttaataataaaatgacactgaaataatagactatacaaactctatattttttcagttggtgttaaaataagtcacattttgataccagtacaagatgtcttttaaataaggatgtcatcagtctgatttttatagcattaatgttttatgaagaaaaagttcaaaatgaaagcattaattgctgtgattattagaattctatcatgactgtattgtagtttttgctctatttcagataagcaagatctaagaagttatcaaaactattctttaaaatgctaaagcaggtaactttttcttccattattttttcctcctaccactgagttttgtaatgaattccttgtgtatacaagcaatacaggtgaatactaaactgttatttttagcttcttcaaaagctattttagaaagcttcctggaaataaatgtcttctgtcatttaatttaaataaaaggagtgttaattgttcccaaatttgattacctagctgaaacagatattggattcagcatagtaatagtaaaataaaattggcagagaaaataactgtagactaggataaagcatgactcctccatagcattgttgcttgtatgtacatctgtcactccactgaaagggacctagtcactttaaagaggccttttatctcagcacgagatatccaagcgtgaatgctaaggcttgatgtttccattaggatttagcattcgagatttcagattttatttatagtcattgatgtgttttgctgtattataacacatttaagggaaattttattatggtttttacatgtagtcatttcataaaaatatccagataggtaaatggaagaaaatagtagattttagtcatggtaccaaatgcaagaggctgttgaacagttgcttgtttgtttacagtaagttccttgagattttcagtactgtagttgccctggacattgagtacagttcagccttactctgtttttaagtagttgtgttgtcaatttcatgcttttaagtcctgatgatccttggagatgggagaaaaagataccagggataattaaaatccacagccagtttcatcagtttcctcatccatcctgcaaataaaaatgttaacaaggagccaaacttattcgttctggttttacaatttattttgaccgttttttgggtgaaaattgcaaacagccaagcaagtggctggaatgccccagtctaagaaattcaaaaacaatcactgagtaagccctaattacattaattacattttactcttgactccaggaaaagaaagcaagcttttatctaatctagagggaagtattcgtgagcaataaaaatcacttttttgagttgaataataatcagttaagaatatttaccgcatagcaacacaacatataaagatttgttacaagttgtttacggatgtttgactatttttgctgaagtattttagagtattgaatgtcttctctcttcaagtttctttcatgttcctaatttcagctcctgtagccagagatcacaggtcttccctgtgaaactttggtttctttctataaatgtgtgtggttttcagcgctcaactcctgtcttcaaatggtagtaagttctacttctacttctgtcattcagaacattttatgtcaaatgatgtaatgcagaaattcttgtgcatatttgtaactgaaggaagctttttagatttatttttgtttttaataaaattcagattcctattctaaactggta

SEQ ID NO: 18543 - DNA, 1773 bp, Homo sapiens
  source 1..1773: mol_type = unassigned DNA
aaaacgcagcggagccagagccggacacggctgtggccgctgcctctacccccgccacggatcgccgggtagtaggactgcgcggctccaggctgagggtcggtccggaggcgggtgggcgcgggtctcacccggattgtccgggtggcaccgttcccggccccaccgggcgccgcgagggatcatgtctacagcctctgccgcctcctcctcctcctcgtcttcggccggtgagatgatcgaagccccttcccaggtcctcaactttgaagagatcgactacaaggagatcgaggtggaagaggttgttggaagaggagcctttggagttgtttgcaaagctaagtggagagcaaaagatgttgctattaaacaaatagaaagtgaatctgagaggaaagcgtttattgtagagcttcggcagttatcccgtgtgaaccatcctaacttactgctggttgcaggggggacagttctaaaaatttgtgattttggtacagcctgtgacattcagacacacatgaccaataacaaggggagtgctgcttggatggcacctgaagtttttgaaggtagtaattacagtgaaaaatgtgacgtcttcagctggggtattattctttgggaagtgataacgcgtcggaaaccctttgatgagattggtggcccagctttccgaatcatgtgggctgttcataatggtactcgaccaccactgataaaaaatttacctaagcccattgagagcctgatgactcgttgttggtctaaagatccttcccagcgcccttcaatggaggaaattgtgaaaataatgactcacttgatgcggtactttccaggagcagatgagccattacagtatccttgtcagtattcagatgaaggacagagcaactctgccaccagtacaggctcattcatggacattgcttctacaaatacgagtaacaaaagtgacactaatatggagcaagttcctgccacaaatgatactattaagcgcttagaatcaaaattgttgaaaaatcaggcaaagcaacagagtgaatctggacgtttaagcttgggagcctcccgtgggagcagtgtggagagcttgcccccaacctctgagggcaagaggatgagtgctgacatgtctgaaatagaagctaggatcgccgcaaccacaggcaacggacagccaagacgtagatccatccaagacttgactgtaactggaacagaacctggtcaggtgagcagtaggtcatccagtcccagtgtcagaatgattactacctcaggaccaacctcagaaaagccaactcgaagtcatccatggacccctgatgattccacagataccaatggatcagataactccatcccaatggcttatcttacactggatcaccaactacaggcaagaactagttgcagaactggaccaggatgaaaaggaccagcaaaatacatctcgcctggtacaggaacataaaaagcttttagatgaaaacaaaagcctttctacttactaccagcaatgcaaaaaacaactagaggtcatcagaagtcagcagcagaaacgacaaggcacttcatgattctctgggaccgttacattttgaaatatgcaaagaaagactttttttttaaggaaaggaaaaccttataatgacgattcatgagtgttagctttttggcgtgttctgaatgccaactgcctatatttgctgcatttttttcattgtttattttccttttctcatggtggacatacaattttac

SEQ ID NO: 18544 - DNA, 3096 bp, Homo sapiens
  source 1..3096: mol_type = unassigned DNA
cgggcgcccagagggcaaatgaggggcggcggggtggcgggtgggggggagacgcggaatttcccagcgcgggggctctggcttaccctgcaaccgggcagtctctttctgtttacggagagaaaggggaaatggaaaagtcggggaggcggtggctggcgtccgctgcgccgcccctgggcaggctcagacgccgtgagtcaggggcagagcagggcggtctgagcgtgcgggcgacgcgggtctcactcgtccgctccgctctggactgcgcgccacgctctggggtccggcgccctggttcctgcttctgccgctgccgccgccggatcccagtggcccggcgtgctcggctcccacaggcctgcagccagcatcgcaccgaaccttcggggggccgcggctggagcgctcggccggcgtgggagcgccaaggccgcagatgcaatcttcttaccgcgaagaagccaggggaataggtagccacatcttgtttgcagataagaaaggaagctaacgcagtatctgcaaagccaggagtctgactcagtacttttctcactcatgcatacaaagcagctaaaaatgacacagcttatttaccatgcccctgacactgcactgagcactttatgagcttgaactctgttaatcctcacgaccacctcatgagactctccagaaagagcaacagtaatggagtacatgagcactggaagtgacaataaagaagagattgatttattaattaaacatttaaatgtgtctgatgtaatagacattatggaaaatctttatgcaagtgaagagccagcagtttatgaacccagtctaatgaccatgtgtcaagacagtaatcaaaacgatgagcgttctaagtctctgctgcttagtggccaagaggtaccatggttgtcatcagtcagatatggaactgtggaggatttgcttgcttttgcaaaccatatatccaacactgcaaagcatttttatggacaacgaccacaggaatctggaattttattaaacatggtcatcactccccaaaatggacgttaccaaatagattccgatgttctcctgatcccctggaagctgacttacaggaatattggttctgattttattcctcggggcgcctttggaaaggtatacttggcacaagatataaagacgaagaaaagaatggcgtgtaaactgatcccagtagatcaatttaagccatctgatgtggaaatccaggcttgcttccggcacgagaacatcgcagagctgtatggcgcagtcctgtggggtgaaactgtccatctctttatggaagcaggcgagggagggtctgttctggagaaactggagagctgtggaccaatgagagaatttgaaattatttgggtgacaaagcatgttctcaagggacttgattttctacactcaaagaaagtgatccatcatgatattaaacctagcaacattgttttcatgtccacaaaagctgttttggtggattttggcctaagtgttcaaatgaccgaagatgtctattttcctaaggacctccgaggaacagagatttacatgagcccagaggtcatcctgtgcaggggccattcaaccaaagcagacatctacagcctgggggccacgctcatccacatgcagacgggcaccccaccctgggtgaagcgctaccctcgctcagcctatccctcctacctgtacataatccacaagcaagcacctccactggaagacattgcagatgactgcagtccagggatgagagagctgatagaagcttccctggagagaaaccccaatcaccgcccaagagccgcagacctactaaaacatgaggccctgaacccgcccagagaggatcagccacgctgtcagagtctggactctgccctcttggagcgcaagaggctgctgagtaggaaggagctggaacttcctgagaacattgctgattcttcgtgcacaggaagcaccgaggaatctgagatgctcaagaggcaacgctctctctacatcgacctcggcgctctggctggctacttcaatcttgttcggggaccaccaacgcttgaatatggctgaaggatgccatgtttgctctaaattaagacagcattgatctcctggaggctggttctgctgcctctacacaggggccctgtacagtgaatggtgccattttcgaaggagcagtgtgacctcctgtgacccgtgaatgtgcctccaagcggccctgtgtgtttgacatgtgaagctatttgatatgcaccaggtctcaaggttctcatttctcaggtgacgtgattctaaggcaggaatttgagagttcacagaaggatcgtgtctgctgactgtttcattcactgtgcactttgctcaaaattttaaaaataccaatcacaaggataatagagtagcctaaaattactattcttggttcttatttaagtatggaatattcattttactcagaatagctgttttgtgtatattggtgtatattatataactctttgagcctttattggtaaattctggtatacattgaattcattataatttgggtgactagaacaacttgaagattgtagcaataagctggactagtgtcctaaaaatggctaactgatgaattagaagccatctgacagcaggccactagtgacagtttcttttgtgttcctatggaaacattttatactgtacatgctatgctgaagacattcaaaacgtgatgttttgaatgtggataaaactgtgtaaaccacataatttttgtacatcccaaaggatgagaatgtgacctttaagaaaaatgaaaacttttgtaaattattgatgattttgtaattcttatgactaaattttcttttaagcatttgtatattaaaatagcatactgtgtatgttttatatcaaatgccttcatgaatctttcatacatatatatatttgtaacattgtaaagtatgtgagtagtcttatgtaaagtatgtttttacattatgcaaataaaacccaatacttttgtccaatgtggttggtcaaatcaactgaataaattcagtattttgcctt

SEQ ID NO: 18545 - DNA, 2518 bp, Homo sapiens
  source 1..2518: mol_type = unassigned DNA
aaatcctgttgccaatccttgtatgtcagtttcccatgggtcttgaatgcaaatacaaatatcgtaaactaaatatttgtgttttctttcctagactctccagaaagagcaacagtaatggagtacatgagcactggaagtgacaataaagaagagattgatttattaattaaacatttaaatgtgtctgatgtaatagacattatggaaaatctttatgcaagtgaagagccagcagtttatgaacccagtctaatgaccatgtgtcaagacagtaatcaaaacgatgagcgttctaagtctctgctgcttagtggccaagaggtaccatggttgtcatcagtcagatatggaactgtggaggatttgcttgcttttgcaaaccatatatccaacactgcaaagcatttttatggacaacgaccacaggaatctggaattttattaaacatggtcatcactccccaaaatggacgttaccaaatagattccgatgttctcctgatcccctggaagctgacttacaggaatattggttctgattttattcctcggggcgcctttggaaaggtatacttggcacaagatataaagacgaagaaaagaatggcgtgtaaactgatcccagtagatcaatttaagccatctgatgtggaaatccaggcttgcttccggcacgagaacatcgcagagctgtatggcgcagtcctgtggggtgaaactgtccatctctttatggaagcaggcgagggagggtctgttctggagaaactggagagctgtggaccaatgagagaatttgaaattatttgggtgacaaagcatgttctcaagggacttgattttctacactcaaagaaagtgatccatcatgatattaaacctagcaacattgttttcatgtccacaaaagctgttttggtggattttggcctaagtgttcaaatgaccgaagatgtctattttcctaaggacctccgaggaacagagatttacatgagcccagaggtcatcctgtgcaggggccattcaaccaaagcagacatctacagcctgggggccacgctcatccacatgcagacgggcaccccaccctgggtgaagcgctaccctcgctcagcctatccctcctacctgtacataatccacaagcaagcacctccactggaagacattgcagatgactgcagtccagggatgagagagctgatagaagcttccctggagagaaaccccaatcaccgcccaagagccgcagacctactaaaacatgaggccctgaacccgcccagagaggatcagccacgctgtcagagtctggactctgccctcttggagcgcaagaggctgctgagtaggaaggagctggaacttcctgagaacattgctgattcttcgtgcacaggaagcaccgaggaatctgagatgctcaagaggcaacgctctctctacatcgacctcggcgctctggctggctacttcaatcttgttcggggaccaccaacgcttgaatatggctgaaggatgccatgtttgctctaaattaagacagcattgatctcctggaggctggttctgctgcctctacacaggggccctgtacagtgaatggtgccattttcgaaggagcagtgtgacctcctgtgacccgtgaatgtgcctccaagcggccctgtgtgtttgacatgtgaagctatttgatatgcaccaggtctcaaggttctcatttctcaggtgacgtgattctaaggcaggaatttgagagttcacagaaggatcgtgtctgctgactgtttcattcactgtgcactttgctcaaaattttaaaaataccaatcacaaggataatagagtagcctaaaattactattcttggttcttatttaagtatggaatattcattttactcagaatagctgttttgtgtatattggtgtatattatataactctttgagcctttattggtaaattctggtatacattgaattcattataatttgggtgactagaacaacttgaagattgtagcaataagctggactagtgtcctaaaaatggctaactgatgaattagaagccatctgacagcaggccactagtgacagtttcttttgtgttcctatggaaacattttatactgtacatgctatgctgaagacattcaaaacgtgatgttttgaatgtggataaaactgtgtaaaccacataatttttgtacatcccaaaggatgagaatgtgacctttaagaaaaatgaaaacttttgtaaattattgatgattttgtaattcttatgactaaattttcttttaagcatttgtatattaaaatagcatactgtgtatgttttatatcaaatgccttcatgaatctttcatacatatatatatttgtaacattgtaaagtatgtgagtagtcttatgtaaagtatgtttttacattatgcaaataaaacccaatacttttgtccaatgtggttggtcaaatcaactgaataaattcagtattttgcctta

SEQ ID NO: 18546 - DNA, 893 bp, Homo sapiens
  source 1..893: mol_type = unassigned DNA
cttctgccgctgccgccgccggatcccagtggcccggcgtgctcggctcccacaggcctgcagccagcatcgcaccgaaccttcggggggccgcggctggagcgctcggccggcgtgggagcgccaaggccgcagatgcaatcttcttaccgcgaagaagccaggggaataggtagccacatcttgtttgcagataagaaaggaagctaacgcagtatctgcaaagccaggagtctgactcagtacttttctcactcatgcatacaaagcagctaaaaatgacacagcttatttaccatgcccctgacactgcactgagcactttatgagcttgaactctgttaatcctcacgaccacctcatgagactctccagaaagagcaacagtaatggagtacatgagcactggaagtgacaataaagaagagattgatttattaattaaacatttaaatgtgtctgatgtaatagacattatggaaaatctttatgcaagtgaagagccagcagtttatgaacccagtctaatgaccatgtgtcaagacagtaatcaaaacgatgagcgttctaagtctctgctgcttagtggccaagaggtaccatggttgtcatcagtcagatatggaactgtggaggatttgcttgcttttgcaaaccatatatccaacactgcaaagcatttttatggacaacgaccacaggaatctggaattttattaaacatggtacgtttctttccgatcagttgggtgctatgtgctcagctttcctactgcagcttcatttaatgcagagtggtgtttgaatttggcttagatgggctggcaggcatgattttaaaaaatgtaatcatcagtaagaagtacttccatgttaaagatgcaaaaaaaaaa

SEQ ID NO: 18547 - DNA, 3090 bp, Homo sapiens
  source 1..3090: mol_type = unassigned DNA
cgggcgcccagagggcaaatgaggggcggcggggtggcgggtgggggggagacgcggaatttcccagcgcgggggctctggcttaccctgcaaccgggcagtctctttctgtttacggagagaaaggggaaatggaaaagtcggggaggcggtggctggcgtccgctgcgccgcccctgggcaggctcagacgccgtgagtcaggggcagagcagggcggtctgagcgtgcgggcgacgcgggtctcactcgtccgctccgctctggactgcgcgccacgctctggggtccggcgccctggttcctgcttctgccgctgccgccgccggatcccagtggcccggcgtgctcggctcccacaggcctgcagccagcatcgcaccgaaccttcggggggccgcggctggagcgctcggccggcgtgggagcgccaaggccgcagatgcaatcttcttaccgcgaagaagccaggggaataggtagccacatcttgtttgcagataagaaaggaagctaacgcagtatctgcaaagccaggagtctgactcagtacttttctcactcatgcatacaaagcagctaaaaatgacacagcttatttaccatgcccctgacactgcactgagcactttatgagcttgaactctgttaatcctcacgaccaccactctccagaaagagcaacagtaatggagtacatgagcactggaagtgacaataaagaagagattgatttattaattaaacatttaaatgtgtctgatgtaatagacattatggaaaatctttatgcaagtgaagagccagcagtttatgaacccagtctaatgaccatgtgtcaagacagtaatcaaaacgatgagcgttctaagtctctgctgcttagtggccaagaggtaccatggttgtcatcagtcagatatggaactgtggaggatttgcttgcttttgcaaaccatatatccaacactgcaaagcatttttatggacaacgaccacaggaatctggaattttattaaacatggtcatcactccccaaaatggacgttaccaaatagattccgatgttctcctgatcccctggaagctgacttacaggaatattggttctgattttattcctcggggcgcctttggaaaggtatacttggcacaagatataaagacgaagaaaagaatggcgtgtaaactgatcccagtagatcaatttaagccatctgatgtggaaatccaggcttgcttccggcacgagaacatcgcagagctgtatggcgcagtcctgtggggtgaaactgtccatctctttatggaagcaggcgagggagggtctgttctggagaaactggagagctgtggaccaatgagagaatttgaaattatttgggtgacaaagcatgttctcaagggacttgattttctacactcaaagaaagtgatccatcatgatattaaacctagcaacattgttttcatgtccacaaaagctgttttggtggattttggcctaagtgttcaaatgaccgaagatgtctattttcctaaggacctccgaggaacagagatttacatgagcccagaggtcatcctgtgcaggggccattcaaccaaagcagacatctacagcctgggggccacgctcatccacatgcagacgggcaccccaccctgggtgaagcgctaccctcgctcagcctatccctcctacctgtacataatccacaagcaagcacctccactggaagacattgcagatgactgcagtccagggatgagagagctgatagaagcttccctggagagaaaccccaatcaccgcccaagagccgcagacctactaaaacatgaggccctgaacccgcccagagaggatcagccacgctgtcagagtctggactctgccctcttggagcgcaagaggctgctgagtaggaaggagctggaacttcctgagaacattgctgattcttcgtgcacaggaagcaccgaggaatctgagatgctcaagaggcaacgctctctctacatcgacctcggcgctctggctggctacttcaatcttgttcggggaccaccaacgcttgaatatggctgaaggatgccatgtttgctctaaattaagacagcattgatctcctggaggctggttctgctgcctctacacaggggccctgtacagtgaatggtgccattttcgaaggagcagtgtgacctcctgtgacccgtgaatgtgcctccaagcggccctgtgtgtttgacatgtgaagctatttgatatgcaccaggtctcaaggttctcatttctcaggtgacgtgattctaaggcaggaatttgagagttcacagaaggatcgtgtctgctgactgtttcattcactgtgcactttgctcaaaattttaaaaataccaatcacaaggataatagagtagcctaaaattactattcttggttcttatttaagtatggaatattcattttactcagaatagctgttttgtgtatattggtgtatattatataactctttgagcctttattggtaaattctggtatacattgaattcattataatttgggtgactagaacaacttgaagattgtagcaataagctggactagtgtcctaaaaatggctaactgatgaattagaagccatctgacagcaggccactagtgacagtttcttttgtgttcctatggaaacattttatactgtacatgctatgctgaagacattcaaaacgtgatgttttgaatgtggataaaactgtgtaaaccacataatttttgtacatcccaaaggatgagaatgtgacctttaagaaaaatgaaaacttttgtaaattattgatgattttgtaattcttatgactaaattttcttttaagcatttgtatattaaaatagcatactgtgtatgttttatatcaaatgccttcatgaatctttcatacatatatatatttgtaacattgtaaagtatgtgagtagtcttatgtaaagtatgtttttacattatgcaaataaaacccaatacttttgtccaatgtggttggtcaaatcaactgaataaattcagtattttgcctta

SEQ ID NO: 18548 - DNA, 776 bp, Homo sapiens
  source 1..776: mol_type = unassigned DNA
cgcggggaagcggggacccgctgtcactgcgcctcccgctgccgacgccgcctggacggccgcactctccctgcccgagacccgactctccagaaagagcaacagtaatggagtacatgagcactggaagtgacaataaagaagagattgatttattaattaaacatttaaatgtgtctgatgtaatagacattatggaaaatctttatgcaagtgaagagccagcagtttatgaacccagtctaatgaccatgtgtcaagacagtaatcaaaacgatgagcgttctaagtctctgctgcttagtggccaagaggtaccatggttgtcatcagtcagatatggaactgtggaggatttgcttgcttttgcaaaccatatatccaacactgcaaagcatttttatggacaacgaccacaggaatctggaattttattaaacatggtcatcactccccaaaatggacgttaccaaatagattccgatgttctcctgatcccctggaagctgacttacaggaatattggttctgattttattcctcggggcgcctttggaaaggtatacttggcacaagatataaagacgaagaaaagaatggcgtgtaaactgatcccagtagatcaatttaagccatctgatgtggaaatccaggcttgcttccggcacgagaacatcgcagagctgtatggcgcagtcctgtggggtgaaactgtccatctctttatggaagcaggcgagggagggtctgttctggagaaactggagagctgtgga

SEQ ID NO: 18549 - DNA, 1026 bp, Homo sapiens
  source 1..1026: mol_type = unassigned DNA
gggcagagcagggcggtctgagcgtgcgggcgacgcgggtctcactcgtccgctccgctctggactgcgcgccacgctctggggtccggcgccctggttcctgcttctgccgctgccgccgccggatcccagtggcccggcgtgctcggctcccacaggcctgcagccagcatcgcaccgaaccttcggggggccgcggctggagcgctcggccggcgtgggagcgccaaggccgcagactctccagaaagagcaacagtaatggagtacatgagcactggaagtgacaataaagaagagattgatttattaattaaacatttaaatgtgtctgatgtaatagacattatggaaaatctttatgcaagtgaagagccagcagtttatgaacccagtctaatgaccatgtgtcaagacagtaatcaaaacgatgagcgttctaagtctctgctgcttagtggccaagaggtaccatggttgtcatcagtcagatatggaactgtggaggatttgcttgcttttgcaaaccatatatccaacactgcaaagcatttttatggacaacgaccacaggaatctggaattttattaaacatggtcatcactccccaaaatggacgttaccaaatagattccgatgttctcctgatcccctggaagctgacttacaggaatattggttctgattttattcctcggggcgcctttggaaaggtatacttggcacaagatataaagacgaagaaaagaatggcgtgtaaactgatcccagtagatcaatttaagccatctgatgtggaaatccaggcttgcttccggcacgagaacatcgcagagctgtatggcgcagtcctgtggggtgaaactgtccatctctttatggaagcaggcgagggagggtctgttctggagaaactggagagctgtggaccaatgagagaatttgaaattatttgggtgacaaagcatgttctcaagggacttgattttctacactcaaagaaagtgatccatcatgatattaaa

SEQ ID NO: 18550 - DNA, 647 bp, Homo sapiens
  source 1..647: mol_type = unassigned DNA
ctgtggaggatttgcttgcttttgcaaaccatatatccaacactgcaaagcatttttatggacaacgaccacaggaatctggaattttattaaacatggtcatcactccccaaaatggacgttaccaaatagattccgatgttctcctgatcccctggaagctgacttacaggaatattggttctgattttattcctcggggcgcctttggaaaggtatacttggcacaagatataaagacgaagaaaagaatggcgtgtaaactgatcccagtagatcaatttaagccatctgatgtggaaatccaggcttgcttccggcacgagaacatcgcagagctgtatggcgcagtcctgtggggtgaaactgtccatctctttatggaagcaggcgagggagggtctgttctggagaaactggagagctgtggaccaatgagagaatttgaaattatttgggtgacaaagcatgttctcaagggacttgattttctacactcaaagaaagtgatccatcatgatattaaacgtaagtatctttggacatatacctttttggctcaaagagactagttattcaggagacaaacaagctccttcctgtaatctgaagaccctccatggagggtggaaagctccctcagagca

SEQ ID NO: 18551 - DNA, 1682 bp, Homo sapiens
  source 1..1682: mol_type = unassigned DNA
cagacgccgtgagtcaggggcagagcagggcggtctgagcgtgcgggcgacgcgggtctcactcgtccgctccgctctggactgcgcgccacgctctggggtccggcgccctggttcctgcttctgccgctgccgccgccggatcccagtggcccggcgtgctcggctcccacaggcctgcagccagcatcgcaccgaaccttcggggggccgcggctggagcgctcggccggcgtgggagcgccaaggccgcagactctccagaaagagcaacagtaatggagtacatgagcactggaagtgacaataaagaagagattgatttattaattaaacatttaaatgtgtctgatgtaatagacattatggaaaatctttatgcaagtgaagagccagcagtttatgaacccagtctaatgaccatgtgtcaagacagtaatcaaaacgatgagcgttctaagtctctgctgcttagtggccaagaggtaccatggttgtcatcagtcagatatggaactgtggaggatttgcttgcttttgcaaaccatatatccaacactgcaaagcatttttatggacaacgaccacaggaatctggaattttattaaacatggtcatcactccccaaaatggacgttaccaaatagattccgatgttctcctgatcccctggaagctgacttacaggaatattggttctgattttattcctcggggcgcctttggaaaggtatacttggcacaagatataaagacgaagaaaagaatggcgtgtaaactgatcccagtagatcaatttaagccatctgatgtggaaatccaggcttgcttccggcacgagaacatcgcagagctgtatggcgcagtcctgtggggtgaaactgtccatctctttatggaagcaggcgagggagggtctgttctggagaaactggagagctgtggaccaatgagagaatttgaaattatttgggtgacaaagcatgttctcaagggacttgattttctacactcaaagaaagtgatccatcatgatattaaacctagcaacattgttttcatgtccacaaaagctgttttggtggattttggcctaagtgttcaaatgaccgaagatgtctattttcctaaggacctccgaggaacagagatttacatgagcccagaggtcatcctgtgcaggggccattcaaccaaagcagacatctacagcctgggggccacgctcatccacatgcagacgggcaccccaccctgggtgaagcgctaccctcgctcagcctatccctcctacctgtacataatccacaagcaagcacctccactggaagacattgcagatgactgcagtccagggatgagagagctgatagaagcttccctggagagaaaccccaatcaccgcccaagagccgcagacctactaaaacatgaggccctgaacccgcccagagaggatcagccacgctgtcagagtctggactctgccctcttggagcgcaagaggctgctgagtaggaaggagctggaacttcctgagaacattgctgattcttcgtgcacaggaagcaccgaggaatctgagatgctcaagaggcaacgctctctctacatcgacctcggcgctctggctggctacttcaatcttgttcggggaccaccaacgcttgaatatggctga

SEQ ID NO: 18552 - DNA, 5602 bp, Homo sapiens
  source 1..5602: mol_type = unassigned DNA
atggagccctccagagcgcttctcggctgcctagcgagcgccgccgctgccgccccgccgggggaggatggagcaggggccggggccgaggaggaggaggaggaggaggaggaggcggcggcggcggtgggccccggggagctgggctgcgacgcgccgctgccctactggacggccgtgttcgagtacgaggcggcgggcgaggacgagctgaccctgcggctgggcgacgtggtggaggtgctgtccaaggactcgcaggtgtccggcgacgagggctggtggaccgggcagctgaaccagcgggtgggcatcttccccagcaactacgtgaccccgcgcagcgccttctccagccgctgccagcccggcggcgaggaccccagttgctacccgcccattcagttgttagaaattgattttgcggagctcaccttggaagagattattggcatcgggggctttgggaaggtctatcgtgctttctggataggggatgaggttgctgtgaaagcagctcgccacgaccctgatgaggacatcagccagaccatagagaatgttcgccaagaggccaagctcttcgccatgctgaagcaccccaacatcattgccctaagaggggtatgtctgaaggagcccaacctctgcttggtcatggagtttgctcgtggaggacctttgaatagagtgttatctgggaaaaggattcccccagacatcctggtgaattgggctgtgcagattgccagagggatgaactacttacatgatgaggcaattgttcccatcatccaccgcgaccttaagtccagcaacatattgatcctccagaaggtggagaatggagacctgagcaacaagattctgaagatcactgattttggcctggctcgggaatggcaccgaaccaccaagatgagtgcggcagggacgtatgcttggatggcacccgaagtcatccgggcctccatgttttccaaaggcagtgatgtgtggagctatggggtgctactttgggagttgctgactggtgaggtgccctttcgaggcattgatggcttagcagtcgcttatggagtggccatgaacaaactcgcccttcctattccttctacgtgcccagaaccttttgccaaactcatggaagactgctggaatcctgatccccactcacgaccatctttcacgaatatcctggaccagctaaccaccatagaggagtctggtttctttgaaatgcccaaggactccttccactgcctgcaggacaactggaaacacgagattcaggagatgtttgaccaactcagggccaaagaaaaggaacttcgcacctgggaggaggagctgacgcgggctgcactgcagcagaagaaccaggaggaactgctgcggcgtcgggagcaggagctggccgagcgggagattgacatcctggaacgggagctcaacatcatcatccaccagctgtgccaggagaagccccgggtgaagaaacgcaagggcaagttcaggaagagccggctgaagctcaaggatggcaaccgcatcagcctcccttctgatttccagcacaagttcacggtgcaggcctcccctaccatggataaaaggaagagtcttatcaacagccgctccagtcctcctgcaagccccaccatcattcctcgccttcgagccatccagttgacaccaggtgaaagcagcaaaacctggggcaggagctcagtcgtcccaaaggaggaaggggaggaggaggagaagagggccccaaagaagaagggacggacgtgggggccagggacgcttggtcagaaggagcttgcctcgggagatgaaggatcccctcagagacgtgagaaagctaatggtttaagtaccccatcagaatctccacatttccacttgggcctcaagtccctggtagatggatataagcagtggtcgtccagtgcccccaacctggtgaagggcccaaggagtagcccggccctgccagggttcaccagccttatggagatggccttgctggcagccagttgggtggtgcccatcgacattgaagaggatgaggacagtgaaggcccagggagtggagagagtcgcctacagcattcacccagccagtcctacctctgtatcccattccctcgtggagaggatggcgatggcccctccagtgatggaatccatgaggagcccaccccagtcaactcggccacgagtacccctcagctgacgccaaccaacagcctcaagcggggcggtgcccaccaccgccgctgcgaggtggctctgctcggctgtggggctgttctggcagccacaggcctagggtttgacttgctggaagctggcaagtgccagctgcttcccctggaggagcctgagccaccagcccgggaggagaagaaaagacgggagggtctttttcagaggtccagccgtcctcgtcggagcaccagccccccatcccgaaagcttttcaagaaggaggagcccatgctgttgctaggagacccctctgcctccctgacgctgctctccctctcctccatctccgagtgcaactccacacgctccctgctgcgctccgacagcgatgaaattgtcgtgtatgagatgccagtcagcccagtcgaggcccctcccctgagtccatgtacccacaaccccctggtcaatgtccgagtagagcgcttcaaacgagatcctaaccaatctctgactcccacccatgtcaccctcaccaccccctcgcagcccagcagtcaccggcggactccttctgatggggcccttaagccagagactctcctagccagcaggagcccctccagcaatgggttgagccccagtcctggagcaggaatgttgaaaacccccagtcccagccgagacccaggtgaattcccccgtctccctgaccccaatgtggtcttccccccaaccccaaggcgctggaacactcagcaggactctaccttggagagacccaagactctggagtttctgcctcggccgcgtccttctgccaaccggcaacggctggacccttggtggtttgtgtcccccagccatgcccgcagcacctccccagccaacagctccagcacagagacgcccagcaacctggactcctgctttgctagcagtagcagcactgtagaggagcggcctggacttccagccctgctcccgttccaggcagggccgctgcccccgactgagcggacgctcctggacctggatgcagaggggcagagtcaggacagcaccgtgccgctgtgcagagcggaactgaacacacacaggcctgccccttatgagatccagcaggagttctggtcttagcacgaaaaggattggggcgggcaagggggacagccagcggagatgaggggagctggcgggcacagccctttctcagggttggaccccctgagatccagccctacttcttgcactgataatgcactttgaagatggaagggatggaaacagggccacttcagagggtctcctgccctgcagggcctttctacccgtgtccactggaggggctgtggccatcagctctggctgtgtaggggaggaaggggtgcatgcatgtcccccaccctccacagtcttccttgcctttagagtgaccctgcagagtcactcagccaaatctgtctgctgctccctctcctcagccagttgggtgtgcgcagagctgtcatagggtccctttgtcagccccgagttcagcttcccaaacaccagtgttggatattctgtgattgattttggtcctcctccgctgtcccccaacacccaggaatgggaatctggcttggttcgagataggagcttttctgtgtcctaagccctttcatgctagcaggaagactgaaagcaaggtggcccagtgtggggtcatagggcttgatagacctggcactgcctatctgcacttccaggtgccccacctatttatctgagcccacaggtggaaaggggaactgcctcagtgagaacggggggacggggatgttaggaaaaatacagtaaagttgcaatgaagaggttcatgaagtatgtccttgttctttttggaaactctcggcaaagggcaaaccagcaagtattgagggtacccatctagctacttggggtcaggacctcgtcagaccaggttcggatacaatcatctgctcatcccaggaatagtttcttgggggactcactcactggtgccagttctaagtcagagacaaaattccactgtctgttccttttgctgtctgaactttatgtgttactcccttcctttggtcttcactctaatccctggagtttgtgggcttttggttatgtttggttagtagatatcaccgcaatgccctagaacagctatgaagcagaataccatatggccacctggacattgggacttgggaattcactctcaactgggccatccatgttgtgatgcccttgaagtaaaatggagccagcaggagtaccttctgtaaatgcatgtggcaaagtgctatttatagggtgcccagggagccgctgatgtacaataaccttgaggtcccccatactgaaaactgaccaaggcctgtgcacaggtagcccctcatgctgggctctggaccatgagctgagtaggaaggatagcagaggccaaccctgaccttcctggaagttgtttccttaacttgaatgttgagcttcctctaaagctttctcgtgtatgtcttctccatgccactactctgaggcctcctgtgttatgtgtgaacagttgtctttatgtgggaatgacgacttgattgggagtagagtctcaaggtcattcccctcttccctcaagactctctgaatgctgctccactgtcttttgtcttggaggtcactcagcaggttccttgcatttgctgcctggatgtgcagctggcaacagtgatgaattggtcactgctctttctctataactgggatagatgtcctgccttggggtcactaaaggggtgaccttgttccttgctttatgagcccattagcactttggttcaaggggcccaccaagtcttggacgggaaggcgctactggttttattgcccaaggttttgttattgcttctcttctgtgtccttctctttgttcagtgaagccaatatgtaagatactgtttttgtccccattcccctactcctgagctaggaggaaaaaatgtgaatcttaccagcagttccagccaaccaagtgattcttcttcattcttgatggggagaagtacatacaaagtttgttctgacagggcgcggtggctcacgcctgtaatcccagcgctttgggaggcagaggcaggtggatcacctgaggtcgggagttcgagaccagcctgaccaacatggagatatcctgtctctactaaaaatacaaaaaaattagccaggcatggtggcacgtgcctgtaatcccagctactcgcaaggctgaggcaggagaatcgcttgaacctgggaggcggaggttgcagtgagccaagattgcgccattgcactccagcctgggcaacaagagagaaactctgtctcaaaa

SEQ ID NO: 18553 - DNA, 2708 bp, Homo sapiens
  source 1..2708: mol_type = unassigned DNA
ctagtattgatcctccagaaggtggagaatggagacctgagcaacaagattctgaagatcactgattttggcctggctcgggaatggcaccgaaccaccaagatgagtgcggcagggacgtatgcttggatggcacccgaagtcatccgggcctccatgttttccaaaggcagtgatgtgtggagctatggggtgctactttgggagttgctgactggtgaggtgccctttcgaggcattgatggcttagcagtcgcttatggagtggccatgaacaaactcgcccttcctattccttctacgtgcccagaaccttttgccaaactcatggaagactgctggaatcctgatccccactcacgaccatctttcacgaatatcctggaccagctaaccaccatagaggagtctggtttctttgaaatgcccaaggactccttccactgcctgcaggacaactggaaacacgagattcaggagatgtttgaccaactcagggccaaagaaaaggaacttcgcacctgggaggaggagctgacgcgggctgcactgcagcagaagaaccaggaggaactgctgcggcgtcgggagcaggagctggccgagcgggagattgacatcctggaacgggagctcaacatcatcatccaccagctgtgccaggagaagccccgggtgaagaaacgcaagggcaagttcaggaagagccggctgaagctcaaggatggcaaccgcatcagcctcccttctgatttccagcacaagttcacggtgcaggcctcccctaccatggataaaaggaagagtcttatcaacagccgctccagtcctcctgcaagccccaccatcattcctcgccttcgagccatccagttgacaccaggtgaaagcagcaaaacctggggcaggagctcagtcgtcccaaaggaggaaggggaggaggaggagaagagggccccaaagaagaagggacggacgtgggggccagggacgcttggtcagaaggagcttgcctcgggagatgaaggcctcaagtccctggtagatggatataagcagtggtcgtccagtgcccccaacctggtgaagggcccaaggagtagcccggccctgccagggttcaccagccttatggagatggcctgtttctcttccactcttgtcatcttcacagaggatgaggacagtgaaggcccagggagtggagagagtcgcctacagcattcacccagccagtcctacctctgtatcccattccctcgtggagaggatggcgatggcccctccagtgatggaatccatgaggagcccaccccagtcaactcggccacgagtacccctcagctgacgccaaccaacagcctcaagcggggcggtgcccaccaccgccgctgcgaggtggctctgctcggctgtggggctgttctggcagccacaggcctagggtttgacttgctggaagctggcaagtgccagctgcttcccctggaggagcctgagccaccagcccgggaggagaagaaaagacgggagggtctttttcagaggtccagccgtcctcgtcggagcaccagccccccatcccgaaagcttttcaagaaggaggagcccatgctgttgctaggagacccctctgcctccctgacgctgctctccctctcctccatctccgagtgcaactccacacgctccctgctgcgctccgacagcgatgaaattgtcgtgtatgagatgccagtcagcccagtcgaggcccctcccctgagtccatgtacccacaaccccctggtcaatgtccgagtagagcgcttcaaacgagatcctaaccaatctctgactcccacccatgtcaccctcaccaccccctcgcagcccagcagtcaccggcggactccttctgatggggcccttaagccagagactctcctagccagcaggagcccctccagcaatgggttgagccccagtcctggagcaggaatgttgaaaacccccagtcccagccgagacccaggtgaattcccccgtctccctgaccccaatgtggtcttccccccaaccccaaggcgctggaacactcagcaggactctaccttggagagacccaagactctggagtttctgcctcggccgcgtccttctgccaaccggcaacggctggacccttggtggtttgtgtcccccagccatgcccgcagcacctccccagccaacagctccagcacagagacgcccagcaacctggactcctgctttgctagcagtagcagcactgtagaggagcggcctggacttccagccctgctcccgttccaggcagggccgctgcccccgactgagcggacgctcctggacctggatgcagaggggcagagtcaggacagcaccgtgccgctgtgcagagcggaactgaacacacacaggcctgccccttatgagatccagcaggagttctggtcttagcacgaaaaggattggggcgggcaagggggacagccagcggagatgaggggagctggcgggcacagccctttctcagggttggaccccctgagatccagccctacttcttgcactgataatgcactttgaagatggaagggatggaaacagggccacttcagagggtctcctgccctgcagggcctttctacccgtgtccactggaggggctgtggccatcagctctggctgtgtaggggaggaag

SEQ ID NO: 18554 - DNA, 5581 bp, Homo sapiens
  source 1..5581: mol_type = unassigned DNA
atggagccctccagagcgcttctcggctgcctagcgagcgccgccgctgccgccccgccgggggaggatggagcaggggccggggccgaggaggaggaggaggaggaggaggaggcggcggcggcggtgggccccggggagctgggctgcgacgcgccgctgccctactggacggccgtgttcgagtacgaggcggcgggcgaggacgagctgaccctgcggctgggcgacgtggtggaggtgctgtccaaggactcgcaggtgtccggcgacgagggctggtggaccgggcagctgaaccagcgggtgggcatcttccccagcaactacgtgaccccgcgcagcgccttctccagccgctgccagcccggcggcgaggaccccagttgctacccgcccattcagttgttagaaattgattttgcggagctcaccttggaagagattattggcatcgggggctttgggaaggtctatcgtgctttctggataggggatgaggttgctgtgaaagcagctcgccacgaccctgatgaggacatcagccagaccatagagaatgttcgccaagaggccaagctcttcgccatgctgaagcaccccaacatcattgccctaagaggggtatgtctgaaggagcccaacctctgcttggtcatggagtttgctcgtggaggacctttgaatagagtgttatctgggaaaaggattcccccagacatcctggtgaattgggctgtgcagattgccagagggatgaactacttacatgatgaggcaattgttcccatcatccaccgcgaccttaagtccagcaacatattgatcctccagaaggtggagaatggagacctgagcaacaagattctgaagatcactgattttggcctggctcgggaatggcaccgaaccaccaagatgagtgcggcagggacgtatgcttggatggcacccgaagtcatccgggcctccatgttttccaaaggcagtgatgtgtggagctatggggtgctactttgggagttgctgactggtgaggtgccctttcgaggcattgatggcttagcagtcgcttatggagtggccatgaacaaactcgcccttcctattccttctacgtgcccagaaccttttgccaaactcatggaagactgctggaatcctgatccccactcacgaccatctttcacgaatatcctggaccagctaaccaccatagaggagtctggtttctttgaaatgcccaaggactccttccactgcctgcaggacaactggaaacacgagattcaggagatgtttgaccaactcagggccaaagaaaaggaacttcgcacctgggaggaggagctgacgcgggctgcactgcagcagaagaaccaggaggaactgctgcggcgtcgggagcaggagctggccgagcgggagattgacatcctggaacgggagctcaacatcatcatccaccagctgtgccaggagaagccccgggtgaagaaacgcaagggcaagttcaggaagagccggctgaagctcaaggatggcaaccgcatcagcctcccttctgatttccagcacaagttcacggtgcaggcctcccctaccatggataaaaggaagagtcttatcaacagccgctccagtcctcctgcaagccccaccatcattcctcgccttcgagccatccagttgacaccaggtgaaagcagcaaaacctggggcaggagctcagtcgtcccaaaggaggaaggggaggaggaggagaagagggccccaaagaagaagggacggacgtgggggccagggacgcttggtcagaaggagcttgcctcgggagatgaaggatcccctcagagacgtgagaaagctaatggtttaagtaccccatcagaatctccacatttccacttgggcctcaagtccctggtagatggatataagcagtggtcgtccagtgcccccaacctggtgaagggcccaaggagtagcccggccctgccagggttcaccagccttatggagatggaggatgaggacagtgaaggcccagggagtggagagagtcgcctacagcattcacccagccagtcctacctctgtatcccattccctcgtggagaggatggcgatggcccctccagtgatggaatccatgaggagcccaccccagtcaactcggccacgagtacccctcagctgacgccaaccaacagcctcaagcggggcggtgcccaccaccgccgctgcgaggtggctctgctcggctgtggggctgttctggcagccacaggcctagggtttgacttgctggaagctggcaagtgccagctgcttcccctggaggagcctgagccaccagcccgggaggagaagaaaagacgggagggtctttttcagaggtccagccgtcctcgtcggagcaccagccccccatcccgaaagcttttcaagaaggaggagcccatgctgttgctaggagacccctctgcctccctgacgctgctctccctctcctccatctccgagtgcaactccacacgctccctgctgcgctccgacagcgatgaaattgtcgtgtatgagatgccagtcagcccagtcgaggcccctcccctgagtccatgtacccacaaccccctggtcaatgtccgagtagagcgcttcaaacgagatcctaaccaatctctgactcccacccatgtcaccctcaccaccccctcgcagcccagcagtcaccggcggactccttctgatggggcccttaagccagagactctcctagccagcaggagcccctccagcaatgggttgagccccagtcctggagcaggaatgttgaaaacccccagtcccagccgagacccaggtgaattcccccgtctccctgaccccaatgtggtcttccccccaaccccaaggcgctggaacactcagcaggactctaccttggagagacccaagactctggagtttctgcctcggccgcgtccttctgccaaccggcaacggctggacccttggtggtttgtgtcccccagccatgcccgcagcacctccccagccaacagctccagcacagagacgcccagcaacctggactcctgctttgctagcagtagcagcactgtagaggagcggcctggacttccagccctgctcccgttccaggcagggccgctgcccccgactgagcggacgctcctggacctggatgcagaggggcagagtcaggacagcaccgtgccgctgtgcagagcggaactgaacacacacaggcctgccccttatgagatccagcaggagttctggtcttagcacgaaaaggattggggcgggcaagggggacagccagcggagatgaggggagctggcgggcacagccctttctcagggttggaccccctgagatccagccctacttcttgcactgataatgcactttgaagatggaagggatggaaacagggccacttcagagggtctcctgccctgcagggcctttctacccgtgtccactggaggggctgtggccatcagctctggctgtgtaggggaggaaggggtgcatgcatgtcccccaccctccacagtcttccttgcctttagagtgaccctgcagagtcactcagccaaatctgtctgctgctccctctcctcagccagttgggtgtgcgcagagctgtcatagggtccctttgtcagccccgagttcagcttcccaaacaccagtgttggatattctgtgattgattttggtcctcctccgctgtcccccaacacccaggaatgggaatctggcttggttcgagataggagcttttctgtgtcctaagccctttcatgctagcaggaagactgaaagcaaggtggcccagtgtggggtcatagggcttgatagacctggcactgcctatctgcacttccaggtgccccacctatttatctgagcccacaggtggaaaggggaactgcctcagtgagaacggggggacggggatgttaggaaaaatacagtaaagttgcaatgaagaggttcatgaagtatgtccttgttctttttggaaactctcggcaaagggcaaaccagcaagtattgagggtacccatctagctacttggggtcaggacctcgtcagaccaggttcggatacaatcatctgctcatcccaggaatagtttcttgggggactcactcactggtgccagttctaagtcagagacaaaattccactgtctgttccttttgctgtctgaactttatgtgttactcccttcctttggtcttcactctaatccctggagtttgtgggcttttggttatgtttggttagtagatatcaccgcaatgccctagaacagctatgaagcagaataccatatggccacctggacattgggacttgggaattcactctcaactgggccatccatgttgtgatgcccttgaagtaaaatggagccagcaggagtaccttctgtaaatgcatgtggcaaagtgctatttatagggtgcccagggagccgctgatgtacaataaccttgaggtcccccatactgaaaactgaccaaggcctgtgcacaggtagcccctcatgctgggctctggaccatgagctgagtaggaaggatagcagaggccaaccctgaccttcctggaagttgtttccttaacttgaatgttgagcttcctctaaagctttctcgtgtatgtcttctccatgccactactctgaggcctcctgtgttatgtgtgaacagttgtctttatgtgggaatgacgacttgattgggagtagagtctcaaggtcattcccctcttccctcaagactctctgaatgctgctccactgtcttttgtcttggaggtcactcagcaggttccttgcatttgctgcctggatgtgcagctggcaacagtgatgaattggtcactgctctttctctataactgggatagatgtcctgccttggggtcactaaaggggtgaccttgttccttgctttatgagcccattagcactttggttcaaggggcccaccaagtcttggacgggaaggcgctactggttttattgcccaaggttttgttattgcttctcttctgtgtccttctctttgttcagtgaagccaatatgtaagatactgtttttgtccccattcccctactcctgagctaggaggaaaaaatgtgaatcttaccagcagttccagccaaccaagtgattcttcttcattcttgatggggagaagtacatacaaagtttgttctgacagggcgcggtggctcacgcctgtaatcccagcgctttgggaggcagaggcaggtggatcacctgaggtcgggagttcgagaccagcctgaccaacatggagatatcctgtctctactaaaaatacaaaaaaattagccaggcatggtggcacgtgcctgtaatcccagctactcgcaaggctgaggcaggagaatcgcttgaacctgggaggcggaggttgcagtgagccaagattgcgccattgcactccagcctgggcaacaagagagaaactctgtctcaaaaaaaaaaaaaaaaaaaaaaaaa

SEQ ID NO: 18555 - DNA, 2607 bp, Homo sapiens
  source 1..2607: mol_type = unassigned DNA
gcggaggcaaggcgggtgcagggcttctggggacggagggaggtgccagaagttgagccctgaggccctgctggcccctgggcgcaggcccagctcaggcccccagggatggacgtcgtggaccctgacattttcaatagagacccccgggaccactatgacctgctacagcggctgggtggcggcacgtatggggaagtctttaaggctcgagacaaggtgtcaggggacctggtggcactgaagatggtgaagatggagcctgatgatgatgtctccacccttcagaaggaaatcctcatattgaaaacttgccggcacgccaacatcgtggcctaccatgggagttatctctggttgcagaaactctggatctgcatggaattctgtggggctggttctctccaggacatctaccaagtgacaggctccctgtcagagctccagattagctatgtctgccgggaagtgctccagggactggcctatttgcactcacagaagaagatacacagggacatcaagggagctaacatcctcatcaatgatgctggggaggtcagattggctgactttggcatctcggcccagattggggctacactggccagacgcctctctttcattgggacaccctactggatggctccggaagtggcagctgtggccctgaagggaggatacaatgagctgtgtgacatctggtccctgggcatcacggccatcgaactggccgagctacagccaccgctctttgatgtgcaccctctcagagttctcttcctcatgaccaagagtggctaccagcctccccgactgaaggaaaaaggcaaatggtcggctgccttccacaacttcatcaaagtcactctgactaagagtcccaagaaacgacccagcgccaccaagatgctcagtcatcaactggtatcccagcctgggctgaatcgaggcctgatcctggatcttcttgacaaactgaagaatcccgggaaaggaccctccattggggacattgaggatgaggagcccgagctaccccctgctatccctcggcggatcagatccacccaccgctccagctctctggggatcccagatgcagactgctgtcggcggcacatggagttcaggaagctccgaggaatggagaccagacccccagccaacaccgctcgcctacagcctcctcgagacctcaggagcagcagccccaggaagcaactgtcagagtcgtctgacgatgactatgacgacgtggacatccccacccctgcagaggacacacctcctccacttccccccaagcccaagttccgttctccatcagacgagggtcctgggagcatgggggatgatgggcagctgagcccgggggtgctggtccggtgtgccagtgggcccccaccaaacagcccccgtcctgggcctcccccatccaccagcagcccccacctcaccgcccattcagaaccctcactctggaacccaccctcccgggagcttgacaagcccccacttctgccccccaagaaggaaaagatgaagagaaagggatgtgcccttctcgtaaagttgttcaatggctgccccctccggatccacagcacggccgcctggacacatccctccaccaaggaccagcacctgctcctgggggcagaggaaggcatcttcatcctgaaccggaatgaccaggaggccacgctggaaatgctctttcctagccggactacgtgggtgtactccatcaacaacgttctcatgtctctctcaggaaagaccccccacctgtattctcatagcatccttggcctgctggaacggaaagagaccagagcaggaaaccccatcgctcacattagcccccaccgcctactggcaaggaagaacatggtttccaccaagatccaggacaccaaaggctgccgggcgtgctgtgtggcggagggtgcgagctctgggggcccgttcctgtgcggtgcattggagacgtccgttgtcctgcttcagtggtaccagcccatgaacaaattcctgcttgtccggcaggtgctgttcccactgccgacgcctctgtccgtgttcgcgctgctgaccgggccaggctctgagctgcccgctgtgtgcatcggcgtgagccccgggcggccggggaagtcggtgctcttccacacggtgcgctttggcgcgctctcttgctggctgggcgagatgagcaccgagcacaggggacccgtgcaggtgacccaggtagaggaagatatggtgatggtgttgatggatggctctgtgaagctggtgaccccggaggggtccccagtccggggacttcgcacacctgagatccccatgaccgaagcggtggaggccgtggctatggttggaggtcagcttcaggccttctggaagcatggagtgcaggtgtgggctctaggctcggatcagctgctacaggagctgagagaccctaccctcactttccgtctgcttggctcccccaggctggagtgcagtggcacgatctcgcctcactgcaacctcctcctcccaggttcaagcaattctcctgcctcagcctcccgagtagctgggattacaggtttg

SEQ ID NO: 18556 - DNA, 2681 bp, Homo sapiens
  source 1..2681: mol_type = unassigned DNA
gcggaggcaaggcgggtgcagggcttctggggacggagggaggtgccagaagttgagccctgaggccctgctggcccctgggcgcaggcccagctcaggcccccagggatggacgtcgtggaccctgacattttcaatagagacccccgggaccactatgacctgctacagcggctgggtggcggcacgtatggggaagtctttaaggctcgagacaaggtgtcaggggacctggtggcactgaagatggtgaagatggagcctgatgatgatgtctccacccttcagaaggaaatcctcatattgaaaacttgccggcacgccaacatcgtggcctaccatgggagttatctctggttgcagaaactctggatctgcatggaattctgtggggctggttctctccaggacatctaccaagtgacaggctccctgtcagagctccagattagctatgtctgccgggaagtgctccagggactggcctatttgcactcacagaagaagatacacagggacatcaagggagctaacatcctcatcaatgatgctggggaggtcagattggctgactttggcatctcggcccagattggggctacactggccagacgcctctctttcattgggacaccctactggatggctccggaagtggcagctgtggccctgaagggaggatacaatgagctgtgtgacatctggtccctgggcatcacggccatcgaactggccgagctacagccaccgctctttgatgtgcaccctctcagagttctcttcctcatgaccaagagtggctaccagcctccccgactgaaggaaaaaggcaaatggtcggctgccttccacaacttcatcaaagtcactctgactaagagtcccaagaaacgacccagcgccaccaagatgctcagtcatcaactggtatcccagcctgggctgaatcgaggcctgatcctggatcttcttgacaaactgaagaatcccgggaaaggaccctccattggggacattgaggatgaggagcccgagctaccccctgctatccctcggcggatcagatccacccaccgctccagctctctggggatcccagatgcagactgctgtcggcggcacatggagttcaggaagctccgaggaatggagaccagacccccagccaacaccgctcgcctacagcctcctcgagacctcaggagcagcagccccaggaagcaactgtcagagtcgtctgacgatgactatgacgacgtggacatccccacccctgcagaggacacacctcctccacttccccccaagcccaagttccgttctccatcagacgagggtcctgggagcatgggggatgatgggcagctgagcccgggggtgctggtccggtgtgccagtgggcccccaccaaacagcccccgtcctgggcctcccccatccaccagcagcccccacctcaccgcccattcagaaccctcactctggaacccaccctcccgggagcttgacaagcccccacttctgccccccaagaaggaaaagatgaagagaaagggatgtgcccttctcgtaaagttgttcaatggctgccccctccggatccacagcacggccgcctggacacatccctccaccaaggaccagcacctgctcctgggggcagaggaaggcatcttcatcctgaaccggaatgaccaggaggccacgctggaaatgctctttcctagccggactacgtgggtgtactccatcaacaacgttctcatgtctctctcaggaaagaccccccacctgtattctcatagcatccttggcctgctggaacggaaagagaccagagcaggaaaccccatcgctcacattagcccccaccgcctactggcaaggaagaacatggtttccaccaagatccaggacaccaaaggctgccgggcgtgctgtgtggcggagggtgcgagctctgggggcccgttcctgtgcggtgcattggagacgtccgttgtcctgcttcagtggtaccagcccatgaacaaattcctgcttgtccggcaggtgctgttcccactgccgacgcctctgtccgtgttcgcgctgctgaccgggccaggctctgagctgcccgctgtgtgcatcggcgtgagccccgggcggccggggaagtcggtgctcttccacacggtgcgctttggcgcgctctcttgctggctgggcgagatgagcaccgagcacaggggacccgtgcaggtgacccaggtagaggaagatatggtgatggtgttgatggatggctctgtgaagctggtgaccccggaggggtccccagtccggggacttcgcacacctgagatccccatgaccgaagcggtggaggccgtggctatggttggaggtcagcttcaggccttctggaagcatggagtgcaggtgtgggctctaggctcggatcagctgctacaggagctgagagaccctaccctcactttccgtctgcttggctcccccaggcctgtagtggtggagacacgcccagtggatgatcctactgctcccagcaacctctacatccaggaatgagtccctaggggggtgtcaggaactagtccttgcaccccctcccccatagacacactagtggtcatggcatgtcctcatctcccaataaacatgactttagcctctgc

SEQ ID NO: 18557 - DNA, 1225 bp, Homo sapiens
  source 1..1225: mol_type = unassigned DNA
tggggctacactggccagacgcctctctttcattgggacaccctactggatggctccggaagtggcagctgtggccctgaagggaggatacaatgagctgtgtgacatctggtccctgggcatcacggccatcgaactggccgagctacagccaccgctctttgatgtgcaccctctcagcatcaactggtatcccagcctgggctgaatcgaggcctgatcctggatcttcttgacaaactgaagaatcccgggaaaggaccctccattggggacattgaggatgaggagcccgagctaccccctgctatccctcggcggatcagatccacccaccgctccagctctctggggatcccagatgcagactgctgtcggcggcacatggagttcaggaagctccgaggaatggagaccagacccccagccaacaccgctcgcctacagcctcctcgagacctcaggagcagcagccccaggaagcaactgtcagagtcgtctgacgatgactatgacgacgtggacatccccacccctgcagaggacacacctcctccacttccccccaagcccaagttccgttctccatcagacgagggtcctgggagcatgggggatgatgggcagctgagcccgggggtgctggtccggtgtgccagtgggcccccaccaaacagcccccgtcctgggcctcccccatccaccagcagcccccacctcaccgcccattcagaaccctcactctggaacccaccctcccgggagcttgacaagcccccacttctgccccccaagaaggaaaagatgaagagaaagggatgtgcccttctcgtaaagttgttcaatggctgccccctccggatccacagcacggccgcctggacacatccctccaccaaggaccagcacctgctcctgggggcagaggaaggcatcttcatcctgaaccggaatgaccaggaggccacgctggaaatggaaagaccccccacctgtattctcatagcatccttggcctgctggaacggaaagagaccagagcaggaaaccccatcgctcacattagcccccaccgcctactggcaaggtaccagctcccaatgaatggcaccacacagccttataattcctcccatgcccctctgcctcctgctgtcctaccccccttcacacctacctattctccaggaagaacatggtttccaccaagatccaggacaccaaa

SEQ ID NO: 18558 - DNA, 2700 bp, Homo sapiens
  source 1..2700: mol_type = unassigned DNA
gggcgcaggcccagctcaggcccccagggatggacgtcgtggaccctgacattttcaatagagacccccgggaccactatgacctgctacagcggctgggtggcggcacgtatggggaagtctttaaggctcgagacaaggtgtcaggggacctggtggcactgaagatggtgaagatggagcctgatgatgatgtctccacccttcagaaggaaatcctcatattgaaaacttgccggcacgccaacatcgtggcctaccatgggagttatctctggttgcagaaactctggatctgcatggaattctgtggggctggttctctccaggacatctaccaagtgacaggctccctgtcagagctccagattagctatgtctgccgggaagtgctccagggactggcctatttgcactcacagaagaagatacacagggacatcaagggagctaacatcctcatcaatgatgctggggaggtcagattggctgactttggcatctcggcccagattggggctacactggccagacgcctctctttcattgggacaccctactggatggctccggaagtggcagctgtggccctgaagggaggatacaatgagctgtgtgacatctggtccctgggcatcacggccatcgaactggccgagctacagccaccgctctttgatgtgcaccctctcagagttctcttcctcatgaccaagagtggctaccagcctccccgactgaaggaaaaaggcaaatggtcggctgccttccacaacttcatcaaagtcactctgactaagagtcccaagaaacgacccagcgccaccaagatgctcagtcatcaactggtatcccagcctgggctgaatcgaggcctgatcctggatcttcttgacaaactgaagaatcccgggaaaggaccctccattggggacattgaggatgaggagcccgagctaccccctgctatccctcggcggatcagatccacccaccgctccagctctctggggatcccagatgcagactgctgtcggcggcacatggagttcaggaagctccgaggaatggagaccagacccccagccaacaccgctcgcctacagcctcctcgagacctcaggagcagcagccccaggaagcaactgtcagagtcgtctgacgatgactatgacgacgtggacatccccacccctgcagaggacacacctcctccacttccccccaagcccaagttccgttctccatcagacgagggtcctgggagcatgggggatgatgggcagctgagcccgggggtgctggtccggtgtgccagtgggcccccaccaaacagcccccgtcctgggcctcccccatccaccagcagcccccacctcaccgcccattcagaaccctcactctggaacccaccctcccgggagcttgacaagcccccacttctgccccccaagaaggaaaagatgaagagaaagggatgtgcccttctcgtaaagttgttcaatggctgccccctccggatccacagcacggccgcctggacacatccctccaccaaggaccagcacctgctcctgggggcagaggaaggcatcttcatcctgaaccggaatgaccaggaggccacgctggaaatgctctttcctagccggactacgtgggtgtactccatcaacaacgttctcatgtctctctcaggaaagaccccccacctgtattctcatagcatccttggcctgctggaacggaaagagaccagagcaggaaaccccatcgctcacattagcccccaccgcctactggcaaggaagaacatggtttccaccaagatccaggacaccaaaggctgccgggcgtgctgtgtggcggagggtgcgagctctgggggcccgttcctgtgcggtgcattggagacgtccgttgtcctgcttcagtggtaccagcccatgaacaaattcctgcttgtccggcaggtgctgttcccactgccgacgcctctgtccgtgttcgcgctgctgaccgggccaggctctgagctgcccgctgtgtgcatcggcgtgagccccgggcggccggggaagtcggtgctcttccacacggtgcgctttggcgcgctctcttgctggctgggcgagatgagcaccgagcacaggggacccgtgcaggtgacccaggtagaggaagatatggtgatggtgttgatggatggctctgtgaagctggtgaccccggaggggtccccagtccggggacttcgcacacctgagatccccatgaccgaagcggtggaggccgtggctatggttggaggtcagcttcaggccttctggaagcatggagtgcaggtgtgggctctaggctcggatcagctgctacaggagctgagagaccctaccctcactttccgtctgcttggctcccccaggctggagtgcagtggcacgatctcgcctcactgcaacctcctcctcccaggttcaagcaattctcctgcctcagcctcccgagtagctgggattacaggcctgtagtggtggagacacgcccagtggatgatcctactgctcccagcaacctctacatccaggaatgagtccctaggggggtgtcaggaactagtccttgcaccccctcccccatagacacactagtggtcatggcatgtcctcatctcccaataaacatgactttagcctctgc

SEQ ID NO: 18559 - DNA, 2955 bp, Homo sapiens
  source 1..2955: mol_type = unassigned DNA
cagagccacgggcgcccgccccgccccgcgccgccccgcgccggctccgcagctcgcgcccgcccgcctgccggcccgcccggcgccgggccatggcgctgctgcgggatgtgtcgctgcaggacccgcgggaccgcttcgagctgctgcagcgcgtgggggccgggacctatggcgacgtctacaaggcccgcgacacggtcacgtccgaactggccgccgtgaagatagtcaagctagacccaggggacgacatcagctccctccagcaggaaatcaccatcctgcgtgagtgccgccaccccaatgtggtggcctacattggcagctacctcaggaatgaccgcttgtggatctgcatggagttctgcggagggggctccctgcaggagatttaccatgccactgggcccctggaggagcggcagattgcctacgtctgccgagaggcactgaaggggctccaccacctgcattctcaggggaagatccacagagacatcaagggagccaaccttctcctcactctccagggagatgtcaaactggctgactttggggtgtcaggcgagctgacagcgtctgtggccaagaggaggtctttcattgggactccctactggatggctcccgaggtggctgctgtggagcgcaaaggtggctacaatgagctatgtgacgtctgggccctgggcatcactgccattgagctgggcgagctgcagccccctctgttccacctgcaccccatgagggccctgatgctcatgtcgaagagcagcttccagccgcccaaactgagagataagactcgctggacccagaatttccaccactttctcaaactggccctgaccaagaatcctaagaagaggccgacagcagagaagctcctgcagcacccgttcacgactcagcagctccctcgggccctcctcacacagctgctggacaaagccagtgaccctcatctggggaccccctcccctgaggactgtgagctggagacctatgacatgtttccagacaccattcactcccgggggcagcacggcccagccgagaggaccccctcggagatccagtttcaccaggtgaaatttggcgccccacgcaggaaggaaactgacccactgaatgagccgtgggaggaagagtggacactactgggaaaggaagagttgagtgggagcctgctgcagtcggtccaggaggccctggaggaaaggagtctgactattcggtcagcctcagaattccaggagctggactccccagacgataccatgggaaccatcaagcgggccccgttcctagggccactccccactgaccctccagcagaggagcctctgtccagtcccccaggaaccctgcccccacctccttcaggccccaacagctccccactgctgcccacggcctgggccaccatgaagcagcgggaggatcctgagaggtcatcctgccacgggctccccccaactcccaaggtgcatatgggcgcctgcttctccaaggtcttcaatggctgccccctgcggatccacgctgctgtcacctggattcaccctgttactcgggaccagttcctggtggtaggggccgaggaaggcatctacacactcaacctgcatgaactgcatgaggatacgctggagaagctgatttcacatcgctgctcctggctctactgcgtgaacaacgtgctgctgtcactctcagggaaatccacgcacatctgggcccatgacctcccaggcctgtttgagcagcggaggctacagcaacaggttcccctctccatccccaccaaccgcctcacccagcgcatcatccccaggcgctttgctctgtccaccaagattcctgacaccaaaggctgcttgcagtgtcgtgtggtgcggaacccctacacgggtgccaccttcctgctggccgccctgcccaccagcctgctcctgctgcagtggtatgagccgctgcagaagtttctgctgctgaagaacttctccagccctctgcccagcccagctgggatgctggagccgctggtgctggatgggaaggagctgccgcaggtgtgtgttggggccgaggggcctgaggggcccggctgccgcgtcctgttccatgtcctgcccctggaggctggcctgacgcccgacatcctcatcccacctgaggggatcccaggctcggcccagcaggtgatccaggtggacagggacacaatcctagtcagctttgaacgctgtgtgaggattgtcaacatgcagggcgagcccacggccacactggcacctgagctgacctttgatttccccatcgagactgtggtgtgcctgcaggacagtgtgctggccttctggagccatgggatgcaaggccgaagcctggataccaatgaggtgacccaggagatcacagatgaaacaaggatcttccgagtgcttggggcccacagagacatcatcctggagagcattcccactgacaacccagaggcgcacagcaacctctacatcctcacgggccaccagagcacctactaagagcagcgggcctgtccaggggctccccgccccaccccacgccttagctgcaggcccttttgggcaaaggggcccatcctagaccagaggagcccaggccctggccctgctggggctgaaggtcagaagtaatcctgagaaatgtttcaggcctggggagggaggggagcccccgacgcctctgcaataactggaccagggggagctgctgtcactcccccatccccgaggcagcccagtccctagtgcccaaggcagggaccctgggcctgggccatccattccattttgttccacatttcctttctactctttctgccaagagcctgcccctgcatttgtcctgggaaacacggtatttaagagagaactatattggtattaaagctggtttgtttta

SEQ ID NO: 18560 - DNA, 4354 bp, Homo sapiens
  source 1..4354: mol_type = unassigned DNA
gggtggggaacgtggtgcggcggcggcggcggcggcgactgtacgcgcctccgccgcccccgagaggacgcgccgtgcagcggctgagtggcggcggcggcgacggcaaacccggagctgccggccggcgcgcgggaggaggacgcgggtgcggtctaggaagtaggtcccgggctccgcgctcaacaaagacggggccgcccccattagacggagctgcgggcggaggctccatgttgggaagcggcgccgttcgtgcttgttagcgggaatccgggagccgcggggtgagctggcgggggccgggccctaagtgaagatggaggccccgctgcggcctgccgcggacatcctgaggcggaacccgcagcaggactacgaactcgtccagagggtcggcagcggcacctacggggacgtctataaggccagaaatgtacacacaggagagctggctgcagtaaaaatcattaaattggagcctggagatgatttttctttgattcaacaagaaatatttatggttaaagaatgtaaacattgtaacatcgttgcctactttgggagttatcttagtcgggaaaaactatggatttgtatggaatactgtggtggcggatcacttcaagatatttaccatgttactggaccattatcagaattgcaaatagcctatgtatgcagagaaaccttacagggtcttgcctatttgcatactaaaggcaaaatgcatagagatatcaaaggtgctaatattttattgacagaccatggcgatgtaaaattagctgactttggtgtggctgcaaaaataacagctaccattgcaaaacgaaaatctttcattggcaccccttactggatggccccagaagttgcagcagtagagaagaatggtggctacaaccaactctgtgatatctgggcagtaggaataacagcaattgaacttggagaacttcagccacctatgtttgatctccacccaatgagggctctcttcttaatgtcaaaaagtaattttcagcctccaaaactaaaggacaaaacaaaatggtcatcaacattccataattttgtcaaaatagcactaaccaaaaacccaaaaaaaagaccaactgctgaaagacttctgactcacacttttgttgcacagccaggtctctctagagccctagcagttgaactgttagacaaagtgaacaatccagataaccacgcacattacactgaagcagatgacgatgactttgagccccatgcaatcattcgtcataccattagatctacaaacaggaatgccagagctgaacggacagcttcagaaataaattttgacaaattacaatttgaacctcctctgagaaaagaaacagaagcacgagatgaaatgggattgtcatcagacccaaatttcatgttacagtggaatccttttgttgatggtgcaaatactggcaaatcaacctcaaaacgtgcaataccacctcccctacctcctaagccaaggataagcagttaccctgaagacaactttccggatgaagaaaaagcatcaaccataaaacattgtcctgattcagaaagcagagctccccaaattctcagaagacagagtagcccaagttgtgggcctgtggcagagacttcttctattggaaatggtgatggtatttcaaaactgatgagtgaaaatacagaaggatcagcacaagcaccacagttaccacgaaaaaaggacaaacgagacttccctaaaccagccatcaatggccttccacccaccccaaaagttctgatgggagcatgcttttcaaaagtttttgatggctgtcctttgaaaattaattgtgcaacatcctggatacatcctgatacaaaagatcagtacattatttttggaactgaagatggtatttacacactgaatctcaatgagctacatgaggcaacgatggaacagttatttccacggaagtgtacttggctgtatgttatcaataatactttaatgtcattatcagtaggaaaaacctttcagctctactctcacaatcttatagctttgtttgaacatgccaaaaaaccaggattagctgcccatattcaaactcacaggtttccagaccgaatactaccaagaaaattcgctttaacaacaaagattcctgatacaaaaggctgccacaaatgttgcatagtcagaaacccttacacgggacataaatacctctgtggagctttacagtctggaattgttttacttcagtggtatgagccaatgcagaaattcatgttgataaagcactttgattttcctttgccaagtcctttgaatgtttttgaaatgctggtgatacctgaacaggaataccctatggtctgtgtagctattagcaaaggcactgaatcgaatcaggtagttcagtttgagacaatcaatttgaactctgcatcttcatggtttacagaaattggtgcaggcagccagcagttagattccattcatgtaacacagttggagagagataccgttttagtgtgtttagacaaatttgtgaaaattgtaaatctacaaggaaaattaaaatcaagtaagaaactggcctctgagttaagttttgattttcgcattgaatctgtagtatgccttcaagacagtgtgttggctttctggaaacatgggatgcagggtaaaagcttcaagtcagatgaggttacccaggagatttcagatgaaacaagagttttccgcttattaggatcagacagggttgtcgttttggaaagtaggccaacagaaaatcctactgcacacagcaatctctacatcttggctggacatgaaaatagttactaagcaacagaaactgatctcaaatgacaggaaaatgaatatactccattgaaaggaaaaataaggaaattcaatacaaactgcactatgatttgctttaactattatgggttatattgcaaatgatctgtactttagggtagaattcaatattttctgcagctggaaacagctagtctatctcttgccactgtgtggtggttatatcaagtttgcttaataaaagctatgagacaaatagtcctctagttccaggaaacacagtctttttttaaaaaaaacaatgtttgtaacaagggtgccatggtatttttagataactcgtgattatcttaagagaggtaaatttagtgatcattttatatcatgtcttattccttcttaatgaacataatttgttaaattctcaagcaaggttttcacttttatattggccattctgtatgtttttgtaaaacagaatatttaatccttatttattaatctcttgctggagtggtgtaatgtatctaacttttagcaaaggagggttgcagagcagcttaaattttttttataatgtataagaattttgtttatcttttaagagtagtaaagtactttgagtgtttgggggttcaacacacacatgcaattttgcttaacaaaagtattttataatacagtttcatacagaattaccttaaaagggagtcttatgttttcaactacagatagttgtaagggatcatacagaagatattgatgatagttgaaatattcttagaaggggtgtgtatgtctagctgtgtctaccatgtgtatgtattcttgacaagcagtataaaatacctgtgatttttctttacattagggataatgcataaggaattaatcttcatatatattatcatccctaatgtagcagggggaagtatttaattgcccatgatatgtattttacttatactatgccagagaggaaactataaagtaattacacatgtaatcttgggtttttcacatatgtaggtattcattttgagtaggttgaagaagaaaaaaaatatttaaatgaattgaattcctgatgggatagtatcaataagtatttaaaagccagtattctaaaaataataaagggtagggtcatttttgagtttgtttttcttttgctattgttaatattcaaaattaaagtgttacattggtacctgttgtcttaatgcatttattgagaacagcattgagatgatgaacaaggggttagcaatagcaaactctataattattttgactaattacttaagaggaaaacagtataagtatctcattcagtatttagcaattctgtaaaataagtattatctctatttttcagatgaggaagtaagggtttagcaaggttaagagatctatccaatttacacagcaagttagtagttgagcctgaccatgagtcttctgactctgttcttttcactatgcaatacgcaaacaataaaatgttatacaaat

SEQ ID NO: 18561 - DNA, 1971 bp, Homo sapiens
  source 1..1971: mol_type = unassigned DNA
atggccacagccgagtcccgtgcgctccagtttgccgagggcgccgcgtttccagcgtaccgggccccccacgccggcggggcgctcctgccgcccccgagccctgcggcagccctgctccctgcgccgcccgcgggccccggcccagcgacctttgcgggcttcctcggccgggaccccgggccggccccgccgccccccgccagcctgggctcgcctgcgccccccaaaggcgcggccgccccgtcggcgtcgcagcgccgcaagcgcacgtctttcagcgccgaacagctgcagctgctggagctcgtcttccgccggacccggtaccccgacatccacttgcgcgagcgcctggccgcgctcaccctgctccccgagtccaggatccaggtatggttccagaacaggcgtgccaagtctcggcgtcagagtgggaaatccttccaacctttggctaggccggagattatcctcaaccactgtgctcctggaactgaaacgaaatgtctgaagccccagctgcctcttgaggtagatgtgaactgcctgcccgaaccaaacggggttggagggggcatctctgactctagctcccaaggtcagaattttgaaacctgttcccctctctctgaagacattggttcaaagctggactcatgggaggaacacatcttttctgcctttggtaacttttgaggattctgggagaattcgggataagctctgaggagccatgactgacagcctgggagagacacatcagcatactgtcctttctgacttccatgctaaggacatgtccttgttaaccttgatgatggttttgacagcacctctcacatttgaaggtaccccgccactttgtcaatgacgttttaagcccacactcccaccccagagttcccgcattcgtttttacctgtgttctctccaagcctgcacattccattggtctgcatccctatgccttcttgccaggcctgtttttagtttttggactggttgttcagaactcattattttcttcacaagaatgcctcagcttgactcagtttccccttgtgtttgacagctgccattttctcctggtccctccaaggcttataatcttaaagtcactctaccccgtctcttcaaccctcatcctaggtttattactttttaaaattgggcctgtcatcttcacgttcaatcatagctccaatgactctgcatgcagattatttcgacagcccccttgcctctagcttctcaactacttaaaaaaaattaccctctgtgggccaggtgcagtggctcactcctgcaatctcagcactttgggaggccgagtgggtggatcacctgaagtcaggagttcaagaccagcctggccaatatggcgaaaccccatctctgctaaaaatataaaacttagctgggcacggtgacgggagcctgtagtcccagctactcaggaggctgaggcaggagaatcacttgagcctgggaggtggaggttgcagtgatctaagatcgtgccactgcacttcagcctgggagacagagggaggctctcaaaaaaaaaaaaaaaaaaaaaaaaaattactctatggttctgtggtagcctccagttgctaccaaattataaaaagctttcagttaccctcccagataactgatatcatccttagcctgcaggacagctatgcaaatctgaaggtcaactatccacaatatatgctttggtcttaaagtcactcctttcagttttgaaccaaattcataccttttgctttcaaaacactcgaggactccccacctgccttctgaagtctgaaattttctctaagtaatcctgattttgcacctgttacttcgatcactccattacccttagcacttgttattgtacttcctgtgcaagttttgtggattattaaatgtctttcacaaatgttccaatgtaatttctatttaaatgaattc

SEQ ID NO: 18562 - DNA, 839 bp, Homo sapiens
  source 1..839: mol_type = unassigned DNA
cctggcccgggagggtataagtgcggcccgcgcccctccgagcggcgcgctgggttccggagcgatggccacagccgagtcccgtgcgctccagtttgccgagggcgccgcgtttccagcgtaccgggccccccacgccggcggggcgctcctgccgcccccgagccctgcggcagccctgctccctgcgccgcccgcgggccccggcccagcgacctttgcgggcttcctcggccgggaccccgggccggccccgccgccccccgccagcctgggctcgcctgcgccccccaaaggcgcggccgccccgtcggcgtcgcagcgccgcaagcgcacgtctttcagcgccgaacagctgcagctgctggagctcgtcttccgccggacccggtaccccgacatccacttgcgcgagcgcctggccgcgctcaccctgctccccgagtccaggatccagcttttattttctcccctcttccaggtatggttccagaacaggcgtgccaagtctcggcgtcagagtgggaaatccttccaacctttggctaggccggagattatcctcaaccactgtgctcctggaactgaaacgaaatgtctgaagccccagctgcctcttgaggtagatgtgaactgcctgcccgaaccaaacggggttggagggggcatctctgactctagctcccaaggtcagaattttgaaacctgttcccctctctctgaagacattggttcaaagctggactcatgggaggaacacatcttttctgcctttggtaacttttgaggattctgggagaattcgggataagctctgaggagccatgactgacagcctg

SEQ ID NO: 18563 - DNA, 1734 bp, Homo sapiens
  source 1..1734: mol_type = unassigned DNA
acttccgcctcgggggagctgggagcccgacgtttccgggagcgccgcgtggttagcgtcggcggcttttggcatggcgactttttctggcccggctgggccaatcctgtcgcttaatccgcaggaagatgtcgagtttcaaaaggaggtggcgcaggttcgcaagcgcataacccagcgaaaaaaacaagaacaacttactcctggagtagtctatgtgcgccacctacctaacctacttgacgaaacccagatcttttcatatttctcccagtttggcactgtgacacggttcaggctgtccagaagtaaaaggactggaaatagcaaaggctatgcatttgtggagtttgagtctgaggatgttgccaaaatagttgctgaaacaatgaacaactacctgtttggtgaaagactcttggagtgtcattttatgccacctgaaaaagtacataaagaactctttaaagactggaatattccatttaagcagccatcatatccatcagtgaaacggtataatcggaatcggacactaacacaaaagctacggatggaggagcgatttaaaaagaaagaaagattactcaggaagaaattagctaaaaaaggaattgactatgattttccttctttgattttacagaaaacggaaagtatttcaaaaactaatcgtcagacgtctacaaaaggccaggttttacgtaagaagaagaaaaaagtttcaggtactcttgacactcctgagaagactgtggatagccagggccccacaccagtttgtacaccaacatttttggagaggcgaaaatctcaagtggctgaactgaatgatgatgataaagatgatgaaatagttttcaaacagcccatatcctgtgtaaaagaagaaatacaagagactcaaacacctacacattcacggaaaaaaagacgaagaagcagcaatcagtgattttcaatgtattatatttcttttgaaaaatataatatttttatgagagtggactttgtatttcactaggtacaatggaatacaacctttgacaagattttcagaggaaaaatacactgtttggtcaagttaaggaaagcagtgtgtaattttggattgcctgcccttggctgaaatacaggggtgcataccatcttgcagtggcttggctgacattgcctctttgtcctggcctctagttttcttttgatatttcatagctctccttagtttactctgcctggatagaaagttgaccactaactgcaggtttaagtactaaactgcagccttttctgtcgccagcaattaaagaccaccaatcttgtttgtccatctacatggtttgtcggggacatttaactcatggaggtgctttagatttcaacatcagatggttgaagctggaagtttaattatatgtagagtgagaaggcagttccagttttagcacagatttgtttatgtgttcagattttaatagagattcaaaaatgactcatttttaccaataatgttaaattagttttggttgtgctagcatgaattaataaccaccattttataccagtatcatcagtgaagaattgtatttcaagattcaaacaataaccagcaattaaacttttttctacaatgtatttgtttgcgagtaggacttgggagtcattgggaaaaaaaaataataaattttccccttcattaacgaattcagactcattaaaaacattgccatcaga

SEQ ID NO: 18564 - DNA, 1998 bp, Homo sapiens
  source 1..1998: mol_type = unassigned DNA
cggattggctgttcggagcggcgaggggcttggcgggagcttccagtcgctcgagagcggagagcggcaccatggccccgcgggggcggcggcggccgcggcctcacaggtctgagggcgcaagacgttcaaagaacactttagaaagaacacattccatgaaagataaagctggtcaaaagtgcaagcctattgacgtgttcgactttcctgataattctgatgtctcaagcattggcaggctgggtgaaaatgagaaagatgaagaaacttatgagacctttgatcctcctttacatagcacagctatatatgctgatgaagaagaattctccaaacattgtggactgtctctctcttcaactcctccaggaaaagaagcaaaaagaagttcagacacttctggaaatgaagcaagtgaaatcgaatctgtaaaaattagtgcaaaaaagccaggaagaaagctcaggcccattagtgatgactctgaaagcattgaagaaagtgatacaaggagaaaagttaaatcagcagagaaaataagtacacaacgtcatgaggttattcgaaccacagcgtcttcagaactttcagagaaaccagctgagtctgtcacttctaaaaagacaggaccccttagtgcccagccctctgttgaaaaagagaacttggcaatagaaagtcaatcgaaaactcagaaaaaagggaagatatctcatgacaaaaggaagaaatcaagaagtaaagccataggctcagatacttctgacattgtgcacatttggtgtccagaaggaatgaaaaccagtgacatcaaggagttgaatattgttttgcctgaatttgagaaaacccacctagagcatcaacaaagaatagaatctaaagtttgtaaggcagccatcgccacattttatgttaatgttaaagaacaattcatcaaaatgcttaaagaaagccagatgttgacaaatctgaaaaggaagaatgctaagatgatttcagatatcgaaaagaaaaggcagcgtatgattgaagtccaggatgaactgcttcggttagagccacagctgaaacaactacaaacaaaatatgatgaacttaaagagagaaagtcttcccttaggaatgcagcatatttcttatctaatttaaaacagctttatcaagattattcagatgttcaagctcaagaaccaaacgtaaaggaaacgtatgattcatccagccttccagctctgttatttaaagcaagaacacttctgggagccgaaagccatctgcgaaatatcaaccatcagttagagaagctccttgaccagggatgagaagagcagtctactaaaatgtgcctataggaagactagtctcatgctgttaccttctgaaactgtacctttataaatcaattgttttgcaaagaagttatggcctacttagaatctaaaatttgttattcaaattaaatggctgtgaacaatgttaaatagcatcagtttgtccaatagttttaaaggccataatcatcttttctggttaatatcttgagtaattttaaaatgttgacaccttaatcggtcccaggtatgagctataataaacttgtaaaattaagttgatgtgaacataattttgattaattaataaggcgatttctcctgaatttacaccaaagctaatttttaatgaaattggtttacagaagtaaaaaacaaaaattggaaagcaaagtaataaaacttagtttatataaacaggttgaatgatatatttatcaaatctcacagacatcaggcaaattatagcctggtgacaaaagtgttcatagtgaattagttactcttgtaatacttctataattagttcatcaggaatttcatccacttcactgttataactgagaagactgttctctgcagcttcagctaattcagcatcttcagtagcttctaaaaaataagcatcatcaatgccattatcccagacagcatcagcaga

SEQ ID NO: 18565 - DNA, 1549 bp, Homo sapiens
  source 1..1549: mol_type = unassigned DNA
attggctgttcggagcggcgaggggcttggcgggagcttccagtcgctcgagagcggagagcggcaccatggccccgcgggggcggcggcggccgcggcctcacaggtctgagggcgcaagacgttcaaagaacactttagaaagaacacattccatgaaagataaagctggtcaaaagtgcaagcctattgacgtgttcgactttcctgataattctgatgtctcaagcattggcaggctgggtgaaaatgagaaagatgaagaaacttatgagacctttgatcctcctttacatagcacagctatatatgctgatgaagaagaattctccaaacattgtggactgtctctctcttcaactcctccaggaaaagaagcaaaaagaagttcagacacttctggaaatgaagcaagtgaaatcgaatctgtaaaaattagtgcaaaaaagccaggaagaaagctcaggcccattagtgatgactctgaaagcattgaagaaagtgatacaaggagaaaagttaaatcagcagagaaaataagtacacaacgtcatgaggttattcgaaccacagcgtcttcagaactttcagagaaaccagctgagtctgtcacttctaaaaagacaggaccccttagtgcccagccctctgttgaaaaagagaacttggcaatagaaagtcaatcgaaaactcagaaaaaagggaagatatctcatgacaaaaggaagaaatcaagaagtaaagccataggctcagatacttctgacattgtgcacatttggtgtccagaaggaatgaaaaccagtgacatcaaggagttgaatattgttttgcctgaatttgagaaaacccacctagagcatcaacaaagaatagaatctaaagtttgtaaggcagccatcgccacattttatgttaatgttaaagaacaattcatcaaaatgcttaaagaaagccagatgttgacaaatctgaaaaggaagaatgctaaggttagagccacagctgaaacaactacaaacaaaatatgatgaacttaaagagagaaagtcttcccttaggaatgcagcatatttcttatctaatttaaaacagctttatcaagattattcagatgttcaagctcaagaaccaaacgtaaaggaaacgtatgattcatccagccttccagctctgttatttaaagcaagaacacttctgggagccgaaagccatctgcgaaatatcaaccatcagttagagaagctccttgaccagggatgagaagagcagtctactaaaatgtgcctataggaagactagtctcatgctgttaccttctgaaactgtacctttataaatcaattgttttgcaaagaagttatggcctacttagaatctaaaatttgttattcaaattaaatggctgtgaacaatgttaaatagcatcagtttgtccaatagttttaaaggccataatcatcttttctggttaatatcttgagtaattttaaaatgttgacaccttaatcggtcccaggtatgagctataataaacttgtaaaattaa

SEQ ID NO: 18566 - DNA, 1547 bp, Homo sapiens
  source 1..1547: mol_type = unassigned DNA
attggctgttcggagcggcgaggggcttggcgggagcttccagtcgctcgagagcggagagcggcaccatggccccgcgggggcggcggcggccgcggcctcacaggtctgagagcgcaagacgttcaaagaacactttagaaagaacacattccatgaaagataaagctggtcaaaagtgcaagcctattgacgtgttcgactttcctgataattctgatgtctcaagcattggcaggctgggtgaaaatgagaaagatgaagaaacttatgagacctttgatcctcctttacatagcacagctatatatgctgatgaagaagaattctccaaacattgtggactgtctctctcttcaactcctccaggaaaagaagcaaaaagaagttcagacacttctggaaatgaagcaagtgaaatcgaatctgtaaaaattagtgcaaaaaagccaggaagaaagctcaggcccattagtgatgactctgaaagcattgaagaaagtgatacaaggagaaaagttaaatcagcagagaaaataagtacacaacgtcatgaggttattcgaaccacagcgtcttcagaactttcagagaaaccagctgagtctgtcacttctaaaaagacaggaccccttagtgcccagccctctgttgaaaaagagaacttggcaatagaaagtcaatcgaaaactcagaaaaaagggaagatatctcatgacaaaaggaagaaatcaagaagtaaagccataggctcagatacttctgacattgtgcacatttggtgtccagaaggaatgaaaaccagtgacatcaaggagttgaatattgttttgcctgaatttgagaaaacccacctagagcatcaacaaagaatagaatctaaagtttgtaaggcagccatcgccacattttatgttaatgttaaagaacaattcatcaaaatgcttaaagaaagccagatgttgacaaatctgaaaaggaagaatgctaaggttagagccacagctgaaacaactacaaacaaaatatgatgaacttaaagagagaaagtcttcccttaggaatgcagcatatttcttatctaatttaaaacagctttatcaagattattcagatgttcaagctcaagaaccaaacgtaaaggaaacgtatgattcatccagccttccagctctgttatttaaagcaagaacacttctgggagccgaaagccatctgcgaaatatcaaccatcagttagagaagctccttgaccagggatgagaagagcagtctactaaaatgtgcctataggaagactagtctcatgctgttaccttctgaaactgtacctttataaatcaattgttttgcaaagaagttatggcctacttagaatctaaaatttgttattcaaattaaatggctgtgaacaatgttaaatagcatcagtttgtccaatagttttaaaggccataatcatcttttctggttaatatcttgagtaattttaaaatgttgacaccttaatcggtcccaggtatgagctataataaacttgtaaaatt

SEQ ID NO: 18567 - DNA, 1014 bp, Homo sapiens
  source 1..1014: mol_type = unassigned DNA
atggccccgcgggggcggcggcggccgcggcctcacaggtctgagggcgcaagacgttcaaagaacactttagaaagaacacattccatgaaagataaagctggtcaaaagtgcaagcctattgacgtgttcgactttcctgataattctgatgtctcaagcattggcaggctgggtgaaaatgagaaagatgaagaaacttatgagacctttgatcctcctttacatagcacagctatatatgctgatgaagaagaattctccaaacattgtggactgtctctctcttcaactcctccaggaaaagaagcaaaaagaagttcagacacttctggaaatgaagcaagtgaaatcgaatctgtaaaaattagtgcaaaaaagccaggaagaaagctcaggcccattagtgatgactctgaaagcattgaagaaagtgatacaaggagaaaagttaaatcagcagagaaaataagtacacaacgtcatgaggttattcgaaccacagcgtcttcagaactttcagagaaaccagctgagtctgtcacttctaaaaagacaggaccccttagtgcccagccctctgttgaaaaagagaacttggcaatagaaagtcaatcgaaaactcagaaaaaagggaagatatctcatgacaaaaggaagaaatcaagaagtaaagccataggctcagatacttctgacattgtgcacatttggtgtccagaaggaatgaaaaccagtgacatcaaggagttgaatattgttttgcctgaatttgagaaaacccacctagagcatcaacaaagaatagaatctaaagtttgtaaggcagccatcgccacattttatgttaatgttaaagaacaattcatcaaaatgcttaaagaaagccagatgttgacaaatctgaaaaggaagaatgctaagatgatttcagatatcgaaaagaaaaggcagcgtatgattgaagtccaggatgaactgcttcgtctctggacaggtgctggcctatggtaa

SEQ ID NO: 18568 - DNA, 5799 bp, Homo sapiens
  source 1..5799: mol_type = unassigned DNA
cctccccctcccgccgcgccgcgcgctcgcggacagtcggcgcgcgggccgggccgggccggcgcccctctgcctcgcgcgcttgtcgcgttgccccgggctccgggggatgcccccggccgagcccttctcatggccgccgacgtcttcatgtgctccccgcgccggcctcgcagccggggccgccaggtgctgctcaagccccaggtgtccgaggacgacgacgactcggacacggatgagccgtccccgccgcccgcctccggcgcggccaccccggcccgggcccacgcgagcgccgcgccaccgccgcctcgggccgggccgggccgcgaggaacctccgcgccgccagcagatcatccacagcggccacttcatggtgtcgtcgccgcaccgagagcacccgcccaagaagggctacgatttcgacacggtcaacaaacagacgtgccagacctacagcttcggcaagactagctcctgccacctgtccatcgacgcctcgctcaccaagctcttcgagtgcatgactttggcctacagtgggaagttggtgtctccaaagtggaagaatttcaagggcctgaagctacagtggagagacaagatccggctcaataatgccatctggcgggcctggtacatgcagtatctggagaagcgcaagaatcctgtgtgccactttgtgacacccctggacggctctgtggacgtagacgagcaccgccggccggaggccatcaccacggaagggaagtactggaagagccgcatcgagattgtgatccgggagtatcacaagtggagaacctacttcaagaaaaggctacagcagcacaaggatgaggacctctccagcctggtccaggacgatgacatgctgtattggcacaagcacggggatggatggaagacccccgtccccatggaggaggatcccctgctggacacagacatgctcatgtcggaattcagcgacaccctcttctccacactttcttcacaccagccggtggcctggcccaatccccgggaaatagcacatctgggaaatgcagacatgatccagccgggactgattcctttgcagcctaacctggacttcatggacacctttgagcctttccaggacctcttctcttctagccgctccatttttggctccatgctacctgcatctgcctcagcacctgtaccagatcccaacaacccacctgcacaggagagcatcctgccgaccacagccctccccactgtgagccttcctgacagcctcatcgcgccccctaccgccccatccctggctcacatggatgagcagggctgtgaacacacctcccggactgaggacccgtttatccagcccacggacttcggtccctcagagccgccactgagtgtcccgcagcccttcctccctgtcttcaccatgcccctgctgtctcccagccccgccccaccgcccatctcccccgtgttaccattagttcctcctcctgccactgccctgaaccccccggctccacccaccttccatcagccacagaagtttgctggagtcaacaaagcgccgtctgtcatcacccacacggcctctgccaccctcacccacgatgcccccgccaccacctttagccagagtcagggccttgtgatcaccacccatcaccctgccccgtcagcggccccttgtgggctggcactgtctcctgtcacccggcctccccagccacggttaacttttgtgcaccccaaacctgtatccttgactgggggcaggcctaagcagccccacaaaatagtgcctgctcccaaaccagagcccgtgtccttggtgttgaagaatgcccgtatcgccccagctgccttttcaggccaaccacaagcggtgatcatgacgtcagggcctctgaagagagaagggatgttggcctccaccgtgtcccagtccaacgtggtcattgcgcctgctgccatcgccagggctcctggggtcccggagttccacagcagcatcctggtgacagatctcggccatggcacgagcagcccgcctgcccccgtctcccggctcttcccaagcacagcgcaagaccccctggggaagggcgagcaggtcccgctgcatgggggcagcccccaggtcactgtcacagggcccagtcgggactgcccaaactcagggcaggcctctccgtgtgcatcggagcagagccccagtcctcaatctccccagaacaactgctcagggaaatccgaccccaaaaatgtggctgcactaaagaaccggcagatgaagcacatctcagctgagcagaaaaggcgcttcaacatcaagatgtgcttcgacatgctcaacagcctcatctccaacaattccaagctgaccagtcacgccatcacactgcagaagactgtggagtacatcaccaagctgcagcaggagagaggccagatgcaggaggaggcccggcggctgcgggaggagatcgaggagctcaatgccaccatcatctcctgccagcagctgctccctgccacgggagtccccgttacccggcgccagtttgatcacatgaaagacatgtttgacgaatacgtgaaaacccggaccttgcagaattggaagttctggattttcagcatcatcatcaagccgctgtttgagtcgttcaagggcatggtgtccaccagcagcctggaggagctgcaccggacggcgctctcctggctggaccagcactgctccctgcccatcctcaggccgatggtattgagcacgctgcggcagctgagcacctccacctccatcctcacagacccggcacagctgccagagcaggcgtccaaggctgtcaccaggattggcaagagattgggagagtcctagctgcttagctggcatgtggccgcatgagatgccaggagacccttccctgcccatggagagtaggctgcgccccccagcccttcctgacgctcagcctcggggcctctctccaactctgccggcccaccgtggcatcgggaggccatgctcaggtctgaagcaggtttggggcctgctgacagcaatagcccgcctttgggaaccccttgctgtgaactctctcactcagtgacctcagtcaccaacctcctctgccctcggggcagcccacacaaaagggaagtgctggccgtgctggtcctgccctgctggtggcctgccgggcctggcgccggtgagcggaatcgatgggatgagggtgacagggcctgctcctgtcctgaggcccagccttgtccctcctgccacgtcctgtccacatgcatgcctctgcctgatgccctgctccactctctggtctgcccgtggggcagttggaaggcgtctttctttctcccctcaactctgacagcacccagcccttgtggatggacttgggcttctattcaggcttatgcatggcaggctgccagggggaagtgccttcttcagaggtcctccaggacacatgtgtgcagaaacggtggatgtggaacacacaggaccagaatggaagcgtgtgatgcacggtggctgctctggctgagaggccctgctgggcatgtttcatctgtccccttttagctccacctgacattgcaggatccatggggactcagcccagggccttctcggatgtcacctcaccgctgtggcccttctgccgttcttctccacttggctccagctgcagctgttgacagatcaagcatgtcctgtgggagcttagaaccctgaagttctagtgtctgaaagatcagactccacgtcctgctgtcagccttgtcatcttgtctgatgtctttcagctgggagccccaaaccaggacagttctcggaccaaagatgcccccacactcaaaagtctgtcccgtcttgtgtttggagaaggaaacaatgttggcaggcagcactctgtggtggtcagccctcagagctgtttctaggcatctctcagatcagacagcaaagaatctacccagatctgggctgggtggaggtgtggctgggctgggggccattctgagcctgcagtgagagtttggcccagcctcagtccttgctcttctctggctacctctgcagggagctgcaggggcaagcactctctccagcactcaggaagcccggccgagggtacctcctcgtggaaagaatgcactttaaagctctgctgaggagttcggagcccaggctttcaggcgacctctgccctccctgcctctcctcaccctccctctcttcctgcagggcctgggaagggctttgagggagcctgggagccatgtgaagaggggcacgcctgggctgtcccacagtttagatccagttggaggttctccctggctcctgcaggcctgcggggatctctccccacttcaggcctccggccagctgcctgccctcttgtctgtgcttcagccctgcacaaaagcagcttggtgacaccactcagccacccagagtacgtgtttacaggctttccagatcaccttcctgtggggtgaacgtaatgaggcggggctggtccttggaatttcccctggaaaatggtaacagactccatccttgacccggggatgagcatgaaggcattgtcccaaaggcagaggccaccgtggtaggaattccaccaaggccagaagggaaaaaggaagaacccaccgtgtctggctgtgcgggccctggggagggtcgtgagtgcagcccctctctacttctgtgcctttgtaaaacgtgtagataaccgcagtggttggctgagccaagaactctcctaaatcagtggctttctccccaccccttgctggggagtcatttttaaaaaaatctgtgggatataaaattggcctcctgctgcttcagcctacctctccctctgctgacttaatgtcgtgattctgtttcttcagatatttaaggctgttaggttgtgtgagccttgaagtgtgtgtgtgtgtcccagcgactgtccactgtccaggagatgcatgtctttgtattggagatatttctgtaactcattctcttggtgctcacgattgccatggccatagggccacagtgccgtatctgctgcagacatgattgtttcttgttctagaggttttcttgttttcgaatcttgcctgatgaatccagccagaccaaggggcctagatttgacctctgtcctgggctcctgggccaggtgcaggaacatctgaggccactctgctggccacctccagtgggtgctgaccacaggatgggctttgtttacactcattttcaccctgattcttgcccccactttcataaaagaaacttcaaaatgctgacgctttggagagtaagaaaatcaatcttggctgggcacggtggctcctgcctgtgatcctagcactttgggaggctgaagctgaaggatcacttgagctcaggagttggagaccaaccctggcaacataacaagaccctgtctctacaaaaaaaaaaaaaaaaaaaaaaaatttagccgtgtgtagcagtgagtgcctgtggtcccagctacttgggcctgaggctggaggattgcttgagcctagaagttgcagtgagctatgatcatgccacactgtactccagcctggatgacagagtgaaaccctgcctctaaataaaagaaaatagaggcagactgtggtggctcacgcctgtaatcccagcactttggtaggccaaggcgggtggatcacctgcagtcaggagttcacaaccagcctgaccaacatggtgaaaccctgtcta

SEQ ID NO: 18569 - DNA, 657 bp, Homo sapiens
  source 1..657: mol_type = unassigned DNA
atggatgagcagggctgtgaacacacctcccggactgaggacccgtttatccagcccacggacttcggtccctcagagccgccactgagtgtcccgccaccgcccatctcccccgtgttaccattagttcctcctcctgccactgccctgaaccccccggctccacccaccttccatcagccacagaagtttgctggagtcaacaaagcgccgtctgtcatcacccacacggcctctgccaccctcacccacgatgcccccgccaccacctttagccagagtcagggccttgtgatcaccacccatcaccctgccccgtcagcggccccttgtgggctggcactgtctcctgtcacccggcctccccagccacggttaacttttgtgcaccccaaacctgtatccttgactgggggcaggcctaagcagccccacaaaatagtgcctgctcccaaaccagagcccgtgtccttggtgttgaagaatgcccgtatcgccccaggtgagccaggcggggagactcagtgcggggctccccccgacccagagggatgttttcccatcccaaaggctttcaaacttgtgaccaccaccaccaccctggtgtgcacgtgcatgcgcacacacatacacttaaatgaaacaaaagtgtcatga

SEQ ID NO: 18570 - DNA, 5097 bp, Homo sapiens
  source 1..5097: mol_type = unassigned DNA
gtgcagaggcacgattccatccctcttttacagcatccttcagcacccatggggtgggagactcttggtccaggtgtgcttctgcctgagtgccaggtaacctatgtgcagctagctctgctccgactaattaacacagaattagctagacagagaagaaaaacatggattactaataaaaataacttctgtatatttctttcacgttttactaagcaatccaaaaagttgcttacaggtgcttggggctacagagctgagtgaggtaccattctttgtccttacggagccctcatgcttatgcccatgaccagttagacactggtaacctggcaccatcttcaaacgggctccgggaagaattgctactgcagagactgggatctgaaccattgattcctcgtagcttttcttatttaggaagaggtggcctgatgaccagttgacacgtgaaattgtcctcggggattcccgagcagctgcaatccaggctgcctctgctcagtaatagaagatggcagagactttggggagactctgctggactccagaaacaagatattcccaggctgctagccagctgtgtgagggccgttgccttatctgagctctgagttatttagtttttaatggaaacaagacccccgcagacacgcagggaaacacaaatccctatcagatcagcagccatggacgtggagacgtggcctttgtccctctgtcccagcgcccggcctgtgtagttggacttggcagtgtgcagcgctagaaaggaattgtctgaccccagcattgcttcctggctcctttcttcctttttcaggagagcatcctgccgaccacagccctccccactgtgagccttcctgacagcctcatcgcgccccctaccgccccatccctggctcacatggatgagcagggctgtgaacacacctcccggactgaggacccgtttatccagcccacggacttcggtccctcagagccgccactgagtgtcccgcagcccttcctccctgtcttcaccatgcccctgctgtctcccagccccgccccaccgcccatctcccccgtgttaccattagttcctcctcctgccactgccctgaaccccccggctccacccaccttccatcagccacagaagtttgctggagtcaacaaagcgccgtctgtcatcacccacacggcctctgccaccctcacccacgatgcccccgccaccacctttagccagagtcagggccttgtgatcaccacccatcaccctgccccgtcagcggccccttgtgggctggcactgtctcctgtcacccggcctccccagccacggttaacttttgtgcaccccaaacctgtatccttgactgggggcaggcctaagcagccccacaaaatagtgcctgctcccaaaccagagcccgtgtccttggtgttgaagaatgcccgtatcgccccagctgccttttcaggccaaccacaagcggtgatcatgacgtcagggcctctgaagagagaagggatgttggcctccaccgtgtcccagtccaacgtggtcattgcgcctgctgccatcgccagggctcctggggtcccggagttccacagcagcatcctggtgacagatctcggccatggcacgagcagcccgcctgcccccgtctcccggctcttcccaagcacagcgcaagaccccctggggaagggcgagcaggtcccgctgcatgggggcagcccccaggtcactgtcacagggcccagtcgggactgcccaaactcagggcaggcctctccgtgtgcatcggagcagagccccagtcctcaatctccccagaacaactgctcagggaaatccgaccccaaaaatgtggctgcactaaagaaccggcagatgaagcacatctcagctgagcagaaaaggcgcttcaacatcaagatgtgcttcgacatgctcaacagcctcatctccaacaattccaagctgaccagtcacgccatcacactgcagaagactgtggagtacatcaccaagctgcagcaggagagaggccagatgcaggaggaggcccggcggctgcgggaggagatcgaggagctcaatgccaccatcatctcctgccagcagctgctccctgccacgggagtccccgttacccggcgccagtttgatcacatgaaagacatgtttgacgaatacgtgaaaacccggaccttgcagaattggaagttctggattttcagcatcatcatcaagccgctgtttgagtcgttcaagggcatggtgtccaccagcagcctggaggagctgcaccggacggcgctctcctggctggaccagcactgctccctgcccatcctcaggccgatggtattgagcacgctgcggcagctgagcacctccacctccatcctcacagacccggcacagctgccagagcaggcgtccaaggctgtcaccaggattggcaagagattgggagagtcctagctgcttagctggcatgtggccgcatgagatgccaggagacccttccctgcccatggagagtaggctgcgccccccagcccttcctgacgctcagcctcggggcctctctccaactctgccggcccaccgtggcatcgggaggccatgctcaggtctgaagcaggtttggggcctgctgacagcaatagcccgcctttgggaaccccttgctgtgaactctctcactcagtgacctcagtcaccaacctcctctgccctcggggcagcccacacaaaagggaagtgctggccgtgctggtcctgccctgctggtggcctgccgggcctggcgccggtgagcggaatcgatgggatgagggtgacagggcctgctcctgtcctgaggcccagccttgtccctcctgccacgtcctgtccacatgcatgcctctgcctgatgccctgctccactctctggtctgcccgtggggcagttggaaggcgtctttctttctcccctcaactctgacagcacccagcccttgtggatggacttgggcttctattcaggcttatgcatggcaggctgccagggggaagtgccttcttcagaggtcctccaggacacatgtgtgcagaaacggtggatgtggaacacacaggaccagaatggaagcgtgtgatgcacggtggctgctctggctgagaggccctgctgggcatgtttcatctgtccccttttagctccacctgacattgcaggatccatggggactcagcccagggccttctcggatgtcacctcaccgctgtggcccttctgccgttcttctccacttggctccagctgcagctgttgacagatcaagcatgtcctgtgggagcttagaaccctgaagttctagtgtctgaaagatcagactccacgtcctgctgtcagccttgtcatcttgtctgatgtctttcagctgggagccccaaaccaggacagttctcggaccaaagatgcccccacactcaaaagtctgtcccgtcttgtgtttggagaaggaaacaatgttggcaggcagcactctgtggtggtcagccctcagagctgtttctaggcatctctcagatcagacagcaaagaatctacccagatctgggctgggtggaggtgtggctgggctgggggccattctgagcctgcagtgagagtttggcccagcctcagtccttgctcttctctggctacctctgcagggagctgcaggggcaagcactctctccagcactcaggaagcccggccgagggtacctcctcgtggaaagaatgcactttaaagctctgctgaggagttcggagcccaggctttcaggcgacctctgccctccctgcctctcctcaccctccctctcttcctgcagggcctgggaagggctttgagggagcctgggagccatgtgaagaggggcacgcctgggctgtcccacagtttagatccagttggaggttctccctggctcctgcaggcctgcggggatctctccccacttcaggcctccggccagctgcctgccctcttgtctgtgcttcagccctgcacaaaagcagcttggtgacaccactcagccacccagagtacgtgtttacaggctttccagatcaccttcctgtggggtgaacgtaatgaggcggggctggtccttggaatttcccctggaaaatggtaacagactccatccttgacccggggatgagcatgaaggcattgtcccaaaggcagaggccaccgtggtaggaattccaccaaggccagaagggaaaaaggaagaacccaccgtgtctggctgtgcgggccctggggagggtcgtgagtgcagcccctctctacttctgtgcctttgtaaaacgtgtagataaccgcagtggttggctgagccaagaactctcctaaatcagtggctttctccccaccccttgctggggagtcatttttaaaaaaatctgtgggatataaaattggcctcctgctgcttcagcctacctctccctctgctgacttaatgtcgtgattctgtttcttcagatatttaaggctgttaggttgtgtgagccttgaagtgtgtgtgtgtgtcccagcgactgtccactgtccaggagatgcatgtctttgtattggagatatttctgtaactcattctcttggtgctcacgattgccatggccatagggccacagtgccgtatctgctgcagacatgattgtttcttgttctagaggttttcttgttttcgaatcttgcctgatgaatccagccagaccaaggggcctagatttgacctctgtcctgggctcctgggccaggtgcaggaacatctgaggccactctgctggccacctccagtgggtgctgaccacaggatgggctttgtttacactcattttcaccctgattcttgcccccactttcataaaagaaacttcaaaatgctgacgctttggagagtaagaaaatcaatcttggctgggcacggtggctcctgcctgtgatcctagcactttgggaggctgaagctgaaggatcacttgagctcaggagttggagaccaaccctggcaacataacaagaccctgtctctac

SEQ ID NO: 18571 - DNA, 3278 bp, Homo sapiens
  source 1..3278: mol_type = unassigned DNA
ccccgcgctgcgcggagcagggaccaggcggttgcggcggcgacagccatggccggcgcgctggcaggtctggccgcgggcttgcaggtcccgcgggtcgcgcccagcccagactcggactcggacacagactcggaggacccgagtctccggcgcagcgcgggcggcttgctccgctcgcaggtcatccacagcggtcacttcatggtgtcgtcgccgcacagcgactcgctgccccggcggcgcgaccaggaggggtccgtggggccctccgacttcgggccgcgcagtatcgaccccacactcacacgcctcttcgagtgcttgagcctggcctacagtggcaagctggtgtctcccaagtggaagaatttcaaaggcctcaagctgctctgcagagacaagatccgcctgaacaacgccatctggagggcctggtatatccagtatgtgaagcggaggaagagccccgtgtgtggcttcgtgacccccctgcaggggcctgaggctgatgcgcaccggaagccggaggccgtggtcctggaggggaactactggaagcggcgcatcgaggtggtgatgcgggaataccacaagtggcgcatctactacaagaagcggctccgtaagcccagcagggaagatgacctcctggcccctaagcaggcggaaggcaggtggccgccgccggagcaatggtgcaaacagctcttctccagtgtggtccccgtgctgctgggggacccagaggaggagccgggtgggcggcagctcctggacctcaattgctttttgtccgacatctcagacactctcttcaccatgactcagtccggcccttcgcccctgcagctgccgcctgaggatgcctacgtcggcaatgctgacatgatccagccggacctgacgccactgcagccaagcctggatgacttcatggacatctcagatttctttaccaactcccgcctcccacagccgcccatgccttcaaacttcccagagccccccagcttcagccccgtggttgactccctcttcagcagtgggaccctgggcccagaggtgcccccggcttcctcggccatgacccacctctctggacacagccgtctgcaggctcggaacagctgccctggccccttggactccagcgccttcctgagttctgatttcctccttcctgaagaccccaagccccggctcccaccccctcctgtacccccacctctgctgcattaccctccccctgccaaggtgccaggcctggagccctgccccccacctcccttccctcccatggcaccacccactgctttgctgcaggaagagcctctcttctctcccaggtttcccttccccaccgtccctcctgccccaggagtgtctccgctgcctgctcctgcagccttcccacccaccccacagtctgtccccagcccagcccccacccccttccccatagagcttctacccttggggtattcggagcctgcctttgggccttgcttctccatgcccagaggcaagccccccgccccatcccctaggggacagaaagccagcccccctaccttagcccctgccactgccagtccccccaccactgcggggagcaacaacccctgcctcacacagctgctcacagcagctaagccggagcaagccctggagccaccacttgtatccagcaccctcctccggtccccagggtccccgcaggagacagtccctgaattcccctgcacattccttcccccgaccccggcccctacaccgccccggccacctccaggcccggccacattggccccttccaggcccctgcttgtccccaaagcggagcggctctcacccccagcgcccagcggcagtgaacggcggctgtcaggggacctcagctccatgccaggccctgggactctgagcgtccgtgtctctcccccgcaacccatcctcagccggggccgtccagacagcaacaagaccgagaaccggcgtatcacacacatctccgcggagcagaagcggcgcttcaacatcaagctggggtttgacacccttcatgggctcgtgagcacactcagtgcccagcccagcctcaaggtgagcaaagctaccacgctgcagaagacagctgagtacatccttatgctacagcaggagcgtgcgggcttgcaggaggaggcccagcagctgcgggatgagattgaggagctcaatgccgccattaacctgtgccagcagcagctgcccgccacaggggtacccatcacacaccagcgttttgaccagatgcgagacatgtttgatgactacgtccgaacccgtacgctgcacaactggaagttctgggtgttcagcatcctcatccggcctctgtttgagtccttcaacgggatggtgtccacggcaagtgtgcacaccctccgccagacctcactggcctggctggaccagtactgctctctgcccgctctccggccaactgtcctgaactccctacgccagctgggcacatctaccagtatcctgaccgacccgggccgcatccctgagcaagccacacgggcagtcacagagggcacccttggcaaacctttatagtcctggccagaccctgctgctcactcagctgccctgggggctgctttccctgggcacgggctccagggatcatctctgggcactcccttcctgccccaggccctggctctgcccttccctggggggtggagcagggtccaggtttcacacttgccacctcctggaggtcaagaagagcagagtccccgtccctgctctgccactgtgctccagcaccgtgaccttgggtgactcgtccgctgtctttggaccgctgtgtttcaatctgcaaaatggggatggggaaggttcaatcagcagatgacccccaggccttggcagctgtgacattgggggcctaggctggcaactccgggggctcaacggtggaaagaggaggatgctgtttctctgtcacctccacttgctccccgacaggtggggcacagacctctgttcctgagcagagaagcagaaaaggaggttccctctctctgctccttcactgctgacccagaggggctgcaggatggtttcccctgggagaggccaggagggcctgatcccaggagacaccagggccagagtgaccacagcagggcaggcatcatgtgtgtgtgtgtgtgtggatgtgtgtgtgtgggttttgtaaagaattcttgaccaataaaagcaaaaactgtctgctggtt

SEQ ID NO: 18572 - DNA, 3215 bp, Homo sapiens
  source 1..3215: mol_type = unassigned DNA
ccccgcgctgcgcggagcagggaccaggcggttgcggcggcgacagccatggccggcgcgctggcaggtctggccgcgggcttgcaggtcccgcgggtcgcgcccagcccagactcggactcggacacagactcggaggacccgagtctccggcgcagcgcgggcggcttgctccgctcgcaggtcatccacagcggtcacttcatggtgtcgtcgccgcacagcgactcgctgccccggcggcgcgaccaggaggggtccgtggggccctccgacttcgggccgcgcagtatcgaccccacactcacacgcctcttcgagtgcttgagcctggcctacagtggcaagctggtgtctcccaagtggaagaatttcaaaggcctcaagctgctctgcagagacaagatccgcctgaacaacgccatctggagggcctggtatatccagtatgtgaagcggaggaagagccccgtgtgtggcttcgtgacccccctgcaggggcctgaggctgatgcgcaccggaagccggaggccgtggtcctggaggggaactactggaagcggcgcatcgaggtggtgatgcgggaataccacaagtggcgcatctactacaagaagcggctccgtaagcccagcagggaagatgacctcctggcccctaagcaggcggaaggcaggtggccgccgccggagcaatggtgcaaacagctcttctccagtgtggtccccgtgctgctgggggacccagaggaggagccgggtgggcggcagctcctggacctcaattgctttttgtccgacatctcagacactctcttcaccatgactcagtccggcccttcgcccctgcagctgccgcctgaggatgcctacgtcggcaatgctgacatgatccagccggacctgacgccactgcagccaagcctggatgacttcatggacatctcagatttctttaccaactcccgcctcccacagccgcccatgccttcaaacttcccagagccccccagcttcagccccgtggttgactccctcttcagcagtgggaccctgggcccagaggtgcccccggcttcctcggccatgacccacctctctggacacagccgtctgcaggctcggaacagctgccctggccccttggactccagcgccttcctgagttctgatttcctccttcctgaagaccccaagccccggctcccaccccctcctgtacccccacctctgctgcattaccctccccctgccaaggtgccaggcctggagccctgccccccacctcccttccctcccatggcaccacccactgctttgctgcaggaagagcctctcttctctcccaggtttcccttccccaccgtccctcctgccccaggagtgtctccgctgcctgctcctgcagccttcccacccaccccacagtctgtccccagcccagcccccacccccttccccatagagcttctacccttggggtattcggagcctgcctttgggccttgcttctccatgcccagaggcaagccccccgccccatcccctaggggacagaaagccagcccccctaccttagcccctgccactgccagtccccccaccactgcggggagcaacaacccctgcctcacacagctgctcacagcagctaagccggagcaagccctggagccaccacttgtatccagcaccctcctccggtccccagggtccccgcaggagacagtccctgaattcccctgcacattccttcccccgaccccggcccctacaccgccccggccacctccaggcccggccacattggccccttccaggcccctgcttgtccccaaagcggagcggctctcacccccagcgcccagcggcagtgaacggcggctgtcaggggacctcagctccatgccaggccctgggactctgagcgtccgtgtctctcccccgcaacccatcctcagccggggccgtccagacagcaacaagaaccggcgtatcacacacatctccgcggagcagaagcggcgcttcaacatcaagctggggtttgacacccttcatgggctcgtgagcacactcagtgcccagcccagcctcaaggagcgtgcgggcttgcaggaggaggcccagcagctgcgggatgagattgaggagctcaatgccgccattaacctgtgccagcagcagctgcccgccacaggggtacccatcacacaccagcgttttgaccagatgcgagacatgtttgatgactacgtccgaacccgtacgctgcacaactggaagttctgggtgttcagcatcctcatccggcctctgtttgagtccttcaacgggatggtgtccacggcaagtgtgcacaccctccgccagacctcactggcctggctggaccagtactgctctctgcccgctctccggccaactgtcctgaactccctacgccagctgggcacatctaccagtatcctgaccgacccgggccgcatccctgagcaagccacacgggcagtcacagagggcacccttggcaaacctttatagtcctggccagaccctgctgctcactcagctgccctgggggctgctttccctgggcacgggctccagggatcatctctgggcactcccttcctgccccaggccctggctctgcccttccctggggggtggagcagggtccaggtttcacacttgccacctcctggaggtcaagaagagcagagtccccgtccctgctctgccactgtgctccagcaccgtgaccttgggtgactcgtccgctgtctttggaccgctgtgtttcaatctgcaaaatggggatggggaaggttcaatcagcagatgacccccaggccttggcagctgtgacattgggggcctaggctggcaactccgggggctcaacggtggaaagaggaggatgctgtttctctgtcacctccacttgctccccgacaggtggggcacagacctctgttcctgagcagagaagcagaaaaggaggttccctctctctgctccttcactgctgacccagaggggctgcaggatggtttcccctgggagaggccaggagggcctgatcccaggagacaccagggccagagtgaccacagcagggcaggcatcatgtgtgtgtgtgtgtgtggatgtgtgtgtgtgggttttgtaaagaattcttgaccaataaaagcaaaaactgtctgctggtt

SEQ ID NO: 18573 - DNA, 2999 bp, Homo sapiens
  source 1..2999: mol_type = unassigned DNA
ccccgcgctgcgcggagcagggaccaggcggttgcggcggcgacagccatggccggcgcgctggcaggtctggccgcgggcttgcaggtcccgcgggtcgcgcccagcccagactcggactcggacacagactcggaggacccgagtctccggcgcagcgcgggcggcttgctccgctcgcaggtcatccacagcggtcacttcatggtgtcgtcgccgcacagcgactcgctgccccggcggcgcgaccaggaggggtccgtggggccctccgacttcgggccgcgcagtatcgaccccacactcacacgcctcttcgagtgcttgagcctggcctacagtggcaagctggtgtctcccaagtggaagaatttcaaaggcctcaagctgctctgcagagacaagatccgcctgaacaacgccatctggagggcctggtatatccagtatgtgaagcggaggaagagccccgtgtgtggcttcgtgacccccctgcaggggcctgaggctgatgcgcaccggaagccggaggccgtggtcctggaggggaactactggaagcggcgcatcgagctgccgcctgaggatgcctacgtcggcaatgctgacatgatccagccggacctgacgccactgcagccaagcctggatgacttcatggacatctcagatttctttaccaactcccgcctcccacagccgcccatgccttcaaacttcccagagccccccagcttcagccccgtggttgactccctcttcagcagtgggaccctgggcccagaggtgcccccggcttcctcggccatgacccacctctctggacacagccgtctgcaggctcggaacagctgccctggccccttggactccagcgccttcctgagttctgatttcctccttcctgaagaccccaagccccggctcccaccccctcctgtacccccacctctgctgcattaccctccccctgccaaggtgccaggcctggagccctgccccccacctcccttccctcccatggcaccacccactgctttgctgcaggaagagcctctcttctctcccaggtttcccttccccaccgtccctcctgccccaggagtgtctccgctgcctgctcctgcagccttcccacccaccccacagtctgtccccagcccagcccccacccccttccccatagagcttctacccttggggtattcggagcctgcctttgggccttgcttctccatgcccagaggcaagccccccgccccatcccctaggggacagaaagccagcccccctaccttagcccctgccactgccagtccccccaccactgcggggagcaacaacccctgcctcacacagctgctcacagcagctaagccggagcaagccctggagccaccacttgtatccagcaccctcctccggtccccagggtccccgcaggagacagtccctgaattcccctgcacattccttcccccgaccccggcccctacaccgccccggccacctccaggcccggccacattggccccttccaggcccctgcttgtccccaaagcggagcggctctcacccccagcgcccagcggcagtgaacggcggctgtcaggggacctcagctccatgccaggccctgggactctgagcgtccgtgtctctcccccgcaacccatcctcagccggggccgtccagacagcaacaagaccgagaaccggcgtatcacacacatctccgcggagcagaagcggcgcttcaacatcaagctggggtttgacacccttcatgggctcgtgagcacactcagtgcccagcccagcctcaaggtgagcaaagctaccacgctgcagaagacagctgagtacatccttatgctacagcaggagcgtgcgggcttgcaggaggaggcccagcagctgcgggatgagattgaggagctcaatgccgccattaacctgtgccagcagcagctgcccgccacaggggtacccatcacacaccagcgttttgaccagatgcgagacatgtttgatgactacgtccgaacccgtacgctgcacaactggaagttctgggtgttcagcatcctcatccggcctctgtttgagtccttcaacgggatggtgtccacggcaagtgtgcacaccctccgccagacctcactggcctggctggaccagtactgctctctgcccgctctccggccaactgtcctgaactccctacgccagctgggcacatctaccagtatcctgaccgacccgggccgcatccctgagcaagccacacgggcagtcacagagggcacccttggcaaacctttatagtcctggccagaccctgctgctcactcagctgccctgggggctgctttccctgggcacgggctccagggatcatctctgggcactcccttcctgccccaggccctggctctgcccttccctggggggtggagcagggtccaggtttcacacttgccacctcctggaggtcaagaagagcagagtccccgtccctgctctgccactgtgctccagcaccgtgaccttgggtgactcgtccgctgtctttggaccgctgtgtttcaatctgcaaaatggggatggggaaggttcaatcagcagatgacccccaggccttggcagctgtgacattgggggcctaggctggcaactccgggggctcaacggtggaaagaggaggatgctgtttctctgtcacctccacttgctccccgacaggtggggcacagacctctgttcctgagcagagaagcagaaaaggaggttccctctctctgctccttcactgctgacccagaggggctgcaggatggtttcccctgggagaggccaggagggcctgatcccaggagacaccagggccagagtgaccacagcagggcaggcatcatgtgtgtgtgtgtgtgtggatgtgtgtgtgtgggttttgtaaagaattcttgaccaataaaagcaaaaactgtctgctggtt

SEQ ID NO: 18574 - DNA, 3224 bp, Homo sapiens
  source 1..3224: mol_type = unassigned DNA
atggccggcgcgctggcaggtctggccgcgggcttgcaggtcccgcgggtcgcgcccagcccagactcggactcggacacagactcggaggacccgagtctccggcgcagcgcgggcggcttgctccgctcgcaggtcatccacagcggtcacttcatggtgtcgtcgccgcacagcgactcgctgccccggcggcgcgaccaggaggggtccgtggggccctccgacttcgggccgcgcagtatcgaccccacactcacacgcctcttcgagtgcttgagcctggcctacagtggcaagctggtgtctcccaagtggaagaatttcaaaggcctcaagctgctctgcagagacaagatccgcctgaacaacgccatctggagggcctggtatatccagtatgtgaagcggaggaagagccccgtgtgtggcttcgtgacccccctgcaggggcctgaggctgatgcgcaccggaagccggaggccgtggtcctggaggggaactactggaagcggcgcatcgaggtggtgatgcgggaataccacaagtggcgcatctactacaagaagcggctccgtaagcccagcagggaagatgacctcctggcccctaagcaggcggaaggcaggtggccgccgccggagcaatggtgcaaacagctcttctccagtgtggtccccgtgctgctgggggacccagaggaggagccgggtgggcggcagctcctggacctcaattgctttttgtccgacatctcagacactctcttcaccatgactcagtccggcccttcgcccctgcagctgccgcctgaggatgcctacgtcggcaatgctgacatgatccagccggacctgacgccactgcagccaagcctggatgacttcatggacatctcagatttctttaccaactcccgcctcccacagccgcccatgccttcaaacttcccagagccccccagcttcagccccgtggttgactccctcttcagcagtgggaccctgggcccagaggtgcccccggcttcctcggccatgacccacctctctggacacagccgtctgcaggctcggaacagctgccctggccccttggactccagcgccttcctgagttctgatttcctccttcctgaagaccccaagccccggctcccaccccctcctgtacccccacctctgctgcattaccctccccctgccaaggtgccaggcctggagccctgccccccacctcccttccctcccatggcaccacccactgctttgctgcaggaagagcctctcttctctcccaggtttcccttccccaccgtccctcctgccccaggagtgtctccgctgcctgctcctgcagccttcccacccaccccacagtctgtccccagcccagcccccacccccttccccatagagcttctacccttggggtattcggagcctgcctttgggccttgcttctccatgcccagaggcaagccccccgccccatcccctaggggacagaaagccagcccccctaccttagcccctgccactgccagtccccccaccactgcggggagcaacaacccctgcctcacacagctgctcacagcagctaagccggagcaagccctggagccaccacttgtatccagcaccctcctccggtccccagggtccccgcaggagacagtccctgaattcccctgcacattccttcccccgaccccggcccctacaccgccccggccacctccaggcccggccacattggccccttccaggcccctgcttgtccccaaagcggagcggctctcacccccagcgcccagcggcagtgaacggcggctgtcaggggacctcagctccatgccaggccctgggactctgagcgtccgtgtctctcccccgcaacccatcctcagccggggccgtccagacagcaacaagaaccggcgtatcacacacatctccgcggagcagaagcggcgcttcaacatcaagctggggtttgacacccttcatgggctcgtgagcacactcagtgcccagcccagcctcaaggtgagcaaagctaccacgctgcagaagacagctgagtacatccttatgctacagcaggagcgtgcgggcttgcaggaggaggcccagcagctgcgggatgagattgaggagctcaatgccgccattaacctgtgccagcagcagctgcccgccacaggggtacccatcacacaccagcgttttgaccagatgcgagacatgtttgatgactacgtccgaacccgtacgctgcacaactggaagttctgggtgttcagcatcctcatccggcctctgtttgagtccttcaacgggatggtgtccacggcaagtgtgcacaccctccgccagacctcactggcctggctggaccagtactgctctctgcccgctctccggccaactgtcctgaactccctacgccagctgggcacatctaccagtatcctgaccgacccgggccgcatccctgagcaagccacacgggcagtcacagagggcacccttggcaaacctttatagtcctggccagaccctgctgctcactcagctgccctgggggctgctttccctgggcacgggctccagggatcatctctgggcactcccttcctgccccaggccctggctctgcccttccctggggggtggagcagggtccaggtttcacacttgccacctcctggaggtcaagaagagcagagtccccgtccctgctctgccactgtgctccagcaccgtgaccttgggtgactcgtccgctgtctttggaccgctgtgtttcaatctgcaaaatggggatggggaaggttcaatcagcagatgacccccaggccttggcagctgtgacattgggggcctaggctggcaactccgggggctcaacggtggaaagaggaggatgctgtttctctgtcacctccacttgctccccgacaggtggggcacagacctctgttcctgagcagagaagcagaaaaggaggttccctctctctgctccttcactgctgacccagaggggctgcaggatggtttcccctgggagaggccaggagggcctgatcccaggagacaccagggccagagtgaccacagcagggcaggcatcatgtgtgtgtgtgtgtgtggatgtgtgtgtgtgggttttgtaaagaattcttgaccaataaaagcaaaaactgtctgctggtt

SEQ ID NO: 18575 - DNA, 3173 bp, Homo sapiens
  source 1..3173: mol_type = unassigned DNA
atggccggcgcgctggcaggtctggccgcgggcttgcaggtcccgcgggtcgcgcccagcccagactcggactcggacacagactcggaggacccgagtctccggcgcagcgcgggcggcttgctccgctcgcaggtcatccacagcggtcacttcatggtgtcgtcgccgcacagcgactcgctgccccggcggcgcgaccaggaggggtccgtggggccctccgacttcgggccgcgcagtatcgaccccacactcacacgcctcttcgagtgcttgagcctggcctacagtggcaagctggtgtctcccaagtggaagaatttcaaaggcctcaagctgctctgcagagacaagatccgcctgaacaacgccatctggagggcctggtatatccagtatgtgaagcggaggaagagccccgtgtgtggcttcgtgacccccctgcaggggcctgaggctgatgcgcaccggaagccggaggccgtggtcctggaggggaactactggaagcggcgcatcgaggtggtgatgcgggaataccacaagtggcgcatctactacaagaagcggctccgtaagcccagcagggaagatgacctcctggcccctaagcaggcggaaggcaggtggccgccgccggagcaatggtgcaaacagctcttctccagtgtggtccccgtgctgctgggggacccagaggaggagccgggtgggcggcagctcctggacctcaattgctttttgtccgacatctcagacactctcttcaccatgactcagtccggcccttcgcccctgcagctgccgcctgaggatgcctacgtcggcaatgctgacatgatccagccggacctgacgccactgcagccaagcctggatgacttcatggacatctcagatttctttaccaactcccgcctcccacagccgcccatgccttcaaacttcccagagccccccagcttcagccccgtggttgactccctcttcagcagtgggaccctgggcccagaggtgcccccggcttcctcggccatgacccacctctctggacacagccgtctgcaggctcggaacagctgccctggccccttggactccagcgccttcctgagttctgatttcctccttcctgaagaccccaagccccggctcccaccccctcctgtacccccacctctgctgcattaccctccccctgccaaggtgccaggcctggagccctgccccccacctcccttccctcccatggcaccacccactgctttgctgcaggaagagcctctcttctctcccaggtttcccttccccaccgtccctcctgccccaggagtgtctccgctgcctgctcctgcagccttcccacccaccccacagtctgtccccagcccagcccccacccccttccccatagagcttctacccttggggtattcggagcctgcctttgggccttgcttctccatgcccagaggcaagccccccgccccatcccctaggggacagaaagccagcccccctaccttagcccctgccactgccagtccccccaccactgcggggagcaacaacccctgcctcacacagctgctcacagcagctaagccggagcaagccctggagccaccacttgtatccagcaccctcctccggtccccagggtccccgcaggagacagtccctgaattcccctgcacattccttcccccgaccccggcccctacaccgccccggccacctccaggcccggccacattggccccttccaggcccctgcttgtccccaaagcggagcggctctcacccccagcgcccagcggcagtgaacggcggctgtcaggggacctcagctccatgccaggccctgggactctgagcgtccgtgtctctcccccgcaacccatcctcagccggggccgtccagacagcaacaagaccgagaaccggcgtatcacacacatctccgcggagcagaagcggcgcttcaacatcaagctggggtttgacacccttcatgggctcgtgagcacactcagtgcccagcccagcctcaaggagcgtgcgggcttgcaggaggaggcccagcagctgcgggatgagattgaggagctcaatgccgccattaacctgtgccagcagcagctgcccgccacaggggtacccatcacacaccagcgttttgaccagatgcgagacatgtttgatgactacgtccgaacccgtacgctgcacaactggaagttctgggtgttcagcatcctcatccggcctctgtttgagtccttcaacgggatggtgtccacggcaagtgtgcacaccctccgccagacctcactggcctggctggaccagtactgctctctgcccgctctccggccaactgtcctgaactccctacgccagctgggcacatctaccagtatcctgaccgacccgggccgcatccctgagcaagccacacgggcagtcacagagggcacccttggcaaacctttatagtcctggccagaccctgctgctcactcagctgccctgggggctgctttccctgggcacgggctccagggatcatctctgggcactcccttcctgccccaggccctggctctgcccttccctggggggtggagcagggtccaggtttcacacttgccacctcctggaggtcaagaagagcagagtccccgtccctgctctgccactgtgctccagcaccgtgaccttgggtgactcgtccgctgtctttggaccgctgtgtttcaatctgcaaaatggggatggggaaggttcaatcagcagatgacccccaggccttggcagctgtgacattgggggcctaggctggcaactccgggggctcaacggtggaaagaggaggatgctgtttctctgtcacctccacttgctccccgacaggtggggcacagacctctgttcctgagcagagaagcagaaaaggaggttccctctctctgctccttcactgctgacccagaggggctgcaggatggtttcccctgggagaggccaggagggcctgatcccaggagacaccagggccagagtgaccacagcagggcaggcatcatgtgtgtgtgtgtgtgtggatgtgtgtgtgtgggttttgtaaagaattcttgaccaataaaagcaaaaactgtctgctggtt

SEQ ID NO: 18576 - DNA, 3847 bp, Homo sapiens
  source 1..3847: mol_type = unassigned DNA
gactcggcgggcccggggctccccggcagcggctcctctgctaggggttaacagcagcccccgcggccgggcgggcgcggacgcttcctctccacccgcccgggaacgtggataccgcgcccgcaggatgttcgccggctgggaccggcagtcaggaaacatgagaaggcctcgctattcctgttcccgggcggcgcgcgccgggctgggtaaataaagccgagacgacggcggtggcggtggtgagcgcgctggagcccgcgtggagaacatgcggcggggatgggagtgcgcctagtctcgaggcgggagagccagccgccctgcagccggccgtcggccccgcagccacagccgagccccgctgcggagctcccggcggcccagccccgaggctctgcggccgcgccgcgcgtccctaccaaccgacaccatgaacaccatcgtcttcaacaagctcagcggtgcggtgctgtttgaggacggaggcgcctcggagcgggagcggggtggccggccctacagcggtgtcctggacagtcctcacgcccgccccgaggtgggcattcccgacggcccgcccctcaaggacaacctcggcctgagacaccggaggaccggcgcccggcagaatggcgggaaggtgaggcacaagcggcaggccctgcaagacatggcgcgacccctcaagcagtggctttacaagcaccgtgacaacccgtaccccaccaagaccgagaagatactcttggccctcggctcgcagatgacgctagtgcaggtgtcaaattggtttgctaatgcaagacgtcggcttaagaataccgttcgacagccagatttaagctgggctttgagaataaagttatacaacaagtatgttcaaggcaatgctgaacggcttagcgtaagcagtgatgactcatgttctgaagatggagaaaatcctccaagaacccacatgaacgaagggggctataataccccagttcaccatcctgtgattaaaagtgagaattcggtcatcaaagcgggagtgaggccagagtcacgggccagtgaggactacgtggcaccccccaaatacaagagcagcttgttgaaccgttaccttaatgactctttgagacatgtcatggccacgaacactaccatgatgggaaaaacaaggcaaagaaaccactcgggatcttttagctccaatgaatttgaggaagaattagtgtctccatcgtcatcagaaactgaaggcaactttgtctatcgcacagacactctggaaaacggatccaataagggtgaaagcgcagctaacagaaaaggaccaagcaaggatgacacgtattggaaggagatcaacgcagctatggccttaacaaatcttgcacagggaaaggacaaactgcagggaactaccagctgcatcatccagaagtcgtcccatatagcagaagtaaagactgtcaaagtgccgctggtgcagcagttttaagagcttgttgcttttcagatccaatggatgttctttccggtgttttcatcaaccctcatcctaagagccgaagcagggatgaaaatgactctctcccaaacctcttcttatttttaattatcccaaatatatcatttagttgcttctataaaagacatataaattataaaaaactcattttaatcaaaaatattaacttattttatgttactcaaactatgcataaaacatctgcattaccattacagtaagtgccttgcttcccgacaataagctccaacgtgggcatagttgaacaagctatgcctcaaaatgccaacgccatatgcttattagcctgtgtgcatcattccagacgggcctaatcattccaggactgaaaccagaatcgctgaaagcccttgaaatacattcaataattcatatgttaaaacttggatatctgttcagcccaaatgaaatcttccttttaaaaaacgtctacattattgaaaattgttcaatgtgcttttcagagtgacggtgagaattttatgcatgtatcttgcctgcatatttgatatgttacaaacttccaaaattcaaggtgcagcgatccacagaacgttgtacatttaagaagtgattccttcaagctaatttaaaatttcattgaacacatggtgaccaggaaaactttttttcaagcactgttggaaagcaccacaaagccctttagaattaatctggatttgtttctcaagttctgctgaagtttaaaaaaaaactttattatacaaataactcaaaattttcctgtgtaaaactaaacctgtagttttaaaacataatcctgtttgcattagagctcactgtctttttgtgatggaaactgtgttcgtatggaatgactaaaaatcttttatttggtttgtttcaaattacaattgctgatggacaatttgtattgcagcgagaacaacagaatgaaagaaatgtatctctgtgcggctatacatatacatacataaaattgatttttaaatttaaaacatatggaaaacaaaacattgaacagtttgaattttgccaagttggacattaaagtaaaaatgaagtgaaatcatgcattgaaagaaaacattttgtttctaaattagtctaccattgagtgagaataatcaatatcaagaaagaagactatctttctcaactaaacaataatattccaatcagcttgggaagacctgaaacttgaataagcagtggaaatgccaaatataacagagggtatgtgctacagagaagtaaaaagggtttgactttttatgatgggattttttttttctgggtatgtaatctattttttttttaaactggaaagcatttttgtcagtgtgaatgagggtcaatagtgcagccagtggtgacatttttctttattttgcaaaatgcttttaaaaccaaaggctgctctagttgatggacagtatcagtcttgatctaaattgtaggacactttttcatgtaacataacatttggggattgggtttatttagtgtaatgaagataatttgatataaaaatattttgtgtatatatatatatttttactttgttttctaaattgctgtttgcagtaacagtaagcgcaaagcaaaatatataagttatgactgtatgatcagatgaagtatgagttcttttggtttgcatccttaaatagttagagatctctgataaaaactttggaatctttgcaaaacaatacaaaaatgccaaaatgtgagcatgtcaatgaaaactaaagacaaatacttcactctttttcatactattataagttattctggtattaaatatgttaataaaagtgtttttgttttgacatatttcagttaaatgaatgaatgctggttgtattttatttgaatgagtcatgattcatgtttgccatctttttaaaaaaatcagcaaatttcttctatgttataaattatagatgacaaggcaatataggacaactattcacatgattttttttaataccaaaggttggaagattttataattaacatgtcaagaagactttatagtaagcacatccttggtaatatctccaattgcaatgactttttaatttattttttcttttgctgctttaacattttctggatattaaaatccccccagtcctttaaaagaatcttgaacaatgctgagccggcagctgaaaatctaactcataatttatgttgtagagaaatagaattacctctattctttgttttgccatatgtaatcattttaataaaattaataactgccaggagttcttgacagatttaaaataaaagttaatttctagacctcga

SEQ ID NO: 18577 - DNA, 3638 bp, Homo sapiens
  source 1..3638: mol_type = unassigned DNA
aaataaagccgagacgacggcggtggcggtggtgagcgcgctggagcccgcgtggagaacatgcggcggggatgggagtgcgcctagtctcgaggcgggagagccagccgccctgcagccggccgtcggccccgcagccacagaagccgagccccgctgcggagctcccggcggcccagccccgaggctctgcggccgcgccgcgcgtccctaccaaccgacaccatgaacaccatcgtcttcaacaagctcagcggtgcggtgctgtttgaggacggaggcgcctcggagcgggagcggggtggccggccctacagcggtgtcctggacagtcctcacgcccgccccgaggtgggcattcccgacggcccgcccctcaaggacaacctcggcctgagacaccggaggaccggcgcccggcagaatggcgggaaggtgaggcacaagcggcaggccctgcaagacatggcgcgacccctcaagcagtggctttacaagcaccgtgacaacccgtaccccaccaagaccgagaagatactcttggccctcggctcgcagatgacgctagtgcaggtgtcaaattggtttgctaatgcaagacgtcggcttaagaataccgttcgacagccagatttaagctgggctttgagaataaagttatacaacaagtatgttcaaggcaatgctgaacggcttagcgtaagcagtgatgactcatgttctgaagatggagaaaatcctccaagaacccacatgaacgaagggggctataataccccagttcaccatcctgtgattaaaagtgagaattcggtcatcaaagcgggagtgaggccagagtcacgggccagtgaggactacgtggcaccccccaaatacaagagcagcttgttgaaccgttaccttaatgactctttgagacatgtcatggccacgaacactaccatgatgggaaaaacaaggcaaagaaaccactcgggatcttttagctccaatgaatttgaggaagaattagtgtctccatcgtcatcagaaactgaaggcaactttgtctatcgcacagacactctggaaaacggatccaataagggtgaaagcgcagctaacagaaaaggaccaagcaaggatgacacgtattggaaggagatcaacgcagctatggccttaacaaatcttgcacagggaaaggacaaactgcagggaactaccagctgcatcatccagaagtcgtcccatatagcagaagtaaagactgtcaaagtgccgctggtgcagcagttttaagagcttgttgcttttcagatccaatggatgttctttccggtgttttcatcaaccctcatcctaagagccgaagcagggatgaaaatgactctctcccaaacctcttcttatttttaattatcccaaatatatcatttagttgcttctataaaagacatataaattataaaaaactcattttaatcaaaaatattaacttattttatgttactcaaactatgcataaaacatctgcattaccattacagtaagtgccttgcttcccgacaataagctccaacgtgggcatagttgaacaagctatgcctcaaaatgccaacgccatatgcttattagcctgtgtgcatcattccagacgggcctaatcattccaggactgaaaccagaatcgctgaaagcccttgaaatacattcaataattcatatgttaaaacttggatatctgttcagcccaaatgaaatcttccttttaaaaaacgtctacattattgaaaattgttcaatgtgcttttcagagtgacggtgagaattttatgcatgtatcttgcctgcatatttgatatgttacaaacttccaaaattcaaggtgcagcgatccacagaacgttgtacatttaagaagtgattccttcaagctaatttaaaatttcattgaacacatggtgaccaggaaaactttttttcaagcactgttggaaagcaccacaaagccctttagaattaatctggatttgtttctcaagttctgctgaagtttaaaaaaaaactttattatacaaataactcaaaattttcctgtgtaaaactaaacctgtagttttaaaacataatcctgtttgcattagagctcactgtctttttgtgatggaaactgtgttcgtatggaatgactaaaaatcttttatttggtttgtttcaaattacaattgctgatggacaatttgtattgcagcgagaacaacagaatgaaagaaatgtatctctgtgcggctatacatatacatacataaaattgatttttaaatttaaaacatatggaaaacaaaacattgaacagtttgaattttgccaagttggacattaaagtaaaaatgaagtgaaatcatgcattgaaagaaaacattttgtttctaaattagtctaccattgagtgagaataatcaatatcaagaaagaagactatctttctcaactaaacaataatattccaatcagcttgggaagacctgaaacttgaataagcagtggaaatgccaaatataacagagggtatgtgctacagagaagtaaaaagggtttgactttttatgatgggattttttttttctgggtatgtaatctattttttttttaaactggaaagcatttttgtcagtgtgaatgagggtcaatagtgcagccagtggtgacatttttctttattttgcaaaatgcttttaaaaccaaaggctgctctagttgatggacagtatcagtcttgatctaaattgtaggacactttttcatgtaacataacatttggggattgggtttatttagtgtaatgaagataatttgatataaaaatattttgtgtatatatatatatttttactttgttttctaaattgctgtttgcagtaacagtaagcgcaaagcaaaatatataagttatgactgtatgatcagatgaagtatgagttcttttggtttgcatccttaaatagttagagatctctgataaaaactttggaatctttgcaaaacaatacaaaaatgccaaaatgtgagcatgtcaatgaaaactaaagacaaatacttcactctttttcatactattataagttattctggtattaaatatgttaataaaagtgtttttgttttgacatatttcagttaaatgaatgaatgctggttgtattttatttgaatgagtcatgattcatgtttgccatctttttaaaaaaatcagcaaatttcttctatgttataaattatagatgacaaggcaatataggacaactattcacatgattttttttaataccaaaggttggaagattttataattaacatgtcaagaagactttatagtaagcacatccttggtaatatctccaattgcaatgactttttaatttattttttcttttgctgctttaacattttctggatattaaaatccccccagtcctttaaaagaatcttgaacaatgctgagccggcagctgaaaatctaactcataatttatgttgtagagaaatagaattacctctattctttgttttgccatatgtaatcattttaataaaattaataactgccaggagttcttgacagatttaaaataaaagttaatttctagacctcg

SEQ ID NO: 18578 - DNA, 431 bp, Homo sapiens
  source 1..431: mol_type = unassigned DNA
aaggtctggtggagaggcgctcgggtagcggccaaggctggcccaagggtctgcgcggagcttgggagcccacctggccgcgcctcctttgctttaaaattattcgccggcgttgggggagggggacacttctgcagggagtgacctccccggccacagtctggagtgaatcgggaagccgagccccgctgcggagctcccggcggcccagccccgaggctctgcggccgcgccgcgcgtccctaccaaccgacaccatgaacaccatcgtcttcaacaagctcagcggtgcggtgctgtttgaggacggaggcgcctcggagcgggagcggggtggccggccctacagcggtgtcctggacagtcctcacgcccgccccgaggtgggcattcccgacggcccgcccctcaaggacaacctcggcctgaga

SEQ ID NO: 18579 - DNA, 1216 bp, Homo sapiens
  source 1..1216: mol_type = unassigned DNA
cgcatgcgcaggcgacagctcatggcgttcagggcctgacggttgctagggtgacagggacacaacatggcggcgggatctctaacgctctccttcgagggaccaccacggagatcctagtgcgggaccccgcctcagggaagtggaaagcagggggacaaccttcctgcttctttcttttccgtccagtgtcggcaaggggttgtcaccggcttccgcatccaagatgaagaactataaagcaattggcaaaataggagagggaacgttttctgaagttatgaagatgcaaagcctgagagatggaaactactatgcatgtaaacaaatgaagcagcgctttgaaagtattgagcaagtcaacaacctacgagagatccaagcactgaggcgcctgaatccgcacccaaacattcttatgttgcatgaagtggtttttgacagaaaatctggttctcttgcactaatatgtgaacttatggacatgaatatttatgagctaatacgagggagaagatacccattatcagaaaaaaaaattatgcactatatgtaccagttatgtaagtccctggatcatattcacagaaatggaatatttcacagagatgtaaaaccagaaaatatactaataaagcaggatgtcctgaaattaggggactttggctcctgccggagtgtctattccaagcagccgtacacggaatacatctccacccgctggtaccgggccccggagtgtctcctcactgatgggttctacacgtacaagatggacctgtggagcgccggctgtgtgttctacgagatcgccagtctgcagcccctctttcctggagtaaatgaactggaccaaatctcaaaaatccacgatgtcatcggcacacccgctcagaagatcctcaccaagttcaaacagtcgagagctatgaattttgattttccttttaaaaagggatcaggaatacctctactaacaaccaatttgtccccacaatgcctctccctcctgcacgcaatggtggcctatgatcccgatgagagaatcgccgcccaccaggccctgcagcacccctacttccaagaacagagaacccagaacggaagcgaggatgaggcctcagccgtcctcctccccattcaaacacgttcatccctcaaccctctgctgagcacctgcatgctgcccggccgcagtgtcacccttcttgtgtga

SEQ ID NO: 18580 - DNA, 1940 bp, Homo sapiens
  source 1..1940: mol_type = unassigned DNA
atcttgcgcatgcgcaggcgacagctcatggcgttcagggcctgacggttgctagggtgacagggacacaacatggcggcgggatctctaacgctctccttcgagggaccaccacggagatcctagtgcgggaccccgcctcagggaagtggaaagcagggggacaaccttcctgcttctttcttttccgtccagtgtcggcaaggggttgtcaccggcttccgcatccaagatgaagaactataaagcaattggcaaaataggagagggaacgttttctgaagttatgaagatgcaaagcctgagagatggaaactactatgcatgtaaacaaatgaagcagcgctttgaaagtattgagcaagtcaacaacctacgagagatccaagcactgaggcgcctgaatccgcacccaaacattcttatgttgcatgaagtggtttttgacagaaaatctggttctcttgcactaatatgtgaacttatggacatgaatatttatgagctaatacgagggagaagatacccattatcagaaaaaaaaattatgcactatatgtaccagttatgtaagtccctggatcatattcacagaaatggaatatttcacagagatgtaaaaccagaaaatatactaataaagcaggatgtcctgaaattaggggactttggctcctgccggagtgtctattccaagcagccgtacacggaatacatctccacccgctggtaccgggccccggagtgtctcctcactgatgggttctacacgtacaagatggacctgtggagcgccggctgtgtgttctacgagatcgccagtctgcagcccctctttcctggagtaaatgaactggaccaaatctcaaaaatccacgatgtcatcggcacacccgctcagaagatcctcaccaagttcaaacagtcgagagctatgaattttgattttccttttaaaaagggatcaggaatacctctactaacaaccaatttgtccccacaatgcctctccctcctgcacgcaatggtggcctatgatcccgatgagagaatcgccgcccaccaggccctgcagcacccctacttccaagaacagaggaaaacagagaagcgggctctgggcagccacagaaaagctggctttccggagcaccctgtggcaccggaaccactcagtaacagctgccagatttccaaggagggcagaaagcagaaacagtccctaaagcaagaggaggaccgtcccaagagacgaggaccggcctatgtcatggaactgcccaaactaaagctttcgggagtggtcagactgtcgtcttactccagccccacgctgcagtccgtgcttggatctggaacaaatggaagagtgccggtgctgagacccttgaagtgcatccctgcgagcaagaagacagatccgcagaaggaccttaagcctgccccgcagcagtgtcgcctgcccaccatagtgcggaaaggcggaagataactgagcagcaccgtcgtctcgacttcggaggcaacaccaagcccgaccgggccaggcctgggtgatctgctgctgagacgccacggagggctggggatgcgcctgcgtccgtttcgcgctggccggggctctgggtgctgccctgcgccctgccgcacccgcggcccgcgcagctgcctaggatgttctgggctaatatacttgtaaaaccaccgcattctagggttttctttcattttcgttaagaatttggggcaggaaatactttgtaactttgtatatgaatcaaaacaaacgagcaggcatttctgtgatgtgttgggcgtggttggaaggtgggttctgcgtgtcccttcccagcgctgctggtcagtcgtggagcgccatcatgtcttaccagtgacgctgctgacacccctgacttttattaaagaataagctgtcgtta

SEQ ID NO: 18581 - DNA, 6160 bp, Homo sapiens
  source 1..6160: mol_type = unassigned DNA
ctggatggactagccggggccatggccggcgcggcggcggagtcagggcgggagctgtggaccttcgcgggttcccgggacccgagcgcaccgcggctagcctacggctacggcccgggcagcctgcgcgagctgcgggcgcgcgagttcagccgcctggcaggaactgtctatcttgaccatgcaggtgccaccttgttctcccagagccagctcgaaagcttcactagtgatctcatggaaaacacttatggtaatcctcacagccagaacatcagcagcaagctcacccatgacactgtggagcaggtgcgctacagaatcctggcgcacttccacaccaccgcagaagactacactgtgatcttcactgccgggagcacggctgctctcaaactggtggcagaggcctttccatgggtgtcccagggcccagagagcagtgggagtcgcttctgttacctcaccgacagccacacctccgtagtgggtatgcggaacgtgaccatggctataaatgtcatatccaccccggtcaggccagaggacctgtggtctgcagaggaacgtagtgcttcagccagcaacccagactgccagctgccgcatctcttctgctacccagctcagagtaacttttctggagtcagataccccctgtcctggatagaagaggtcaagtctgggcggttgcaccctgtgagcacgcctgggaagtggtttgtgctgctggatgcagcctcctacgtgagcacctcgcctttggacctgtcagctcaccaggccgactttgtccccatctccttctataagatcttcgggtttcctacaggcctgggcgctctgctggtccataatcgtgcggctcctctactgaggaagacctactttggaggagggacagcctctgcgtacctagcaggagaagacttctacatcccgaggcagtcggtagctcagaggtttgaagatggcaccatctcattccttgatgttatcgcgctaaaacatggatttgacaccctagagcgcctcacaggtggaatggagaatataaagcagcacaccttcaccttggctcagtatacctacgtggccctgtcctctctccagtaccccaatggagcccctgtggtgcggatttacagcgattctgagttcagcagccctgaggttcagggcccaatcatcaattttaatgtgctggatgacaaagggaacatcattggttactcccaggtggacaaaatggccagtctttacaacatccacctgcgaactggctgcttctgtaacactggggcctgccagaggcacctgggcataagcaacgagatggtcaggaagcattttcaggctggtcatgtctgtggggacaatatggacctcatagatgggcagcccacaggatctgtgaggatttcatttggatacatgtcgacgctggatgatgtccaggcctttcttaggttcatcatagacactcgcctgcactcatcaggggactggcctgtccctcaggcccatgctgacaccggggagactggagccccatcagcagacagccaggctgatgttatacctgctgtcatgggcagacgtagcctctcgcctcaggaagatgccctcacaggctccagggtttggaacaactcgtctactgtgaatgctgtgcctgtggccccacctgtgtgtgatgtcgccagaacccagccgactccttcagagaaagctgcaggagtcctggagggggcccttgggccacatgttgtcactaacctttatctctatccaatcaaatcctgtgctgcatttgaggtgaccaggtggcctgtaggaaaccaagggctgctatatgaccggagctggatggttgtgaatcacaatggtgtttgcctgagtcagaagcaggaaccccggctctgcctgatccagcccttcatcgacttgcggcaaaggatcatggtcatcaaagccaaagggatggagcctatagaggtgcctcttgaggaaaatagtgaacggactcagattcgccaaagcagggtctgtgctgacagagtaagtacttatgattgtggagaaaaaatttcaagctggttgtcaacattttttggccgtccttgtcatttgatcaaacaaagttcaaactctcaaaggaatgcaaagaagaaacatggaaaagatcaacttcctggtacaatggccaccctttctctggtgaatgaggcacagtatctgctgatcaacacatccagtattttggaacttcaccggcaactaaacaccagtgatgagaatggaaaggaggaattattctcactgaaggatctcagcttgcgttttcgtgccaatattattatcaatggaaaaagggcttttgaagaagagaaatgggatgagatttcaattggctctttgcgtttccaggttttggggccttgtcacagatgccagatgatttgcatcgaccagcaaactgggcaacgaaaccagcatgttttccaaaaactttctgagagtcgtgaaacaaaggtgaactttggcatgtacctgatgcatgcatcattggatttatcctccccatgtttcctgtctgtaggatctcaggtgctccctgtgttgaaagagaatgtggaaggtcatgatttacctgcatctgagaaacaccaggatgttacctcctaaaaaaaatttttagcataaagtttctcttttacagtgatctctattattgttaagatctgcaacttggttcagtagaacttgatgttttgaataaggagagctctttttctttagaggcagggaatgctctcacctgcttccttctgcctttgacttctcaccctgcaaatttgcactggctgtgctcaggagagcacttctgaggcctcaggaacgaatgctgcacccacatccagtgaggctcctgtaggtatttgaagtataatcacttgtaatcagatgaaatttttaatgaagttcactgggaagattgaacttactgcgggtccctattttgccattttctcacattgttactttgtttttagagagcatctttggatctctccaacccgtttgtagtgaggaagggagtctatgcccagtgatcctgggtatgagaaggtgctcctctcctcccatgtacatgatggtgtgggtttatgctcaggggcccagagggtaacttgtgaccacattccttgaggggagtttctaccagaatatttatattctgagcaaaggcacaggccagcaattcctttcctgttgcttcccatccctggcctccgtcctcatcccccactgagttgatgcactgaggatggctcacgagcctgaagttacactcagtgatggctgtgcttatgcaggttgtcatcctcccctccacaagcccacaggatggtgttggtccatcacccgagagcctccaaatcctatcgagggaggaactttggcattcaggaatcctgtctgtatcatctttgaccactgctcctgcagcctccagatgaaaatgtccagtgaggaaatctcattctctaatgaagttacccatcccgctgagtttctaagaagtttctccctgtgcggagcttgtgtgtgccttatctgcttctgcatgacttccagcctggggtcttaccctgtcctctggagcaatgcagagtgagtacatccactccacattcattctgctggcgtccttctgaagcctgctgtccatgtgtgaacccagtcccttcatcatcttccccctggatggttgtatttttccagtcacttctcccccaaatgtctgcctgctgcagcccactgcatcttttgaaagcctgtgccaccccatctctcctgctgctcagttggagagcaggctccaggctcaggcttccctaatgtatctgttcagagcctgtgggattcagggtcagtttgtttcattatcacatttgtaggactttgtgttgttcccagcactaggtgagatttgaaagatgaggtgtgctctgttctcaaggattgttgagatggagcctaatgattgcacactcacgtgctgtgaagagttaagggtaaaaagtacaactctgactctggttcctgagatcaccgaaagaagaggcaaatgaagttaggtggggtggggtggggtttattgttttgaactgtttattaaaaacgcaacctcttcaaagactcagcactgccacatcatatgagtggacttgtcctcatcagctaactgataggagaacaatgccctaaagtaatggatttatccacctactcaggccagtttcatgcaggagggaactttccagatggcacattgccccatttccaagaccttccgctgacaaatgcatcatattaattatgatggaaaacaagtaagaaggcatgctctacaaaaattaggtcacttgcccaggtgcggtggctcacacctgtaattccagcactttgggaggctgacgtgggcagatcatgaggtcaggagatcgagaccatcctggctaacacggtgaaaccccgtctctactaaaatacaaaaaattagctgggcatggtggcatgcacctgtagtcccagctacttgggaggctgaggcaggggaatcgcttgaacccgggaggcggaggttgcagtgagccgagatcatgccactgcacaccggcctggtgacagagcaagactccatctcaaaaaaaaaaaaaaaaaaattaggtcacttttgtcatcaagaatatgtttttcttatccacgtctatgtcaccttttgcagtagatactttcatgactgatttcaggctttttgtttttttgagacagggtctcactctgtcacccaggctggagtgcagtggcatgatcacagatcattgcagccttgacctcttgggctcaagcgattcccctgcctcagcctcccaagtagctgggactacaggcacacatcaccacatccagctaattttttttttcttttttttctttttggtagagatggcatctcactttgttgcccaggctagttttgaattcctgggctcaagccatcctcccgccacagcctcccaaagttctgggattacaagtgtgagccactgtgcccagcttttgatttcagacattttaatgcagatcctctcctttacagcactattatttggttatctacttataattactgatttaacattgatctgttttcactagactgtaagctccatgaggacaagtcctgtgccagtatatctctagtgtcagcagacaatactcaaaatttgttgacagactatttaaagctgcccctatttttatcattaattgattgaatattaattaaatatattttattaatttaaaatgaattttaaatgcattttttctttagtgtctaccttcaatatttcttgtatgaagtttcagctaaaaatgtactttgtgtatctgtagagtggcttcatattcagagtttatggacatttatgattttatgtcccctccttggttcttatctcctggagttcagccttatgtgcttctcaaagtgtataacaaaatcaaagacaatgtcatgtcccttgaatttaattctaacaccaaaccttggtgttagagtcacaaaaagtccttttttaaaaaaacttggtgagaacagacaataacttgtctttctgggcattcgcgtcatggtccttttagccagaagagaggttttcttttgcatagtttggtgagcatcaagaatcctttaaggagggtggcggtgctgacttctccccattgagagtcagcctcatcccctcctcagccttgtggatggagaagaacaggcagtgatatacattttctgctgttgaaagatgtccgcttatccttctctttcagtgaaaagttgcttttttattcaatatgtactgaacaggttctagagtttcagaaacaaaagaaacagaaccaacatttatagatctcactatagaggcatcactaattggggaaagacagactaggtaatagtcagatgtgatatagtatgtttaagctataggatggcaggtgcatgagtgttggttgtattattctttatttttttgtatgacttatgatattcatgataattaaaacgttttggaacaattca

SEQ ID NO: 18582 - DNA, 4096 bp, Homo sapiens
  source 1..4096: mol_type = unassigned DNA
gcgtcctcgcctattggctgcgcgggtcccgccctccccctgcccctccccgcccttgctgggatgaccccgggggcgagtgcccggccagtgtgctcccgaagcgggctgcggttccgctcgtatcaggcttcatggcggcgcggccactgtcccggatgctgcggcggcttctgaggtccagcgcccggagctgcagctcaggggctccggtgacccagccctgccccggggagtccgcgcgagctgcctcggaggaggtgtccaggcggaggcagttcctgcgggagcatgcggcccccttctccgccttcctcacagacagcttcggccggcagcacagctacctgcggatctccctcacagagaagtgcaacctcagatgtcagtactgcatgcccgaggagggggtcccgctgacccccaaagccaacctgctgaccacagaggagatcctgaccctcgcccggctctttgtgaaggaaggcatcgacaagatccggctcacaggtggagagccgcttatccggccggacgtggtggacattgtggcccagctccagcggctggaagggctgagaaccataggtgttaccaccaatggcatcaacctggcccggctactgccccagcttcagaaggctggtctcagtgccatcaacatcagcctggacaccctggtgcctgccaagtttgagttcattgtccgcaggaaaggcttccacaaggtcatggagggcatccacaaggccatcgagctgggctacaaccctgtgaaggtgaactgtgtggtgatgcgaggccttaacgaggatgaactcctggactttgcggccttgactgagggcctccccctggatgtgcgcttcatagagtatatgccctttgatggcaacaagtggaacttcaagaagatggtcagctataaggagatgctagacactgtccggcagcagtggccagagctggagaaggtgccagaggaggaatccagcacagccaaggcctttaaaatccctggcttccaaggccagatcagcttcatcacatccatgtctgagcatttctgtgggacctgcaaccgcctgcgaatcacagctgatgggaacctcaaggtctgcctctttggaaactctgaggtatccctgcgggatcacctgcgagctggggcctctgagcaggagctgctgagaatcattggggctgctgtgggcaggaagaagcggcagcatgcagagttatttttgatgttccccaattccccaccagccaatccaagcattttctcctgggacccgctccatgttcagggtctaagacccagaatgagtttctccagccaggtggccactttatggaaaggatgcagggtcccccagacccctcctctagcccagcagcggctggggtctggctcctttcagagacactacacttcccgtgcagactcagatgccaactcaaagtgccttagcccaggttcctgggcttctgctgccccctcaggaccccagctaacctcagaacaactaactcatgtggactcggaaggacgggcagctatggtagatgtgggcaggaagccagacacagagcgggtggctgtggcttcagccgtggtcctcctgggaccggtagccttcaagcttgtccagcagaaccagctcaagaaaggagatgccctagtggtggcccagctggctggagtccaggcagccaaggtgaccagccagctgatccctctgtgccaccacgtggccctgagccacatccaggtgcagctggagctggacagcacacgccatgccgtgaagatccaggcatcttgccgggctcggggccccaccggggtggagatggaggccctgacctctgctgcagtggccgccctcaccctgtatgacatgtgcaaggctgtcagcagggacatcgtgttggaggagatcaagctcattagcaagactggtggtcagcggggggacttccatcgggcttagcacctgcccttctcacccatggcccacccaggcctggagctgggatgcaatgtaggctgagggaaagacgtcaggttcctttaatcacagtcactgtttgtttaccttgagcagtaaacccgaagtcagcctgctctactactaacaaacaggcctgctgctagatgatctctaatgaccaatggggcttcctttctatagggaggataccagcaggcccttaagccttccaggacactaaggtcgtgggagcgggactgcaacaagcaatgccagataactgagaaatcatgttctttgtggactatttcagacaaccaggttccgacagtccagcccagaacttttccttctcattttgggttttctcttctcctgctttcctggggagagattaagcgctcattaagcagaggagcccactttgaggagagcaaagcacaagcttgcctgaagaatggatcccaacttctccccggcagctctgcctccctaagtctgtgaagccgcagccctgccctgtcctgtcctgtcctgacttcatctctccttctgcccaagtctgtgtcccatcagacttgcagcctttcagcttaacagttgcccggtcctgctggccccttttcctctggcccccctcttctgaaacaggatgtgcacacatgggccatagccctaaggactcctgccagaccacacagcccacacctggccctgttcacggctgttccacccacccctctttattctggagcatatcagggaaagaaaagttgatgatagattgccttcaccctcacagcgcacaaataaagctacgatgccaactttgcagatgcaagaatgaagacactgtgtgggtagggcactgagctgctgcagtttcacagggaaggctgcacctatcaatcaatcaatcaatcctatcccaagacacagttccctgagggaagaagaggagggacctggaaaggcctaagggtgtactctctgtatagccccgctatgggaaaataaagtggagtagggggcatagaaatgcaccatctaagggaaatcttttgtcaggtggtggccaggggtgttcaaagctcattgcttgcattaccagctattagagagatcagagagggcaattaattagaggctcctggttctcacatcccaaacacacacagttctggcctgctgggctctctaacttggatgtctttgagtcctcagtggtgccccctgcctgcctcccctctgccctatgccaaggtgtgctggcaaatattaaacaaccagctctctggaaaagacaatttgtgatataaatactcccatgttgaataatttcaagctaccagtatgtcaaatggcttgcaaaatttctgaaaatgtaaacaattggttctcacagagctggtacaagctggctccagcacactctcagcccaccccagatcccctcataggaagaaggcacaagtttaaaggcagactgggtagggatggtatgaatttaatattttttagtattacaatatattcttataaaaaaggtgcaagtgaaaaaggacactgtagattatgtccattagcctcatttgtcatctgaggcagctggtgagaacagccttggcgtgaaggcatccctggtagaagtcgggggagatagatagtcacagttccccagttggtggaaatgggatgggagtagggagaggctggaacagacccttccccattcacctggagaattttctcctcccactgccctaaacactttatttccatcacaggggagaaatgctgctgagaaggttgtgtttgttaggttgatgacgaattttacattggccacaaaattagctagagaaacttatctaaaggtggcaggagcagtggggagggcatgaagaaagcaagaccaagaaacaacctattaaggaccagctcagccaccccgactgggcaccagccccttcttactcagttgagtatgagtccatggtccaaggcactgttggagatctggctacagtggcatctagcaccagagccactggccagatgtagaaaataaatagaaaaatatctttcttttagagtga

SEQ ID NO: 18583 - DNA, 2747 bp, Homo sapiens
  source 1..2747: mol_type = unassigned DNA
cttcatggcggcgcggccactgtcccggatgctgcggcggcttctgaggtccagcgcccggagctgcagctcaggggctccggtgacccagccctgccccggggagtccgcgcgagctgcctcggaggaggtgtccaggcggaggcagttcctgcgggagcatgcggcccccttctccgccttcctcacagacagcttcggccggcagcacagctacctgcggatctccctcacagagaagtgcaacctcagatgtcagtactgcatgcccgaggagggggtcccgctgacccccaaagccaacctgctgaccacagaggagatcctgaccctcgcccggctctttgtgaaggaaggcatcgacaagatccggctcacaggtggagagccgcttatccggccggacgtggtggacattgtggcccagctccagcggctggaagggctgagaaccataggtgttaccaccaatggcatcaacctggcccggctactgccccagcttcagaaggctggtctcagtgccatcaacatcagcctggacaccctggtgcctgccaagtttgagttcattgtccgcaggaaaggcttccacaaggtcatggagggcatccacaaggccatcgagctgggctacaaccctgtgaaggtgaactgtgtggtgatgcgaggccttaacgaggatgaactcctggactttgcggccttgactgagggcctccccctggatgtgcgcttcatagagtatatgccctttgatggcaacaagtggaacttcaagaagatggtcagctataaggagatgctagacactgtccggcagcagtggccagagctggagaaggtgccagaggaggaatccagcacagccaaggcctttaaaatccctggcttccaaggccagatcagcttcatcacatccatgtctgagcatttctgtgggacctgcaaccgcctgcgaatcacagctgatgggaacctcaaggtctgcctctttggaaactctgaggtatccctgcgggatcacctgcgagctggggcctctgagcaggagctgctgagaatcattggggctgctgtgggcaggaagaagcggcagcatgcaggcatgttcagtatttcccagatgaagaaccggcccatgatcctcatcgagttatttttgatgttccccaattccccaccagccaatccaagcattttctcctgggacccgctccatgttcagggtctaagacccagaatgagtttctccagccaggtggccactttatggaaaggatgcagggtcccccagacccctcctctagcccagcagcggctggggtctggctcctttcagagacactacacttcccgtgcagactcagatgccaactcaaagtgccttagcccaggttcctgggcttctgctgccccctcaggaccccagctaacctcagaacaactaactcatgtggactcggaaggacgggcagctatggtagatgtgggcaggaagccagacacagagcgggtggctgtggcttcagccgtggtcctcctgggaccggtagccttcaagcttgtccagcagaaccagctcaagaaaggagatgccctagtggtggcccagctggctggagtccaggcagccaaggtgaccagccagctgatccctctgtgccaccacgtggccctgagccacatccaggtgcagctggagctggacagcacacgccatgccgtgaagatccaggcatcttgccgggctcggggccccaccggggtggagatggaggccctgacctctgctgcagtggccgccctcaccctgtatgacatgtgcaaggctgtcagcagggacatcgtgttggaggagatcaagctcattagcaagactggtggtcagcggggggacttccatcgggcttagcacctgcccttctcacccatggcccacccaggcctggagctgggatgcaatgtaggctgagggaaagacgtcaggttcctttaatcacagtcactgtttgtttaccttgagcagtaaacccgaagtcagcctgctctactactaacaaacaggcctgctgctagatgatctctaatgaccaatggggcttcctttctatagggaggataccagcaggcccttaagccttccaggacactaaggtcgtgggagcgggactgcaacaagcaatgccagataactgagaaatcatgttctttgtggactatttcagacaaccaggttccgacagtccagcccagaacttttccttctcattttgggttttctcttctcctgctttcctggggagagattaagcgctcattaagcagaggagcccactttgaggagagcaaagcacaagcttgcctgaagaatggatcccaacttctccccggcagctctgcctccctaagtctgtgaagccgcagccctgccctgtcctgtcctgtcctgacttcatctctccttctgcccaagtctgtgtcccatcagacttgcagcctttcagcttaacagttgcccggtcctgctggccccttttcctctggcccccctcttctgaaacaggatgtgcacacatgggccatagccctaaggactcctgccagaccacacagcccacacctggccctgttcacggctgttccacccacccctctttattctggagcatatcagggaaagaaaagttgatgatagattgccttcaccctcacagcgcacaaataaagctacgatgccaactttg

SEQ ID NO: 18584 - DNA, 1334 bp, Homo sapiens
  source 1..1334: mol_type = unassigned DNA
gcgtcctcgcctattggctgcgcgggtcccgccctccccctgcccctccccgcccttgctgggatgaccccgggggcgagtgcccggccagtgtgctcccgaagcgggctgcggttccgctcgtatcaggcttcatggcggcgcggccactgtcccggatgctgcggcggcttctgaggtccagcgcccggagctgcagctcaggggctccggtgacccagccctgccccggggagtccgcgcgagctgcctcggaggaggtgtccaggcggaggcagttcctgcgggagcatgcggcccccttctccgccttcctcacagacagcttcggccggcagcacagctacctgcggatctccctcacagagaagtgcaacctcagatgtcagtactgcatgcccgaggagggggtcccgctgacccccaaagccaacctgctgaccacagaggagatcctgaccctcgcccggctctttgtgaaggaaggcatcgacaagatccggctcacaggtggagagccgcttatccggccggacgtggtggacattgtggcccagctccagcggctggaagggctgagaaccataggtgttaccaccaatggcatcaacctggcccggctactgccccagcttcagaaggctggtctcagtgccatcaacatcagcctggacaccctggtgcctgccaagtttgagttcattgtccgcaggaaaggcttccacaaggtcatggagggcatccacaaggccatcgagctgggctacaaccctgtgaaggtgaactgtgtggtgatgcgaggccttaacgaggatgaactcctggactttgcggccttgactgagggcctccccctggatgtgcgcttcatagagtatatgccctttgatggcaacaagtggaacttcaagaagatggtcagctataaggagatgctagacactgtccggcagcagtggccagagctggagaaggtgccagaggaggaatccagcacagccaaggcctttaaaatccctggcttccaaggccagatcagcttcatcacatccatcttaacagttgcccggtcctgctggccccttttcctctggcccccctcttctgaaacaggatgtgcacacatgggccatagccctaaggactcctgccagaccacacagcccacacctggccctgttcacggctgttccacccacccctctttattctggagcatatcagggaaagaaaagttgatgatagattgccttcaccctcacagcgcacaaataaagctacgatgccaactttgcagatgcaagaatgaagacactgtgtgggtagggcactga

SEQ ID NO: 18585 - DNA, 3938 bp, Homo sapiens
  source 1..3938: mol_type = unassigned DNA
atgtggaagagttggaagctccgcacagatgtcagagaggtgtccaggcggaggcagttcctgcgggagcatgcggcccccttctccgccttcctcacagacagcttcggccggcagcacagctacctgcggatctccctcacagagaagtgcaacctcagatgtcagtactgcatgcccgaggagggggtcccgctgacccccaaagccaacctgctgaccacagaggagatcctgaccctcgcccggctctttgtgaaggaaggcatcgacaagatccggctcacaggtggagagccgcttatccggccggacgtggtggacattgtggcccagctccagcggctggaagggctgagaaccataggtgttaccaccaatggcatcaacctggcccggctactgccccagcttcagaaggctggtctcagtgccatcaacatcagcctggacaccctggtgcctgccaagtttgagttcattgtccgcaggaaaggcttccacaaggtcatggagggcatccacaaggccatcgagctgggctacaaccctgtgaaggtgaactgtgtggtgatgcgaggccttaacgaggatgaactcctggactttgcggccttgactgagggcctccccctggatgtgcgcttcatagagtatatgccctttgatggcaacaagtggaacttcaagaagatggtcagctataaggagatgctagacactgtccggcagcagtggccagagctggagaaggtgccagaggaggaatccagcacagccaaggcctttaaaatccctggcttccaaggccagatcagcttcatcacatccatgtctgagcatttctgtgggacctgcaaccgcctgcgaatcacagctgatgggaacctcaaggtctgcctctttggaaactctgaggtatccctgcgggatcacctgcgagctggggcctctgagcaggagctgctgagaatcattggggctgctgtgggcaggaagaagcggcagcatgcaggcatgttcagtatttcccagatgaagaaccggcccatgatcctcatcggtgggtgacccatcaagttatttttgatgttccccaattccccaccagccaatccaagcattttctcctgggacccgctccatgttcagggtctaagacccagaatgagtttctccagccaggtggccactttatggaaaggatgcagggtcccccagacccctcctctagcccagcagcggctggggtctggctcctttcagagacactacacttcccgtgcagactcagatgccaactcaaagtgccttagcccaggttcctgggcttctgctgccccctcaggaccccagctaacctcagaacaactaactcatgtggactcggaaggacgggcagctatggtagatgtgggcaggaagccagacacagagcgggtggctgtggcttcagccgtggtcctcctgggaccggtagccttcaagcttgtccagcagaaccagctcaagaaaggagatgccctagtggtggcccagctggctggagtccaggcagccaaggtgaccagccagctgatccctctgtgccaccacgtggccctgagccacatccaggtgcagctggagctggacagcacacgccatgccgtgaagatccaggcatcttgccgggctcggggccccaccggggtggagatggaggccctgacctctgctgcagtggccgccctcaccctgtatgacatgtgcaaggctgtcagcagggacatcgtgttggaggagatcaagctcattagcaagactggtggtcagcggggggacttccatcgggcttagcacctgcccttctcacccatggcccacccaggcctggagctgggatgcaatgtaggctgagggaaagacgtcaggttcctttaatcacagtcactgtttgtttaccttgagcagtaaacccgaagtcagcctgctctactactaacaaacaggcctgctgctagatgatctctaatgaccaatggggcttcctttctatagggaggataccagcaggcccttaagccttccaggacactaaggtcgtgggagcgggactgcaacaagcaatgccagataactgagaaatcatgttctttgtggactatttcagacaaccaggttccgacagtccagcccagaacttttccttctcattttgggttttctcttctcctgctttcctggggagagattaagcgctcattaagcagaggagcccactttgaggagagcaaagcacaagcttgcctgaagaatggatcccaacttctccccggcagctctgcctccctaagtctgtgaagccgcagccctgccctgtcctgtcctgtcctgacttcatctctccttctgcccaagtctgtgtcccatcagacttgcagcctttcagcttaacagttgcccggtcctgctggccccttttcctctggcccccctcttctgaaacaggatgtgcacacatgggccatagccctaaggactcctgccagaccacacagcccacacctggccctgttcacggctgttccacccacccctctttattctggagcatatcagggaaagaaaagttgatgatagattgccttcaccctcacagcgcacaaataaagctacgatgccaactttgcagatgcaagaatgaagacactgtgtgggtagggcactgagctgctgcagtttcacagggaaggctgcacctatcaatcaatcaatcaatcctatcccaagacacagttccctgagggaagaagaggagggacctggaaaggcctaagggtgtactctctgtatagccccgctatgggaaaataaagtggagtagggggcatagaaatgcaccatctaagggaaatcttttgtcaggtggtggccaggggtgttcaaagctcattgcttgcattaccagctattagagagatcagagagggcaattaattagaggctcctggttctcacatcccaaacacacacagttctggcctgctgggctctctaacttggatgtctttgagtcctcagtggtgccccctgcctgcctcccctctgccctatgccaaggtgtgctggcaaatattaaacaaccagctctctggaaaagacaatttgtgatataaatactcccatgttgaataatttcaagctaccagtatgtcaaatggcttgcaaaatttctgaaaatgtaaacaattggttctcacagagctggtacaagctggctccagcacactctcagcccaccccagatcccctcataggaagaaggcacaagtttaaaggcagactgggtagggatggtatgaatttaatattttttagtattacaatatattcttataaaaaaggtgcaagtgaaaaaggacactgtagattatgtccattagcctcatttgtcatctgaggcagctggtgagaacagccttggcgtgaaggcatccctggtagaagtcgggggagatagatagtcacagttccccagttggtggaaatgggatgggagtagggagaggctggaacagacccttccccattcacctggagaattttctcctcccactgccctaaacactttatttccatcacaggggagaaatgctgctgagaaggttgtgtttgttaggttgatgacgaattttacattggccacaaaattagctagagaaacttatctaaaggtggcaggagcagtggggagggcatgaagaaagcaagaccaagaaacaacctattaaggaccagctcagccaccccgactgggcaccagccccttcttactcagttgagtatgagtccatggtccaaggcactgttggagatctggctacagtggcatctagcaccagagccactggccagatgtagaaaataaatagaaaaatatctttcttttagagtga

SEQ ID NO: 18586 - DNA, 4256 bp, Homo sapiens
  source 1..4256: mol_type = unassigned DNA
gccagaaatcttcccagtagagatcaccatccgcccccgacccccaagctgaatacttaaggggtgggtccttcccatcaagctgatttctcaacgagagggacaatcccagcttccccaacattgcagagcccaaacatgtggaagagttggaagctccgcacagatgtcagagtaagggagggggcaggcggttctccttgtgcctcttcccagcccggtagcaggggcccatgcttcctccctggtctgtcctcgcaggaggtgtccaggcggaggcagttcctgcgggagcatgcggcccccttctccgccttcctcacagacagcttcggccggcagcacagctacctgcggatctccctcacagagaagtgcaacctcagatgtcagtactgcatgcccgaggagggggtcccgctgacccccaaagccaacctgctgaccacagaggagatcctgaccctcgcccggctctttgtgaaggaaggcatcgacaagatccggctcacaggtggagagccgcttatccggccggacgtggtggacattgtggcccagctccagcggctggaagggctgagaaccataggtgttaccaccaatggcatcaacctggcccggctactgccccagcttcagaaggctggtctcagtgccatcaacatcagcctggacaccctggtgcctgccaagtttgagttcattgtccgcaggaaaggcttccacaaggtcatggagggcatccacaaggccatcgagctgggctacaaccctgtgaaggtgaactgtgtggtgatgcgaggccttaacgaggatgaactcctggactttgcggccttgactgagggcctccccctggatgtgcgcttcatagagtatatgccctttgatggcaacaagtggaacttcaagaagatggtcagctataaggagatgctagacactgtccggcagcagtggccagagctggagaaggtgccagaggaggaatccagcacagccaaggcctttaaaatccctggcttccaaggccagatcagcttcatcacatccatgtctgagcatttctgtgggacctgcaaccgcctgcgaatcacagctgatgggaacctcaaggtctgcctctttggaaactctgaggtatccctgcgggatcacctgcgagctggggcctctgagcaggagctgctgagaatcattggggctgctgtgggcaggaagaagcggcagcatgcaggcatgttcagtatttcccagatgaagaaccggcccatgatcctcatcggtgggtgacccatcaagttatttttgatgttccccaattccccaccagccaatccaagcattttctcctgggacccgctccatgttcagggtctaagacccagaatgagtttctccagccaggtggccactttatggaaaggatgcagggtcccccagacccctcctctagcccagcagcggctggggtctggctcctttcagagacactacacttcccgtgcagactcagatgccaactcaaagtgccttagcccaggttcctgggcttctgctgccccctcaggaccccagctaacctcagaacaactaactcatgtggactcggaaggacgggcagctatggtagatgtgggcaggaagccagacacagagcgggtggctgtggcttcagccgtggtcctcctgggaccggtagccttcaagcttgtccagcagaaccagctcaagaaaggagatgccctagtggtggcccagctggctggagtccaggcagccaaggtgaccagccagctgatccctctgtgccaccacgtggccctgagccacatccaggtgcagctggagctggacagcacacgccatgccgtgaagatccaggcatcttgccgggctcggggccccaccggggtggagatggaggccctgacctctgctgcagtggccgccctcaccctgtatgacatgtgcaaggctgtcagcagggacatcgtgttggaggagatcaagctcattagcaagactggtggtcagcggggggacttccatcgggcttagcacctgcccttctcacccatggcccacccaggcctggagctgggatgcaatgtaggctgagggaaagacgtcaggttcctttaatcacagtcactgtttgtttaccttgagcagtaaacccgaagtcagcctgctctactactaacaaacaggcctgctgctagatgatctctaatgaccaatggggcttcctttctatagggaggataccagcaggcccttaagccttccaggacactaaggtcgtgggagcgggactgcaacaagcaatgccagataactgagaaatcatgttctttgtggactatttcagacaaccaggttccgacagtccagcccagaacttttccttctcattttgggttttctcttctcctgctttcctggggagagattaagcgctcattaagcagaggagcccactttgaggagagcaaagcacaagcttgcctgaagaatggatcccaacttctccccggcagctctgcctccctaagtctgtgaagccgcagccctgccctgtcctgtcctgtcctgacttcatctctccttctgcccaagtctgtgtcccatcagacttgcagcctttcagcttaacagttgcccggtcctgctggccccttttcctctggcccccctcttctgaaacaggatgtgcacacatgggccatagccctaaggactcctgccagaccacacagcccacacctggccctgttcacggctgttccacccacccctctttattctggagcatatcagggaaagaaaagttgatgatagattgccttcaccctcacagcgcacaaataaagctacgatgccaactttgcagatgcaagaatgaagacactgtgtgggtagggcactgagctgctgcagtttcacagggaaggctgcacctatcaatcaatcaatcaatcctatcccaagacacagttccctgagggaagaagaggagggacctggaaaggcctaagggtgtactctctgtatagccccgctatgggaaaataaagtggagtagggggcatagaaatgcaccatctaagggaaatcttttgtcaggtggtggccaggggtgttcaaagctcattgcttgcattaccagctattagagagatcagagagggcaattaattagaggctcctggttctcacatcccaaacacacacagttctggcctgctgggctctctaacttggatgtctttgagtcctcagtggtgccccctgcctgcctcccctctgccctatgccaaggtgtgctggcaaatattaaacaaccagctctctggaaaagacaatttgtgatataaatactcccatgttgaataatttcaagctaccagtatgtcaaatggcttgcaaaatttctgaaaatgtaaacaattggttctcacagagctggtacaagctggctccagcacactctcagcccaccccagatcccctcataggaagaaggcacaagtttaaaggcagactgggtagggatggtatgaatttaatattttttagtattacaatatattcttataaaaaaggtgcaagtgaaaaaggacactgtagattatgtccattagcctcatttgtcatctgaggcagctggtgagaacagccttggcgtgaaggcatccctggtagaagtcgggggagatagatagtcacagttccccagttggtggaaatgggatgggagtagggagaggctggaacagacccttccccattcacctggagaattttctcctcccactgccctaaacactttatttccatcacaggggagaaatgctgctgagaaggttgtgtttgttaggttgatgacgaattttacattggccacaaaattagctagagaaacttatctaaaggtggcaggagcagtggggagggcatgaagaaagcaagaccaagaaacaacctattaaggaccagctcagccaccccgactgggcaccagccccttcttactcagttgagtatgagtccatggtccaaggcactgttggagatctggctacagtggcatctagcaccagagccactggccagatgtagaaaataaatagaaaaatatctttcttttagagtgagaaggctgagctctggaacaacgtatttgtgtcctctgtcaacagttgaaccaaattctgcttttctgaagatcaaatgtatcttgaacagct

SEQ ID NO: 18587 - DNA, 3358 bp, Homo sapiens
  source 1..3358: mol_type = unassigned DNA
gcgtcctcgcctattggctgcgcgggtcccgccctccccctgcccctccccgcccttgctgggatgaccccgggggcgagtgcccggccagtgtgctcccgaagcgggctgcggttccgctcgtatcaggcttcatggcggcgcggccactgtcccggatgctgcggcggcttctgaggtccagcgcccggagctgcagctcaggggctccggtgacccagccctgccccggggagtccgcgcgagctgcctcggaggaggtgtccaggcggaggcagttcctgcgggagcatgcggcccccttctccgccttcctcacagacagcttcggccggcagcacagctacctgcggatctccctcacagagaagtgcaacctcagatgtcagtactgcatgcccgaggagggggtcccgctgacccccaaagccaacctgctgaccacagaggagatcctgaccctcgcccggctctttgtgaaggaaggcatcgacaagatccggctcacaggtggagagccgcttatccggccggacgtggtggacattgtggcccagctccagcggctggaagggctgagaaccataggtgttaccaccaatggcatcaacctggcccggctactgccccagcttcagaaggctggtctcagtgccatcaacatcagcctggacaccctggtgcctgccaagtttgagttcattgtccgcaggaaaggcttccacaaggtcatggagggcatccacaaggccatcgagctgggctacaaccctgtgaaggtgaactgtgtggtgatgcgaggccttaacgaggatgaactcctggactttgcggccttgactgagggcctccccctggatgtgcgcttcatagagtatatgccctttgatggcaacaagtggaacttcaagaagatggtcagctataaggagatgctagacactgtccggcagcagtggccagagctggagaaggtgccagaggaggaatccagcacagccaaggcctttaaaatccctggcttccaaggccagatcagcttcatcacatccatgtctgagcatttctgtgggacctgcaaccgcctgcgaatcacagctgatgggaacctcaaggtctgcctctttggaaactctgaggtatccctgcgggatcacctgcgagctggggcctctgagcaggagctgctgagaatcattggggctgctgtgggcaggaagaagcggcagcatgcaggcatgttcagtatttcccagatgaagaaccggcccatgatcctcatcggtgggtgacccatcaagttatttttgatgttccccaattccccaccagccaatccaagcattttctcctgggacccgctccatgttcagggtctaagacccagaatgagtttctccagccaggtggccactttatggaaaggatgcagggtcccccagacccctcctctagcccagcagcggctggggtctggctcctttcagagacactacacttcccgtgcagactcagatgccaactcaaagtgccttagcccaggttcctgggcttctgctgccccctcaggaccccagctaacctcagaacaactaactcatgtggactcggaaggacgggcagctatggtagatgtgggcaggaagccagacacagagcgggtggctgtggcttcagccgtggtcctcctgggaccggtagccttcaagcttgtccagcagaaccagctcaagaaaggagatgccctagtggtggcccagctggctggagtccaggcagccaaggtgaccagccagctgatccctctgtgccaccacgtggccctgagccacatccaggtgcagctggagctggacagcacacgccatgccgtgaagatccaggcatcttgccgggctcggggccccaccggggtggagatggaggccctgacctctgctgcagtggccgccctcaccctgtatgacatgtgcaaggctgtcagcagggacatcgtgttggaggagatcaagctcattagcaagactggtggtcagcggggggacttccatcgggcttagcacctgcccttctcacccatggcccacccaggcctggagctgggatgcaatgtaggctgagggaaagacgtcaggttcctttaatcacagtcactgtttgtttaccttgagcagtaaacccgaagtcagcctgctctactactaacaaacaggcctgctgctagatgatctctaatgaccaatggggcttcctttctatagggaggataccagcaggcccttaagccttccaggacactaaggtcgtgggagcgggactgcaacaagcaatgccagataactgagaaatcatgttctttgtggactatttcagacaaccaggttccgacagtccagcccagaacttttccttctcattttgggttttctcttctcctgctttcctggggagagattaagcgctcattaagcagaggagcccactttgaggagagcaaagcacaagcttgcctgaagaatggatcccaacttctccccggcagctctgcctccctaagtctgtgaagccgcagccctgccctgtcctgtcctgtcctgacttcatctctccttctgcccaagtctgtgtcccatcagacttgcagcctttcagcttaacagttgcccggtcctgctggccccttttcctctggcccccctcttctgaaacaggatgtgcacacatgggccatagccctaaggactcctgccagaccacacagcccacacctggccctgttcacggctgttccacccacccctctttattctggagcatatcagggaaagaaaagttgatgatagattgccttcaccctcacagcgcacaaataaagctacgatgccaactttgcagatgcaagaatgaagacactgtgtgggtagggcactgagctgctgcagtttcacagggaaggctgcacctatcaatcaatcaatcaatcctatcccaagacacagttccctgagggaagaagaggagggacctggaaaggcctaagggtgtactctctgtatagccccgctatgggaaaataaagtggagtagggggcatagaaatgcaccatctaagggaaatcttttgtcaggtggtggccaggggtgttcaaagctcattgcttgcattaccagctattagagagatcagagagggcaattaattagaggctcctggttctcacatcccaaacacacacagttctggcctgctgggctctctaacttggatgtctttgagtcctcagtggtgccccctgcctgcctcccctctgccctatgccaaggtgtgctggcaaatattaaacaaccagctctctgg

SEQ ID NO: 18588 - DNA, 2852 bp, Homo sapiens
  source 1..2852: mol_type = unassigned DNA
cttgctgggatgaccccgggggcgagtgcccggccagtgtgctcccgaagcgggctgcggttccgctcgtatcaggcttcatggcggcgcggccactgtcccggatgctgcggcggcttctgaggtccagcgcccggagctgcagctcaggggctccggtgacccagccctgccccggggagtccgcgcgagctgcctcggaggtcagtactgcatgcccgaggagggggtcccgctgacccccaaagccaacctgctgaccacagaggagatcctgaccctcgcccggctctttgtgaaggaaggcatcgacaagatccggctcacaggtggagagccgcttatccggccggacgtggtggacattgtggcccagctccagcggctggaagggctgagaaccataggtgttaccaccaatggcatcaacctggcccggctactgccccagcttcagaaggctggtctcagtgccatcaacatcagcctggacaccctggtgcctgccaagtttgagttcattgtccgcaggaaaggcttccacaaggtcatggagggcatccacaaggccatcgagctgggctacaaccctgtgaaggtgaactgtgtggtgatgcgaggccttaacgaggatgaactcctggactttgcggccttgactgagggcctccccctggatgtgcgcttcatagagtatatgccctttgatggcaacaagtggaacttcaagaagatggtcagctataaggagatgctagacactgtccggcagcagtggccagagctggagaaggtgccagaggaggaatccagcacagccaaggcctttaaaatccctggcttccaaggccagatcagcttcatcacatccatgtctgagcatttctgtgggacctgcaaccgcctgcgaatcacagctgatgggaacctcaaggtctgcctctttggaaactctgaggtatccctgcgggatcacctgcgagctggggcctctgagcaggagctgctgagaatcattggggctgctgtgggcaggaagaagcggcagcatgcagagttatttttgatgttccccaattccccaccagccaatccaagcattttctcctgggacccgctccatgttcagggtctaagacccagaatgagtttctccagccaggtggccactttatggaaaggatgcagggtcccccagacccctcctctagcccagcagcggctggggtctggctcctttcagagacactacacttcccgtgcagactcagatgccaactcaaagtgccttagcccaggttcctgggcttctgctgccccctcaggaccccagctaacctcagaacaactaactcatgtggactcggaaggacgggcagctatggtagatgtgggcaggaagccagacacagagcgggtggctgtggcttcagccgtggtcctcctgggaccggtagccttcaagcttgtccagcagaaccagctcaagaaaggagatgccctagtggtggcccagctggctggagtccaggcagccaaggtgaccagccagctgatccctctgtgccaccacgtggccctgagccacatccaggtgcagctggagctggacagcacacgccatgccgtgaagatccaggcatcttgccgggctcggggccccaccggggtggagatggaggccctgacctctgctgcagtggccgccctcaccctgtatgacatgtgcaaggctgtcagcagggacatcgtgttggaggagatcaagctcattagcaagactggtggtcagcggggggacttccatcgggcttagcacctgcccttctcacccatggcccacccaggcctggagctgggatgcaatgtaggctgagggaaagacgtcaggttcctttaatcacagtcactgtttgtttaccttgagcagtaaacccgaagtcagcctgctctactactaacaaacaggcctgctgctagatgatctctaatgaccaatggggcttcctttctatagggaggataccagcaggcccttaagccttccaggacactaaggtcgtgggagcgggactgcaacaagcaatgccagataactgagaaatcatgttctttgtggactatttcagacaaccaggttccgacagtccagcccagaacttttccttctcattttgggttttctcttctcctgctttcctggggagagattaagcgctcattaagcagaggagcccactttgaggagagcaaagcacaagcttgcctgaagaatggatcccaacttctccccggcagctctgcctccctaagtctgtgaagccgcagccctgccctgtcctgtcctgtcctgacttcatctctccttctgcccaagtctgtgtcccatcagacttgcagcctttcagcttaacagttgcccggtcctgctggccccttttcctctggcccccctcttctgaaacaggatgtgcacacatgggccatagccctaaggactcctgccagaccacacagcccacacctggccctgttcacggctgttccacccacccctctttattctggagcatatcagggaaagaaaagttgatgatagattgccttcaccctcacagcgcacaaataaagctacgatgccaactttgcagatgcaagaatgaagacactgtgtgggtagggcactgagctgctgcagtttcacagggaaggctgcacctatcaatcaatcaatcaatcctatcccaagacacagttccctgagggaagaagaggagggacctggaaaggcctaagggtgtactctctgtatagccccgctatgggaaaataaagtggagtagggggcatag

SEQ ID NO: 18589 - DNA, 1920 bp, Homo sapiens
  source 1..1920: mol_type = unassigned DNA
agcccaaacatgtggaagagttggaagctccgcacagatgtcagagtaagggagggggcaggcggttctccttgtgcctcttcccagcccggtagcaggggcccatgcttcctccctggtctgtcctcgcaggaggtgtccaggcggaggcagttcctgcgggagcatgcggcccccttctccgccttcctcacagacagcttcggccggcagcacagctacctgcggatctccctcacagagaagtgcaacctcagatgtcagtactgcatgcccgaggagggggtcccgctgacccccaaagccaacctgctgaccacagaggagatcctgaccctcgcccggctctttgtgaaggaaggcatcgacaagatccggctcacaggtggagagccgcttatccggccggacgtggtggacattgtggcccagctccagcggctggaagggctgagaaccataggtgttaccaccaatggcatcaacctggcccggctactgccccagcttcagaaggctggtctcagtgccatcaacatcagcctggacaccctggtgcctgccaagtttgagttcattgtccgcaggaaaggcttccacaaggtcatggagggcatccacaaggccatcgagctgggctacaaccctgtgaaggtgaactgtgtggtgatgcgaggccttaacgaggatgaactcctggactttgcggccttgactgagggcctccccctggatgtgcgcttcatagagtatatgccctttgatggcaacaagtggaacttcaagaagatggtcagctataaggagatgctagacactgtccggcagcagtggccagagctggagaaggtgccagaggaggaatccagcacagccaaggcctttaaaatccctggcttccaaggccagatcagcttcatcacatccatgtctgagcatttctgtgggacctgcaaccgcctgcgaatcacagctgatgggaacctcaaggtctgcctctttggaaactctgaggtatccctgcgggatcacctgcgagctggggcctctgagcaggagctgctgagaatcattggggctgctgtgggcaggaagaagcggcagcatgcaggcatgttcagtatttcccagatgaagaaccggcccatgatcctcatcgagttatttttgatgttccccaattccccaccagccaatccaagcattttctcctgggacccgctccatgttcagggtctaagacccagaatgagtttctccagccaggtggccactttatggaaaggatgcagggtcccccagacccctcctctagcccagcagcggctggggtctggctcctttcagagacactacacttcccgtgcagactcagatgccaactcaaagtgccttagcccaggttcctgggcttctgctgccccctcaggaccccagctaacctcagaacaactaactcatgtggactcggaaggacgggcagctatggtagatgtgggcaggaagccagacacagagcgggtggctgtggcttcagccgtggtcctcctgggaccggtagccttcaagcttgtccagcagaaccagctcaagaaaggagatgccctagtggtggcccagctggctggagtccaggcagccaaggtgaccagccagctgatccctctgtgccaccacgtggccctgagccacatccaggtgcagctggagctggacagcacacgccatgccgtgaagatccaggcatcttgccgggctcggggccccaccggggtggagatggaggccctgacctctgctgcagtggccgccctcaccctgtatgacatgtgcaaggctgtcagcagggacatcgtgttggaggagatcaagctcattagcaagactggtggtcagcggggggacttccatcgggcttag

SEQ ID NO: 18590 - DNA, 1071 bp, Homo sapiens
  source 1..1071: mol_type = unassigned DNA
atgtggaagagttggaagctccgcacagatgtcagagaggtgtccaggcggaggcagttcctgcgggagcatgcggcccccttctccgccttcctcacagacagcttcggccggcagcacagctacctgcggatctccctcacagagaagtgcaacctcagatgtcagtactgcatgcccgaggagggggtcccgctgacccccaaagccaacctgctgaccacagaggagatcctgaccctcgcccggctctttgtgaaggaaggcatcgacaagatccggctcacaggtggagagccgcttatccggccggacgtggtggacattgtggcccagctccagcggctggaagggctgagaaccataggtgttaccaccaatggcatcaacctggcccggctactgccccagcttcagaaggctggtctcagtgccatcaacatcagcctggacaccctggtgcctgccaagtttgagttcattgtccgcaggaaaggcttccacaaggtcatggagggcatccacaaggccatcgagctgggctacaaccctgtgaaggtgaactgtgtggtgatgcgaggccttaacgaggatgaactcctggactttgcggccttgactgagggcctccccctggatgtgcgcttcatagagtatatgccctttgatggcaacaagtggaacttcaagaagatggtcagctataaggagatgctagacactgtccggcagcagtggccagagctggagaaggtgccagaggaggaatccagcacagccaaggcctttaaaatccctggcttccaaggccagatcagcttcatcacatccatgtctgagcatttctgtgggacctgcaaccgcctgcgaatcacagctgatgggaacctcaaggtctgcctctttggaaactctgaggtatccctgcgggatcacctgcgagctggggcctctgagcaggagctgctgagaatcattggggctgctgtgggcaggaagaagcggcagcatgcaggcatgttcagtatttcccagatgaagaaccggcccatgatcctcatcggtgggtga

SEQ ID NO: 18591 - DNA, 3549 bp, Homo sapiens
  source 1..3549: mol_type = unassigned DNA
gattcggtcccgctgtcctaggcgggatggtgccgctgtgccaggttgaagtattgtattttgcaaaaagtgctgaaataacaggagttcgttcagagaccatttctgtgcctcaagaaataaaagcgttgcagctgtggaaggagatagaaactcgacatcctggattggctgatgttagaaatcagataatatttgctgttcgtcaagaatatgtcgagcttggagatcagctcctcgtgcttcagcctggagacgaaattgccgttatcccccccattagtggaggatagtgcttttgagccatctaggaaagatatggatgaagttgaagagaaatctaaagatgttataaactttactgccgagaaactttcagtagatgaagtctcacagttggtgatttctccgctctgtggtgcaatatccctatttgtagcttggttccagtgtcagaagcaagcataatcattgctgtgtcctcagcccacagagctgcatctcttgaagctgtgagctatgccattgatactttaaaagccaaggtgcccatatggaaaaaggaaatatacgaagagtcatcaacttggaaaggaaacaaagagtgcttttgggcatccaacagttaatcacttatgtttttagagcatgcaatcttaactttgttaaactattattattgatcacattttgatttttttctctccacatcaggatagtttactgaagcacaatctcttatactagtgggacaaaagggagaaaaaggaagcaagataaatgggtatgtaggatgaagggttatttaaaatggaactaaagatagaaggaggactgtaggaagaaatggaataatttaaatgtgaggaaagatatctgtggtagacatgtccttccatgactaatttctaattgtaactcaacacacattgaggtatgggccctcctcagtgactttaactagctcagaaacgtactcccccaccaaccccacctcaccgccccccatcccggttctgggagagcattgttattaaggatgcatgacaggaatgttggcagaactggaaagtattaaaaaagcattatcagacagtcttgatattatacattttcagaaatatattaaaaataataaactaaaacccatgatttcaaaagtttaaaaagagtattttctttttttttaaattgcctaaaatagttctcattatggagatttctgggatttcagaatctataatcttaccagaaaactttttgttgttttttattagttgttaattttgtatcaatatacaaatcagcacaaaattgtcataaagctaactagcaacaaggtggtttgtgttgaaatgtttaggtaaacaatgccccaatttttaactggttaagctttatagtattttgatagacttgtacatataagtcccatatagttcttaaatttttttttccagctttatttaggtatacttgacaaaaattgtatgtatttaaagtatacaatgtgatttttgatacacatatacattgtgaggtgattaccataatccaactaattaacatattcctcagctcacatagtcccctcttctgtgtggtgagaatatttaaggtctactctcagcaaatttcaggtaaacacatagctcataaaataataaaatacaggcaaaatttgggcagtcggcatcatcacaaaatttgcattatgcatattaagaacaaaagctatactttcagacacttagattgaaggatttttttcttatgtctgggacaaataagaaacgtagtaatcctatttgttatatgtagtgaaaacatcttttacctaaggaacccatttattcaacaaatatttattgaatgcctgttttgtgccaggcacccacccagtgatctttttctgccaacctaaaataccttgaggaacactctgcatcttatctgtggctgggacccataggacagccacactgactttaggaatcacctggttacatcagttgatgcttgttcattagtccgtctggagagattgggccagaaggatactggaagggcagacaaaccctccgcctacttcctctgccgggttcgggttgcctgtttggtctcagccttaccttcacagttcagtgtcactctggcttgccatcgagcttccgcctgtccccattggagagaaggggtgggtgttggctgttgcattatatctaaaagcacattatcatggggttactgggtcactggacatttctaggattttggacataggttgttaaatggatgttatgtcatatgcaatgttgataggtatatgtggatttcaagactttcctacttagatatttctttagaagttccttattgagggtaatgatgtttttaaagaacatagaacattctttatgttttaaaagaatcatgccttcattaagtaggctttattctaagtttggaactgagactgttatgcttttaaagtctccaacagagaggttaaggagttaacctggggcatgccagaactgggatggaatggccttgaaagattttagtgcattgcacttgacttagataggatctttactgacccttgcttacttaggagtggcagagttaattggtggttcagatattaaggggctactgtcactctgatatgtagcttttctatcatctctgtaacttagcttcaagtaactagaagagtaatctaaaaaaaataattagcctttaatcagattgcctgcagtgtttcttggtcactttaaagccgtgactttgcatgattgctaggtaagttcacttaagaaataggaaattcaaattatttatgtttcaagtatttttgaacaggtggtaaaatgaaattgatttttatcatctttgaatgaaagtaacagcagatattcaatgagtgacttattttgtggacatttttgtcctttggatatgatgtatagagtcacaatatattttcagccttttttgagaaataagtgatttagacatcttacacagttactgagcacctggtacagtgaagatctctcaagaatgatttgtgtgatgtagttcggtggatcatccagcagagggcagtagagccagagccatagtaaaagttatagtaaagttgctcttagcaacttgagtcttacttagatttaattttgcatagaaccaaaagttcagtttagtagccattttctttaaagtcaggctgtagtggttccgaaatgaaaattaggccctgattttatgtaagatgatgtccaatctttaattgacaccttaaaaatattaaaagattatgataggatcaggaaggagtttttgaaaatgcaatttgtagtttttaacaagtgatgtagaataaataaaaagaagtactttttaaaaagtaagtataaaattattttccagttaactatgggatataaatgattgctttaatacaggtcttcctaacctgtacagcatttcctaacctgctctgtgaaaaacaaagaaataaaacttagtgctctctttctc

SEQ ID NO: 18592 - DNA, 1781 bp, Homo sapiens
  source 1..1781: mol_type = unassigned DNA
gattcggtcccgctgtcctaggcgggatggtgccgctgtgccaggtaagggtggcgggtgtgcgtgcgggcctgggtgcggagccctcctcgacgtgtctctcccgccctttccctccacatacccagccttggtcagtcggacctccccactagcccccaacctggccggcgtcttgggttcgggggcgcccccgcccccgcccccgggcccttcctgtctccgggctttactgcgactgccccagcagaagtcgggtcctctccgagaactcttgtcagctcacggcagcaaggacggactcgttctgaaggcgcctccaccttttatgaccacctctttcccagattattcgttttgatgaagctaaaattttaatctaaaaagaaatgcacctcatggagaattcttgtgaagaactgtgcttcatctgtggatttctacacccttgatcatttgcaaacctgtaattatttcgtaaagagttgtttgcacggagtgacaggttgaagtattgtattttgcaaaaagtgctgaaataacaggagttcgttcagagaccatttctgtgcctcaagaaataaaagcgttgcagctgtggaaggagatagaaactcgacatcctggattggctgatgttagaaatcagataatatttgctgttcgtcaagaatatgtcgagcttggagatcagctcctcgtgcttcagcctggagacgaaattgccgttatcccccccattagtggaggatagtgcttttgagccatctaggaaagatatggatgaagttgaagagaaatctaaagatgttataaactttactgccgagaaactttcagtagatgaagtctcacagttggtgatttctccgctctgtggtgcaatatccctatttgtagggactacaagaaataactttgaagggaaaaaagtcattagcttagaatatgaagcatatctacccatggcggaaaatgaagtcagaaagatttgtagtgacattaggcagaaatggccagtcaaacacatagcagtgttccatagacttggcttggttccagtgtcagaagcaagcataatcattgctgtgtcctcagcccacagagctgcatctcttgaagctgtgagctatgccattgatactttaaaagccaaggtgcccatatggaaaaaggaaatatacgaagagtcatcaacttggaaaggaaacaaagagtgcttttgggcatccaacagttaatcacttatgtttttagagcatgcaatcttaactttgttaaactattattattgatcacattttgatttttttctctccacatcaggatagtttactgaagcacaatctcttatactagtgggacaaaagggagaaaaaggaagcaagataaatgggtatgtaggatgaagggttatttaaaatggaactaaagatagaaggaggactgtaggaagaaatggaataatttaaatgtgaggaaagatatctgtggtagacatgtccttccatgactaatttctaattgtaactcaacacacattgaggtatgggccctcctcagtgactttaactagctcagaaacgtactcccccaccaaccccacctcaccgccccccatcccggttctgggagagcattgttattaaggatgcatgacaggaatgttggcagaactggaaagtattaaaaaagcattatcagacagtcttgatattatacattttcagaaatatattaaaaataataaactaaaacccatgatttcaaaagtttaaaaa

SEQ ID NO: 18593 - DNA, 1347 bp, Homo sapiens
  source 1..1347: mol_type = unassigned DNA
tgcgcctttgcggccgtgattcggtcccgctgtcctaggcgggatggtgccgctgtgccaggttgaagtattgtattttgcaaaaagtgctgaaataacaggagttcgttcagagaccatttctgtgcctcaagaaataaaagcgttgcagctgtggaaggagatagaaactcgacatcctggattggctgatgttagaaatcagataatatttgctgttcgtcaagaatatgtcgagcttggagatcagctcctcgtgcttcagcctggagacgaaattgccgttatcccccccattagtggaggatagtgcttttgagccatctaggaaagatatggatgaagttgaagagaaatctaaagatgttataaactttactgccgagaaactttcagtagatgaagtctcacagttggtgatttctccgctctgtggtgcaatatccctatttgtagggactacaagaaataactttgaagggaaaaaagtcattagcttagaatatgaagcatatctacccatggcggaaaatgaagtcagaaagatttgtagtgacattaggcagaaatggccagtcaaacacatagcagtgttccatagacttggcttggttccagtgtcagaagcaagcataatcattgctgtgtcctcagcccacagagctgcatctcttgaagctgtgagctatgccattgatactttaaaagccaaggtgcccatatggaaaaaggaaatatacgaagagtcatcaacttggaaaggaaacaaagagtgcttttgggcatccaacagttaatcacttatgtttttagagcatgcaatcttaactttgttaaactattattattgatcacattttgatttttttctctccacatcaggatagtttactgaagcacaatctcttatactagtgggacaaaagggagaaaaaggaagcaagataaatgggtatgtaggatgaagggttatttaaaatggaactaaagatagaaggaggactgtaggaagaaatggaataatttaaatgtgaggaaagatatctgtggtagacatgtccttccatgactaatttctaattgtaactcaacacacattgaggtatgggccctcctcagtgactttaactagctcagaaacgtactcccccaccaaccccacctcaccgccccccatcccggttctgggagagcattgttattaaggatgcatgacaggaatgttggcagaactggaaagtattaaaaaagcattatcagacagtcttgatattatacattttcagaaatatattaaaaataataaactaaaacccatgatttcaaaagtttaaaaagagtattttc

SEQ ID NO: 18594 - DNA, 1210 bp, Homo sapiens
  source 1..1210: mol_type = unassigned DNA
cggccgtgattcggtcccgctgtcctaggcgggatggtgccgctgtgccaggttgaagtattgtattttgcaaaaagtgctgaaataacaggagttcgttcagagaccatttctgtgcctcaagaaataaaagcgttgcagctgtggaaggagatagaaactcgacatcctggattggctgatgttagaaatcagataatatttgctgttcgtcaagaatatgtcgagcttggagatcagctcctcgtgcttcagcctggagacgaaattgccgttatcccccccattagtggaggatagtgcttttgagccatctaggaaagatatggatgaagttgaagagaaatctaaagatgttataaactttactgccgagaaactttcagtagatgaagtctcacagttggtgatttctccgctctgtggtgcaatatccctatttgtagggactacaagaaataactttgaagggaaaaaagtcattagcttagaatatgaagcatatctacccatggcggaaaatgaagtcagaaagatttgtagtgacattaggcagaaatggccagtcaaacacatagcagtgttccatagacttggtagaatggtctatttttaatacctgttatgattttgttttttaggaaatatacgaagagtcatcaacttggaaaggaaacaaagagtgcttttgggcatccaacagttaatcacttatgtttttagagcatgcaatcttaactttgttaaactattattattgatcacattttgatttttttctctccacatcaggatagtttactgaagcacaatctcttatactagtgggacaaaagggagaaaaaggaagcaagataaatgggtatgtaggatgaagggttatttaaaatggaactaaagatagaaggaggactgtaggaagaaatggaataatttaaatgtgaggaaagatatctgtggtagacatgtccttccatgactaatttctaattgtaactcaacacacattgaggtatgggccctcctcagtgactttaactagctcagaaacgtactcccccaccaaccccacctcaccgccccccatcccggttctgggagagcattgttattaaggatgcatgacaggaatgttggcagaactggaaagtattaaaaaagcattatcagacagtcttgatattatacattttcagaaatatattaaaaa

SEQ ID NO: 18595 - DNA, 1406 bp, Homo sapiens
  source 1..1406: mol_type = unassigned DNA
cctaggcgggatggtgccgctgtgccaggttgaagtattgtattttgcaaaaagtgctgaaataacaggagttcgttcagagaccatttctgtgcctcaagaaataaaagcgttgcagctgtggaaggagatagaaactcgacatcctggattggctgatgttagaaatcagataatatttgctgttcgtcaagaatatgtcgagcttggagatcagctcctcgtgcttcagcctggagacgaaattgccgttatcccccccattagtggaggatagtgcttttgagccatctaggaaagatatggatgaagttgaagagaaatctaaagatgttataaactttactgccgagaaactttcagtagatgaagtctcacagttggtgatttctccgctctgtggtgcaatatccctatttgtagggactacaagaaataactttgaagggaaaaaagtcattagcttagaatatgaagcatatctacccatggcggaaaatgaagtcagaaagatttgtagtgacattaggcagaaatggccagtcaaacacatagcagtgttccatagacttggcccacagagctgcatctcttgaagctgtgagctatgccattgatactttaaaagccaaggtgcccatatggaaaaaggaaatatacgaagagtcatcaacttggaaaggaaacaaagagtgcttttgggcatccaacagttaatcacttatgtttttagagcatgcaatcttaactttgttaaactattattattgatcacattttgatttttttctctccacatcaggatagtttactgaagcacaatctcttatactagtgggacaaaagggagaaaaaggaagcaagataaatgggtatgtaggatgaagggttatttaaaatggaactaaagatagaaggaggactgtaggaagaaatggaataatttaaatgtgaggaaagatatctgtggtagacatgtccttccatgactaatttctaattgtaactcaacacacattgaggtatgggccctcctcagtgactttaactagctcagaaacgtactcccccaccaaccccacctcaccgccccccatcccggttctgggagagcattgttattaaggatgcatgacaggaatgttggcagaactggaaagtattaaaaaagcattatcagacagtcttgatattatacattttcagaaatatattaaaaataataaactaaaacccatgatttcaaaagtttaaaaagagtattttctttttttttaaattgcctaaaatagttctcattatggagatttctgggatttcagaatctataatcttaccagaaaactttttgttgttttttattagttgttaattttgtatcaatatacaaatcagcacaaaattgt

SEQ ID NO: 18596 - DNA, 707 bp, Homo sapiens
  source 1..707: mol_type = unassigned DNA
cgcaggcggcaagtgtccaggagtctggcgtctgctcgcctgcaccacgacctccctcctggggagaaggacatgcatggttgaagtattgtattttgcaaaaagtgctgaaataacaggagttcgttcagagaccatttctgtgcctcaagaaataaaagcgttgcagctgtggaaggagatagaaactcgacatcctggattggctgatgttagaaatcagataatatttgctgttcgtcaagaatatgtcgagcttggagatcagctcctcgtgcttcagcctggagacgaaattgccgttatcccccccattagtggaggatagtgcttttgagccatctaggaaagatatggatgaagttgaagagaaatctaaagatgttataaactttactgccgagaaactttcagtagatgaagtctcacagttggtgatttctccgctctgtggtgcaatatccctatttgtagggactacaagaaataactttgaagggaaaaaagtcattagcttagaatatgaagcatatctacccatggcggaaaatgaagtcagaaagatttgtagtgacattaggcagaaatggccagtcaaacacatagcagtgttccatagacttggcttggttccagtgtcagaagcaagcataatcattgctgtgtcctcagcccacagagctgcatctcttgaagctgtgagctat

SEQ ID NO: 18597 - DNA, 6088 bp, Homo sapiens
  source 1..6088: mol_type = unassigned DNA
acgccaaccactggtaagcgaagtgggcctcgctctcccgggttagcagccgtagccagatccgttgaaaggagtgcagagaggtctcattgcgctcccgaacagacctgacgtagatccgaagtggcccgcgccatctcaactatgaggggacacccgtaggcggcgggagagggacgccgcgaggagccaataaagctccgcaaccggaagtgtcttctgggaggggtcgtacccggaagtgtggcacctcccgggccgcacccggaagtgtgatgccaccgccgctacggggaagtaatggtatccggccaattgagattcggagttaaaacagggatgtgcagatggaggtcggaggagacactgctgccccggcccccgggggcgcggaggacttggaggacacgcagttccccagtgaggaagctagagaaggtggaggggttcacgcggtcccgccggatcccgaagacgagggcctggaggaaacaggatccaaggacaaggaccagccacccagcccatcaccaccgccccagtcagaggccctgtcaagcacctctcggctctggagtcctgcagcccctgagaatagtcccacatgtagccctgagagtagctctggaggccagggcggggaccccagtgatgaggagtggcgcagccagcggaagcatgtgtttgtgctgagtgaggctggcaagcccatctactcgcggtatggtagtgtggaggcgctgtcggctaccatgggtgtaatgaccgccctggtgtcctttgtgcagagtgcgggagatgccatccgtgccatctacgctgaggaccacaagctggtgttcctacaacagggcccactgttgctcgtggccatgtcacggacttctcagtcagcagcccagctgcggggggagctgctagctgtgcacgcacagatcgtgagcacacttacacgtgcaagtgtcgcccgcatcttcgcacacaagcagaactatgacctccgccgcctgctggctggttcagagcgcacactggaccgacttctggacagtatggagcaggacccaggagccctgctcctgggtgccgtgcgctgtgtgccccttgcccgcccgctgcgagacgcactaggtgcgctcctccgacgttgcacagcgcctggcctggcgctgtcagtgctggcagtaggcggtcgacttataacagcagcccaggagcgaaatgtgctggccgagtgccggctggacccagctgacctgcagttgctgctcgactgggtgggtgcaccagcctttgcggcgggtgaggcttgggcacctgtgtgcctgccccgcttcaaccctgatggttttttctacgcctacgtggcccgcctggatgctatgcctgtctgcctgctgctgcttggcacccaacgtgaagccttccatgccatggccgcctgccggcgcctggttgaagatgggatgcatgcccttggtgccatgcgtgcccttggggaggctgccagcttctctaatgcctcatcagccagtgctcctgcctacagcgtgcaggctgtcggggcgccgggcctccggcacttcctgtataagccgctggacatccctgaccaccaccgccaactgccccagtttaccagccctgagctagaggccccctacagcagagaggaggagcggcagcggctgtcggacctgtaccaccgcctgcatgctcgtctccacagcacctcccgacccctgcgcctcatttaccacgtggctgagaaggagacactactggcctgggtgacctccaaattcgagctctatacctgcctcagccctctggtgaccaaggcaggtgcaatcttggtagtgaccaaactcctgcgctgggtgaagaaagaggaggaccggctcttcattcgttacccacccaagtactccacaccaccagccacctctacggaccaagctgcccataatggcttgttcactggactctgatagttggagctcccagaccaggcagtgctgggagcaaccacctttgttttttaccttctgtctaccctggaaatgtgtgtgggggtgtgtctgtggccagtcattgtctccctaagcaatggggcaaggtctgagggcccaccgatgagagagatggtggcagccgccaggcgagcaggctgctttccctgcccagtcatgcacctccccctctggggaaatccttaggcctccctctcccttccctctgtctcatctcctccacttggatgatgctctagcctctgtcagggactgtcccctccaaacttgcttccgtggtctgcctcctagttgaatctcagccctgagtgtccagatctggccaaggtgtctagggtggcccacgggggtgctggaattggcacttcagggccaggctatgcttgggactggcctgagggtattttaaagaaaaaaactacataaaaggcctaaaagtaagacccacaaggatattcctttgcccttcttgtacttttttcatctttaccctgccagaaatgacccgccctcaatgctggctgctgctaacattaatgagaaggtggccttcagtgtccacctgtggaacccaggacacagcacctgactgcacacagtggctgaaatccagcatttttacataggagatgcacttagcctctaagcctcgttttactcatctgtgaaacagagataagtaaccctctctcatgaactctttgatgaggatttgtaaacgaaaacagactcgaactattgtgtaccaccacatagcacatgcacgtctgtcccagactttgacaacctgcacaagacaagcagcctaaagcaggagagacctccctagggttttgtgtgtgtgcacactaccctcactccccaactggccattaccctagttctgcccttgtttgtggagttacagcctcaaggttgtagcatgtgtgctggcaatcagggccgcagtgtgttctgcgcctgcccagagctgactcctgatttaaccgctggcgtaaccgcgggttgcacgcatgcgtgctgaaaagcctttcaccctcacgtggtttcttttttaaccagtcatcaagcgaggctcgcgcgcaggccccgcgttggaaaatggcggggaagctgaaacctctgaatgtggaggcgccagaagctactgaggaggctgaaggtagtgagggcaagtgggctgcactcctttctctccaaccagggcagaaaggagggaggattcgtcccattacaataatgaaataatgatattctaatttttttaaataaaatgttaagccttttgttattgaagaaaaacaattttttaaccgttcagcacagtggagataaattaacaggcatattcttatcaccgagattaacttttgtcaactgtagtgtatacgttgttgaaagtaaacaacatgtagttcagtacgaaagtcttcaaacaaaagtggggcggtggggatgttctcataacaatcaccgtgctgcagccaccccttattaacagtaattcccagtgtcgccatttcacacctaacacatatgacactttgatggactcttaaacctcctaatcgaacatggcctcccccacagcctcttttctccagggtattgacttgaatgacaggcaaaggagggtggaggggtgtcggcctagacactattggaaattgtattccatccaaaagaaaaaaaaatctcaggccgggcacggaggctcacgcctgtaatcccagcactttgggaggccgaggcgggcggatcacgaggttaggagttcgaggccagcctgaccaacatggtgaaacaccatctctactaaaaaactatatatacatatacatatgtgtgtatgtgtatttatatgtatgtatgtatgtgtgtgtatatatatatatatgtatatgtgtatatatatatatatgtgtatatatatatatatatacacacactaatcagccgggcgcggtggtgtgggcctgtaatcgcagctactcaggaagctgaggcaggagaatcacttgaacccgagaggcggaggttgcagtgagccgagatcatgtcactgcactccagcctgggtgacagagtgagactccgtctcaaaagaaaaaaaattctcccttggccgggcttggtggcttatgcctgtaatcccagcactttggaaggccgaggcgggtgggtcacctgaggtcaggagtttgagaccagcctggccagcatggcgaaacctcgtctctactaaaaatacaaaaattgtccgggtgtggtggcgggcgcctgtagtcccagctactggggaggctgaggcaggggaattgcttgaacccgggaggcagaggttatcgtgagctgacattgcgccactgcactccagcgcggaagacagagtgagcaaaaaaaaaaaaaaaaaaagaaaaaacaaaaagaaaaaaatctcccaaggcagtcatgcatttgtatgccactagcatttttttgttatagaaatattcaaagtgtaccaacgtagagaaaatagctttaaacaaagcccatgtgtacctatcagtatgctttaactgttgtcacctttctgccccacttttatctatctcgaacacccctttctgcacactctttaaaccactgtattaacaaacacattagactgcatcctgccagacctacccatacagacatcaaagtaatgattattgcttattgcctgacctaggatgtgagctccatgagaacagagactgtttacctctcgctcccctgcacctaaaacaatgcctgcttggtgtaaagtaagtgctcagtaattttttaatgtgtgaccaatgaaataacttcaagagcagagagctcttttagattagaggcacatactaagtgccagcattcaacaaaagacagacggaaataagacagatgcaaatagatctcatttattaactgtgtaatgcagctgccactgcaattaaaaaaaaaattttagtatcaacctttcaaattcctcaaaattaaagttatgactaacttcaccagcaaaggaaaaattgaaggatgtatcaagttgccatttctagcccatcaaatcggctttataaagggaagcatagtatctggtattgacgaccttgtagagaaacaggccttttcctgcctcagggaagagagctgactcaaagtaaaggctttgctagaggcagtcggcagagtatttttagcatctaaaatgctcttccacttcggcagtgaccatgcgatgtaatcaaaggagaatacgtaagtgtatggaccaggaatggtcactggagtgttgatgtaggcacaacacaagaagtagtcacagaaattgctaagtctaggtttatgtgtgcatgctgtggagtgtctctgtggtggatttctttttaagaggcagaaaaaaattctaatttaaatgtattaaattataagttctaatttaaatgtattaaaattaaattataagttgataggattattattgacacacaaggagctccaaaagagatcgtatttttattagagacaagccagttgggattgaaacaaaaatggaggggggtatagccctgtgtatgttgcacagaaaaagtatctgaatgataaaggcctaagtgataactctggacaaggaatttggattttgggagtagtgcagaggtagaggcatttttgtgatttattgttctattttttcttctagaaaaatgtaagtagtcatatataattttaaaatataaaggagaagaggcaaaatgttgaatggcacctgaggatcctatattcatattggatcagtattaacatccaggttttgattgttgtactatggttacctggtagattccctttgtatataggaaatagacactggaatagtaaggagtagtgggtcaagatgtctgcaacttattgttcagaatcactcacaaatgggaaatctgatataaggacaaaatgggagcactgtggcctatttttacaacttttgtgtacatctgcaattgtttcaaaataaaatgtttaaaagggtgctctta

SEQ ID NO: 18598 - DNA, 768 bp, Homo sapiens
  source 1..768: mol_type = unassigned DNA
gcgaagtgggcctcgctctcccgggttagcagccgtagccagatccgttgaaaggagtgcagagaggtctcattgcgctcccgaacagacctgacgtagatccgaagtggcccgcgccatctcaactatgaggggacacccgtaggcggcgggagagggacgccgcgaggagccaataaagctccgcaaccggaagtgtcttctgggaggggtcgtacccggaagtgtggcacctcccgggccgcacccggaagtgtgatgccaccgccgctacggggaagtaatggtatccggccaattgagattcggagttaaaacagggatgtgcagatggaggtcggaggagacactgctgccccggcccccgggggcgcggaggacttggaggacacgcagttccccagtgaggaagctagagaaggtggaggggttcacgcggtcccgccggatcccgaagacgagggcctggaggaaacaggatccaaggacaaggaccagccacccagcccatcaccaccgccccagtcagaggccctgtcaagcacctctcggctctggagtcctgcagcccctgagaatagtcccacatgtagccctgagagtagctctggaggccagggcggggaccccagtgatgaggagtggcgcagccagcggaacggctgtcggacctgtaccaccgcctgcatgctcgtctccacagcacctcccgacccctgcgcctcatttaccacgtggctgagaaggagacactactggcctgggtaa

SEQ ID NO: 18599 - DNA, 1759 bp, Homo sapiens
  source 1..1759: mol_type = unassigned DNA
gtgtgatgccaccgccgctacggggaagtaatggtatccggccaattgagattcggagttaaaacagggatgtgcagatggaggtcggaggagacactgctgccccggcccccgggggcgcggaggacttggaggacacgcagttccccagtgaggaagctagagaaggtggaggggttcacgcggtcccgccggatcccgaagacgagggcctggaggaaacagaggaccacaagctggtgttcctacaacagggcccactgttgctcgtggccatgtcacggacttctcagtcagcagcccagctgcggggggagctgctagctgtgcacgcacagatcgtgagcacacttacacgtgcaagtgtcgcccgcatcttcgcacacaagcagaactatgacctccgccgcctgctggctggttcagagcgcacactggaccgacttctggacagtatggagcaggacccaggagccctgctcctgggtgccgtgcgctgtgtgccccttgcccgcccgctgcgagacgcactaggtgcgctcctccgacgttgcacagcgcctggcctggcgctgtcagtgctggcagtaggcggtcgacttataacagcagcccaggagcgaaatgtgctggccgagtgccggctggacccagctgacctgcagttgctgctcgactgggtgggtgcaccagcctttgcggcgggtgaggcttgggcacctgtgtgcctgccccgcttcaaccctgatggttttttctacgcctacgtggcccgcctggatgctatgcctgtctgcctgctgctgcttggcacccaacgtgaagccttccatgccatggccgcctgccggcgcctggttgaagatgggatgcatgcccttggtgccatgcgtgcccttggggaggctgccagcttctctaatgcctcatcagccagtgctcctgcctacagcgtgcaggctgtcggggcgccgggcctccggcacttcctgtataagccgctggacatccctgaccaccaccgccaactgccccagtttaccagccctgagctagaggccccctacagcagagaggaggagcggcagcggctgtcggacctgtaccaccgcctgcatgctcgtctccacagcacctcccgacccctgcgcctcatttaccacgtggctgagaaggagacactactggcctgggtgacctccaaattcgagctctatacctgcctcagccctctggtgaccaaggcaggtgcaatcttggtagtgaccaaactcctgcgctgggtgaagaaagaggaggaccggctcttcattcgttacccacccaagtactccacaccaccagccacctctacggaccaagctgcccataatggcttgttcactggactctgatagttggagctcccagaccaggcagtgctgggagcaaccacctttgttttttaccttctgtctaccctggaaatgtgtgtgggggtgtgtctgtggccagtcattgtctccctaagcaatggggcaaggtctgagggcccaccgatgagagagatggtggcagccgccaggcgagcaggctgctttccctgcccagtcatgcacctccccctctggggaaatccttaggcctccctctcccttccctctgtctcatctcctccacttggatgatgctctagcctctgtcagggactgtcccctccaaacttgcttccgtggtctgcctcctagttgaatctcagccctgagtgtccagatctggc

SEQ ID NO: 18600 - DNA, 1814 bp, Homo sapiens
  source 1..1814: mol_type = unassigned DNA
ccaccgccgctacggggaagtaatggtatccggccaattgagattcggagttaaaacagaggaccacaagctggtgttcctacaacagggcccactgttgctcgtggccatgtcacggacttctcagtcagcagcccagctgcggggggagctgctagctgtgcacgcacagatcgtgagcacacttacacgtgcaagtgtcgcccgcatcttcgcacacaagcagaactatgacctccgccgcctgctggctggttcagagcgcacactggaccgacttctggacagtatggagcaggacccaggagccctgctcctgggtgccgtgcgctgtgtgccccttgcccgcccgctgcgagacgcactaggtgcgctcctccgacgttgcacagcgcctggcctggcgctgtcagtgctggcagtaggcggtcgacttataacagcagcccaggagcgaaatgtgctggccgagtgccggctggacccagctgacctgcagttgctgctcgactgggtgggtgcaccagcctttgcggcgggtgaggcttgggcacctgtgtgcctgccccgcttcaaccctgatggttttttctacgcctacgtggcccgcctggatgctatgcctgtctgcctgctgctgcttggcacccaacgtgaagccttccatgccatggccgcctgccggcgcctggttgaagatgggatgcatgcccttggtgccatgcgtgcccttggggaggctgccagcttctctaatgcctcatcagccagtgctcctgcctacagcgtgcaggctgtcggggcgccgggcctccggcacttcctgtataagccgctggacatccctgaccaccaccgccaactgccccagtttaccagccctgagctagaggccccctacagcagagaggaggagcggcagcggctgtcggacctgtaccaccgcctgcatgctcgtctccacagcacctcccgacccctgcgcctcatttaccacgtggctgagaaggagacactactggcctgggtgacctccaaattcgagctctatacctgcctcagccctctggtgaccaaggcaggtgcaatcttggtagtgaccaaactcctgcgctgggtgaagaaagaggaggaccggctcttcattcgttacccacccaagtactccacaccaccagccacctctacggaccaagctgcccataatggcttgttcactggactctgatagttggagctcccagaccaggcagtgctgggagcaaccacctttgttttttaccttctgtctaccctggaaatgtgtgtgggggtgtgtctgtggccagtcattgtctccctaagcaatggggcaaggtctgagggcccaccgatgagagagatggtggcagccgccaggcgagcaggctgctttccctgcccagtcatgcacctccccctctggggaaatccttaggcctccctctcccttccctctgtctcatctcctccacttggatgatgctctagcctctgtcagggactgtcccctccaaacttgcttccgtggtctgcctcctagttgaatctcagccctgagtgtccagatctggccaaggtgtctagggtggcccacgggggtgctggaattggcacttcagggccaggctatgcttgggactggcctgagggtattttaaagaaaaaaactacataaaaggcctaaaagtaagacccacaaggatattcctttgcccttcttgtacttttttcatctttaccctgccagaaatgacccgccctcaatgctggctgctgctaacattaatgagaag

SEQ ID NO: 18601 - DNA, 4015 bp, Homo sapiens
  source 1..4015: mol_type = unassigned DNA
cgggtatcaaaagaaggatcggctccgcccccgggctccccgggggagttgatagaagggtccttcccaccctttgccgtccccactcctgtgcctacgacccaggagcgtgtcagccaaagcatggagaatcaagagaaggcgagtatcgcgggccacatgttcgacgtagtcgtgatcggaggtggcatttcaggactatctgctgccaaactcttgactgaatatggcgttagtgttttggttttagaagctcgggacagggttggaggaagaacatatactataaggaatgagcatgttgattacgtagatgttggtggagcttatgtgggaccaacccaaaacagaatcttacgcttgtctaaggagctgggcatagagacttacaaagtgaatgtcagtgagcgtctcgttcaatatgtcaaggggaaaacatatccatttcggggcgcctttccaccagtatggaatcccattgcatatttggattacaataatctgtggaggacaatagataacatggggaaggagattccaactgatgcaccctgggaggctcaacatgctgacaaatgggacaaaatgaccatgaaagagctcattgacaaaatctgctggacaaagactgctaggcggtttgcttatctttttgtgaatatcaatgtgacctctgagcctcacgaagtgtctgccctgtggttcttgtggtatgtgaagcagtgcgggggcaccactcggatattctctgtcaccaatggtggccaggaacggaagtttgtaggtggatctggtcaagtgagcgaacggataatggacctcctcggagaccaagtgaagctgaaccatcctgtcactcacgttgaccagtcaagtgacaacatcatcatagagacgctgaaccatgaacattatgagtgcaaatacgtaattaatgcgatccctccgaccttgactgccaagattcacttcagaccagagcttccagcagagagaaaccagttaattcagcggcttccaatgggagctgtcattaagtgcatgatgtattacaaggaggccttctggaagaagaaggattactgtggctgcatgatcattgaagatgaagatgctccaatttcaataaccttggatgacaccaagccagatgggtcactgcctgccatcatgggcttcattcttgcccggaaagctgatcgacttgctaagctacataaggaaataaggaagaagaaaatctgtgagctctatgccaaagtgctgggatcccaagaagctttacatccagtgcattatgaagagaagaactggtgtgaggagcagtactctgggggctgctacacggcctacttccctcctgggatcatgactcaatatggaagggtgattcgtcaacccgtgggcaggattttctttgcgggcacagagactgccacaaagtggagcggctacatggaaggggcagttgaggctggagaacgagcagctagggaggtcttaaatggtctcgggaaggtgaccgagaaagatatctgggtacaagaacctgaatcaaaggacgttccagcggtagaaatcacccacaccttctgggaaaggaacctgccctctgtttctggcctgctgaagatcattggattttccacatcagtaactgccctggggtttgtgctgtacaaatacaagctcctgccacggtcttgaagttctgttcttatgctctctgctcactggttttcaataccaccaagaggaaaatattgacaagtttaaaggctgtgtcattgggccatgtttaagtgtactggatttaactacctttggcttaattccaatcattgttaaagtaaaaacaattcaaagaatcacctaattaatttcagtaagatcaagctccatcttatttgtcagtgtagatcaactcatgttaattgatagaataaagccttgtgatcactttctgaaattcacaaagttaaacgtgatgtgctcatcagaaacaatttctgtgtcctgtttttattcccttcaatgcaaaatacatgatgatttcagaaacaaagcatttgactttctgtctgtggaggtggagtaggtgaaggcccagcctgtaactgtcctttttcttcccttaggcaatggtgaactgtcattacagagcctagaggctcacagcctcctggaggaagcagcctccactttggatcaggaaatagtaaaggaaagcagtgttgggggtagcggcatgcagaccctcagaccagaatggggacatcttgtggtctgctgcctcaggaatctcctgaccacttgtagtccctccgacttctctagacatctagtctcagtgctagcttatttgtatttttcctctttcacttcttatggaggagagtgtttaactgagttagaatgttgaaactgacttgctgtgacttatgtgcagctttccagttgagcagaggaaaatagtggcaggactgtcccccaggaggactccctgcttagctctgtgggagaccaactacgactggcatcttctcttccccctggaaggcagctagacaccaatggatccttgtcagttgtaacattctatttcaacttcaggaaagcagcagttttcttttaatttttcctatgaccataaaattagacatacctctcaacttacatatgtcttcaacatggttacctctgcataaatattagcaaagcatgccaatttctcttaagtactgaaatacatatgataaatttgactgttatttgttgagactatcaaacagaaaagaaattagggctctaatttccttaaagcaagctcacttgctttagttgttaagttttataaaagacatgaaattgagtcattttatatatgaaaactaagttctctatcttaggagtaatgtcggcccacaagggtgcccacctcttgttttccccttttaaaaactcagatttttaaaagccctttccaaaggtttcaactgtaaaatacttctttttacaatgtatcaacatatttttatttaaggggaattaacaattgccagggaaaccagccaacccaagtttattatatcattaaccttatcataaattcaaacctaagttgctggaccctggtgtgaggacataaatcttccaaagttttgcctatcctaagagctgcatttttctactgctctttaccttgcattttagctaatttaggagttttgagaatgtattggatacgctccagtacataaggagttgccgcatattatatcagactgctttgagaaatctcatccctagtctattgcagttgtttctattagcttactgattaactcagtcctgacacaccttttgggaaatgctgatttaaacttcttaactggcaacagttggaacagtaatcagtttgctaacatatttaaagtcttgaatgttgaagaactcatgtgatttacccttttcaactttttggaaaacgatttaatttattctaattagattaaccctattaatctatggattgggtatcaaaatgaatgccagtccagatgtgcctagacacgaaattggagctgaggactctcacgatatgcaagttcatccaacgtgaagataccataagctttttctctgaaccagagaaatgaaagtcagtttaagaggctgatagatcttggccctgttaaggcatccacttcacagttctgaaggctgagtcagccccactccacagttaggccaagaattagattttaaaacttcatctgtctgtcccagttaactgttaaataaggcctcatcctccactgaagagtatggattgaaggattgtgaactatgtttagtgtgattgtgaacttggtgcctaatgttccatgtctgaagtttgccccagtgctacacgttggagtatacctatgtgtgtgctttgccactgaagtaagattttgcctgtatggtactgttttgtttgttaataaagtgcactgccacccccaatgca

SEQ ID NO: 18602 - DNA, 2383 bp, Homo sapiens
  source 1..2383: mol_type = unassigned DNA
cccactcctgtgcctacgacccaggagcgtgtcagccaaagcatggagaatcaagagaaggcgagtatcgcgggccacatgttcgacgtagtcgtgatcggaggtggcatttcaggccaagagaagagattggcatgaactgttgctttgccagttccagccagtaccagcaaaaacatacatgtatgttggagcatcagaggaaagcagctcctggtggagagactatctgctgccaaactcttgactgaatatggcgttagtgttttggttttagaagctcgggacagggttggaggaagaacatatactataaggaatgagcatgttgattacgtagatgttggtggagcttatgtgggaccaacccaaaacagaatcttacgcttgtctaaggagctgggcatagagacttacaaagtgaatgtcagtgagcgtctcgttcaatatgtcaaggggaaaacatatccatttcggggcgcctttccaccagtatggaatcccattgcatatttggattacaataatctgtggaggacaatagataacatggggaaggagattccaactgatgcaccctgggaggctcaacatgctgacaaatgggacaaaatgaccatgaaagagctcattgacaaaatctgctggacaaagactgctaggcggtttgcttatctttttgtgaatatcaatgtgacctctgagcctcacgaagtgtctgccctgtggttcttgtggtatgtgaagcagtgcgggggcaccactcggatattctctgtcaccaatggtggccaggaacggaagtttgtaggtggatctggtcaagtgagcgaacggataatggacctcctcggagaccaagtgaagctgaaccatcctgtcactcacgttgaccagtcaagtgacaacatcatcatagagacgctgaaccatgaacattatgagtgcaaatacgtaattaatgcgatccctccgaccttgactgccaagattcacttcagaccagagcttccagcagagagaaaccagttaattcagcggcttccaatgggagctgtcattaagtgcatgatgtattacaaggaggccttctggaagaagaaggattactgtggctgcatgatcattgaagatgaagatgctccaatttcaataaccttggatgacaccaagccagatgggtcactgcctgccatcatgggcttcattcttgcccggaaagctgatcgacttgctaagctacataaggaaataaggaagaagaaaatctgtgagctctatgccaaagtgctgggatcccaagaagctttacatccagtgcattatgaagagaagaactggtgtgaggagcagtactctgggggctgctacacggcctacttccctcctgggatcatgactcaatatggaagggtgattcgtcaacccgtgggcaggattttctttgcgggcacagagactgccacaaagtggagcggctacatggaaggggcagttgaggctggagaacgagcagctagggaggtcttaaatggtctcgggaaggtgaccgagaaagatatctgggtacaagaacctgaatcaaaggacgttccagcggtagaaatcacccacaccttctgggaaaggaacctgccctctgtttctggcctgctgaagatcattggattttccacatcagtaactgccctggggtttgtgctgtacaaatacaagctcctgccacggtcttgaagttctgttcttatgctctctgctcactggttttcaataccaccaagaggaaaatattgacaagtttaaaggctgtgtcattgggccatgtttaagtgtactggatttaactacctttggcttaattccaatcattgttaaagtaaaaacaattcaaagaatcacctaattaatttcagtaagatcaagctccatcttatttgtcagtgtagatcaactcatgttaattgatagaataaagccttgtgatcactttctgaaattcacaaagttaaacgtgatgtgctcatcagaaacaatttctgtgtcctgtttttattcccttcaatgcaaaatacatgatgatttcagaaacaaagcatttgactttctgtctgtggaggtggagtaggtgaaggcccagcctgtaactgtcctttttcttcccttaggcaatggtgaactgtcattacagagcctagaggctcacagcctcctggaggaagcagcctccactttggatcaggaaatagtaaaggaaagcagtgttgggggtagcggcatgcagaccctcagaccagaatggggacatcttgtggtctgctgcctcaggaatctcctgaccacttgtagtccctccgacttctctagacatctagtctcagtgcta

SEQ ID NO: 18603 - DNA, 2566 bp, Homo sapiens
  source 1..2566: mol_type = unassigned DNA
atagcggctcgccgaggcgctggtgcacgggggcagcgcgcagcaggccggcgggcaggcgggcgggctggctggcacgcaggactgggatcgaggcccagaaaacggagcagcgggcaccagggaggcctggaacggggcgagcgccatgagcaacaaatgcgacgtggtcgtggtggggggcggcatctcaggtatggcagcagccaaacttctgcatgactctggactgaatgtggttgttctggaagcccgggaccgtgtgggaggcaggacttacactcttaggaaccaaaaggttaaatatgtggaccttggaggatcctatgttggaccaacccagaatcgtatcttgagattagccaaggagctaggattggagacctacaaagtgaatgaggttgagcgtctgatccaccatgtaaagggcaaatcataccccttcagggggccattcccacctgtatggaatccaattacctacttagatcataacaacttttggaggacaatggatgacatggggcgagagattccgagtgatgccccatggaaggctccccttgcagaagagtgggacaacatgacaatgaaggagctactggacaagctctgctggactgaatctgcaaagcagcttgccactctctttgtgaacctgtgtgtcactgcagagacccatgaggtctctgctctctggttcctgtggtatgtgaagcagtgtggaggcacaacaagaatcatctcgacaacaaatggaggacaggagaggaaatttgtgggcggatctggtcaagtgagtgagcggataatggacctccttggagaccgagtgaagctggagaggcctgtgatctacattgaccagacaagagaaaatgtccttgtggagaccctaaaccatgagatgtatgaggctaaatatgtgattagtgctattcctcctactctgggcatgaagattcacttcaatccccctctgccaatgatgagaaaccagatgatcactcgtgtgcctttgggttcagtcatcaagtgtatagtttattataaagagcctttctggaggaaaaaggattactgtggaaccatgattattgatggagaagaagctccagttgcctacacgttggatgataccaaacctgaaggcaactatgctgccataatgggatttatcctggcccacaaagccagaaaactggcacgtcttaccaaagaggaaaggttgaagaaactttgtgaactctatgccaaggttctgggttccctagaagctctggagccagtgcattatgaagaaaagaactggtgtgaggagcagtactctgggggctgctacacaacttatttcccccctgggatcctgactcaatatggaagggttctacgccagccagtggacaggatttactttgcaggcaccgagactgccacacactggagcggctacatggagggggctgtagaggccggggagagagcagcccgagagatcctgcatgccatggggaagattccagaggatgaaatctggcagtcagaaccagagtctgtggatgtccctgcacagcccatcaccaccacctttttggagagacatttgccctccgtgccaggcctgctcaggctgattggattgaccaccatcttttcagcaacggctcttggcttcctggcccacaaaagggggctacttgtgagagtctaaagagagagggtgtctgtaatcacactctcttcttactgtatttgggatatgagtttggggaaagagttgcagtaaagttccatgaagacaaatagtgtggagtgaggcggggagcatgaagataaatccaactctgactgtaaaatacatggtatctctttctccgttgtggcccctgcttagtgtcccttacctggcttagcgttctgtttcaccagtttccaagtttattgccctcaaaatctttagaatagttaaattggcttgtttaaggttcttgctgccccacaacacaccttgcccatgcacaaggaatgaattttttcctaccattatggctttgtgcttgttcttcctcttacctgtaatagcctcaccttccctagttctttgcattcgtccttagaatactgtattgttacagctgaaagacagtaaagaccatttagtcctcaccttctgttttagagttgagcaaactgaagcccacagaggtggaacttaattacctaagagccacaataagccactggtatctgggggactagaacacaaatccaacgcttttcccacctctttggatgttttccccaattatcctccttcactccctgtcatagttaccgatggtgtcccgttgtgtgggtttactctgtgctaagttgtcttacacttctcaaatgctactcagtatatagccttaagtcttactgttttgtgcggtgtgtctccagctgattttaacttttttgatggtagaaattttatctcttcttccttttgtatcctccattgtatcttcatacaaaggacagtacacacttgggtaattaaaaataaaagttgattgaccat

SEQ ID NO: 18604 - DNA, 1862 bp, Homo sapiens
  source 1..1862: mol_type = unassigned DNA
agaaaacggagcagcgggcaccagggaggcctggaacggggcgagcgccatgagcaacaaatgcgacgtggtcgtggtggggggcggcatctcagaaacatcagactctgggcctctattgacaaaccgtatccacttgtatggcagcagccaaacttctgcatgactctggactgaatgtggttgttctggaagcccgggaccgtgtgggaggcaggacttacactcttaggaaccaaaaggttaaatatgtggaccttggaggatcctatgttggaccaacccagaatcgtatcttgagattagccaaggagctaggattggagacctacaaagtgaatgaggttgagcgtctgatccaccatgtaaagggcaaatcataccccttcagggggccattcccacctgtatggaatccaattacctacttagatcataacaacttttggaggacaatggatgacatggggcgagagattccgagtgatgccccatggaaggctccccttgcagaagagtgggacaacatgacaatgaaggagctactggacaagctctgctggactgaatctgcaaagcagcttgccactctctttgtgaacctgtgtgtcactgcagagacccatgaggtctctgctctctggttcctgtggtatgtgaagcagtgtggaggcacaacaagaatcatctcgacaacaaatggaggacaggagaggaaatttgtgggcggatctggtcaagtgagtgagcggataatggacctccttggagaccgagtgaagctggagaggcctgtgatctacattgaccagacaagagaaaatgtccttgtggagaccctaaaccatgagatgtatgaggctaaatatgtgattagtgctattcctcctactctgggcatgaagattcacttcaatccccctctgccaatgatgagaaaccagatgatcactcgtgtgcctttgggttcagtcatcaagtgtatagtttattataaagagcctttctggaggaaaaaggattactgtggaaccatgattattgatggagaagaagctccagttgcctacacgttggatgataccaaacctgaaggcaactatgctgccataatgggatttatcctggcccacaaagccagaaaactggcacgtcttaccaaagaggaaaggttgaagaaactttgtgaactctatgccaaggttctgggttccctagaagctctggagccagtgcattatgaagaaaagaactggtgtgaggagcagtactctgggggctgctacacaacttatttcccccctgggatcctgactcaatatggaagggttctacgccagccagtggacaggatttactttgcaggcaccgagactgccacacactggagcggctacatggagggggctgtagaggccggggagagagcagcccgagagatcctgcatgccatggggaagattccagaggatgaaatctggcagtcagaaccagagtctgtggatgtccctgcacagcccatcaccaccacctttttggagagacatttgccctccgtgccaggcctgctcaggctgattggattgaccaccatcttttcagcaacggctcttggcttcctggcccacaaaagggggctacttgtgagagtctaaagagagagggtgtctgtaatcacactctcttcttactgtatttgggatatgagtttggggaaagagttgcagtaaagttccatgaagacaaatagtgtggagtgaggcggggagcatgaagataaatccaactctgactgtaaaatacatggtatctctttctccgttgtggcccctgcttagtgtcccttacctggcttagcgttc

SEQ ID NO: 18605 - DNA, 1660 bp, Homo sapiens
  source 1..1660: mol_type = unassigned DNA
aagccagtttgaacttaaggaggaggaactatttggccaaaacacctcctaatatgtagttcagtagagatgccctggagaatgctgcactgttccacatgcctgcaaatattcctctaatgatacagtcccaaggctttggacattgatagactccaggtatggcagcagccaaacttctgcatgactctggactgaatgtggttgttctggaagcccgggaccgtgtgggaggcaggacttacactcttaggaaccaaaaggttaaatatgtggaccttggaggatcctatgttggaccaacccagaatcgtatcttgagattagccaaggagctaggattggagacctacaaagtgaatgaggttgagcgtctgatccaccatgtaaagggcaaatcataccccttcagggggccattcccacctgtatggaatccaattacctacttagatcataacaacttttggaggacaatggatgacatggggcgagagattccgagtgatgccccatggaaggctccccttgcagaagagtgggacaacatgacaatgaaggagctactggacaagctctgctggactgaatctgcaaagcagcttgccactctctttgtgaacctgtgtgtcactgcagagacccatgaggtctctgctctctggttcctgtggtatgtgaagcagtgtggaggcacaacaagaatcatctcgacaacaaatggaggacaggagaggaaatttgtgggcggatctggtcaagtgagtgagcggataatggacctccttggagaccgagtgaagctggagaggcctgtgatctacattgaccagacaagagaaaatgtccttgtggagaccctaaaccatgagatgtatgaggctaaatatgtgattagtgctattcctcctactctgggcatgaagattcacttcaatccccctctgccaatgatgagaaaccagatgatcactcgtgtgcctttgggttcagtcatcaagtgtatagtttattataaagagcctttctggaggaaaaaggattactgtggaaccatgattattgatggagaagaagctccagttgcctacacgttggatgataccaaacctgaaggcaactatgctgccataatgggatttatcctggcccacaaagccagaaaactggcacgtcttaccaaagaggaaaggttgaagaaactttgtgaactctatgccaaggttctgggttccctagaagctctggagggttctacgccagccagtggacaggatttactttgcaggcaccgagactgccacacactggagcggctacatggagggggctgtagaggccggggagagagcagcccgagagatcctgcatgccatggggaagattccagaggatgaaatctggcagtcagaaccagagtctgtggatgtccctgcacagcccatcaccaccacctttttggagagacatttgccctccgtgccaggcctgctcaggctgattggattgaccaccatcttttcagcaacggctcttggcttcctggcccacaaaagggggctacttgtgagagtctaaagagagagggtgtctgtaatcacactctcttcttactgtatttgggatatgagtttggggaaagagttgcagtaaagttcca

SEQ ID NO: 18606 - DNA, 2335 bp, Homo sapiens
  source 1..2335: mol_type = unassigned DNA
gctcgggatttggcgtcggcggctccgggcgcctccagctccggctcgggctccggctccggctccgggcgccgaccaggtccccttggcccccgccgcgcgccctccaacctgctgctgccgccgccgcgccccccaggctctgccagctacccgcgctctgagcccggggccagattcccatggaagcgccgcgatgttcgccccccggctgctggatttccagaagacgaaatacgcgaggttcatgaaccaccgagtccctgcccacaagaggtaccagcccacagagtatgaacatgcggccaactgtgccacccatgctttctggatcatccccagcatcctgggcagctccaacctctacttcctgtcggacgatgactgggagaccatctctgcctggatctacggcctcggcctctgcggcctcttcgtggtgtccactgtgtttcacaccatctcctggaagaagagccacctcaggatggtggaacactgtctacacatgttcgaccggatggtcatctatttcttcatagcggcttcctacgcaccctggctgaaccttcgggagctgggcccctgggcctcccacatgcgctggctggtctggattatggcttccgtgggcaccatctatgtcttcttcttccatgagcggtacaagcttgtggagcttctctgctacgtcgtaatgggcttcttccccgccctggtcatcctctccatgcccaacaccgagggcatctgggagctggtgaccggaggggtcttctactgcctgggcatggtcttcttcaagagtgacgggaggatcccctttgcccacgccatctggcatctctttgtagcatttggtgctggtacccactactatgccatctggaggtacctctatctgcccagcaccctgcagaccaaggtgtccaaatgaggtgacccagacttgagaggtcgtttgggctttaggagtggagcacgtttctgtgaacgttaacccagagcacagcgccaaggcctgtcttccctttattgggtagagttcttgatggctccaaggtgacttctggtgacagccagatcatccctcgagtccccagcgagaaagaaagcatttagccattcttacagaggagaaattaaccctgtaatgtgtttctattttagatgagtgtttcctaatacaagcaacattaacatcttcagaaaaggaagcaggcatggtcctggaaaattggggaatgacgggccaatctgtgtttcctaaggtcctgaagaatctggcaaagagtcctgtgggttgtttatacctgggtggccagggcctccctctctgttaccaaagtccaggctggcgaattgtctctggttcagggaaaggggacagcccagcttgaagatgagggatggtgaatggctgtgaccatggcagacatcaccaatcaagtgcagcacatgggtgatgtcagaattcttcccagcacagtgttctgggcagccagtaccaatcaatttggcactcatgatgggacctctttgcccttcctgtctggtgtgctctgaaatgggataatggccagagtagctgaaaatctccaaatgggcatttgcatgcctatctcctcatctccccctcccttttgggaaactcctggagtaggcagtttgggggcggtagagggaaactgaggcgcacacccatgcagcccctgatgttctgttccaccgtagttgattctcagtagagttgggaatgaggatgctgttacttggccatttcttcccatctccaaaaatccagagacattacgagagctattcattcataagatggggcaaacagcccccaggcacttgctccctgctccatacttaaggtttgtgatgccaacatttggattctctcttggtgccaatcagtggctgttagaggctactcaggtgtaccccaaacagaaggcacatggatctggggcgactgttccaggtcctcccaacctctgaagtgctcagtagcccaacaacaaggctgctgggggcctgttcttcagcccccgtcagggcggggccagcctctctgtccaatgctgcctggacatttactggggaggtgagtagcaggcccagctccaggatctgaattggaatctcagattctctggataaagaatctgtctcaagtcaggaggtcctcattctgcgactcccaaccagggtggagtgggcacagacaggatgccttatgcttatctctagcacattccagggggttccagggttcctgcacctggaatccagtgtgtccaagccagtattaaattatctcaacaca

SEQ ID NO: 18607 - DNA, 2415 bp, Homo sapiens
  source 1..2415: mol_type = unassigned DNA
ctcgggatttggcgtcggcggctccgggcgcctccagctccggctcgggctccggctccggctccgggcgccgaccaggtccccttggcccccgccgcgcgccctccaacctgctgctgccgccgccgcgccccccaggctctgccagctacccgcgctctgagcccggggccagattcccatggaagcgccgcgatgttcgccccccggctgctggatttccagaagacgaaatacgcgaggttcatgaaccaccgagtccctgcccacaagaggtaccagcccacagagtatgaacatgcggccaactgtgccacccatgctttctggatcatccccagcatcctgggcagctccaacctctacttcctgtcggacgatgactgggagaccatctctgcctggatctacggcctcggcctctgcggcctcttcgtggtgtccactgtgtttcacaccatctcctggaagaagagccacctcaggatggtggaacactgtctacacatgttcgaccggatggtcatctatttcttcatagcggcttcctacgcaccctggctgaaccttcgggagctgggcccctgggcctcccacatgcgctggctggtctggattatggcttccgtgggcaccatctatgtcttcttcttccatgagcgaacagggagctgtgtgcagtttcttcgtggggaggcatgtcctaaggccggcacggcttgtcttcctgccaggtacaagcttgtggagcttctctgctacgtcgtaatgggcttcttccccgccctggtcatcctctccatgcccaacaccgagggcatctgggagctggtgaccggaggggtcttctactgcctgggcatggtcttcttcaagagtgacgggaggatcccctttgcccacgccatctggcatctctttgtagcatttggtgctggtacccactactatgccatctggaggtacctctatctgcccagcaccctgcagaccaaggtgtccaaatgaggtgacccagacttgagaggtcgtttgggctttaggagtggagcacgtttctgtgaacgttaacccagagcacagcgccaaggcctgtcttccctttattgggtagagttcttgatggctccaaggtgacttctggtgacagccagatcatccctcgagtccccagcgagaaagaaagcatttagccattcttacagaggagaaattaaccctgtaatgtgtttctattttagatgagtgtttcctaatacaagcaacattaacatcttcagaaaaggaagcaggcatggtcctggaaaattggggaatgacgggccaatctgtgtttcctaaggtcctgaagaatctggcaaagagtcctgtgggttgtttatacctgggtggccagggcctccctctctgttaccaaagtccaggctggcgaattgtctctggttcagggaaaggggacagcccagcttgaagatgagggatggtgaatggctgtgaccatggcagacatcaccaatcaagtgcagcacatgggtgatgtcagaattcttcccagcacagtgttctgggcagccagtaccaatcaatttggcactcatgatgggacctctttgcccttcctgtctggtgtgctctgaaatgggataatggccagagtagctgaaaatctccaaatgggcatttgcatgcctatctcctcatctccccctcccttttgggaaactcctggagtaggcagtttgggggcggtagagggaaactgaggcgcacacccatgcagcccctgatgttctgttccaccgtagttgattctcagtagagttgggaatgaggatgctgttacttggccatttcttcccatctccaaaaatccagagacattacgagagctattcattcataagatggggcaaacagcccccaggcacttgctccctgctccatacttaaggtttgtgatgccaacatttggattctctcttggtgccaatcagtggctgttagaggctactcaggtgtaccccaaacagaaggcacatggatctggggcgactgttccaggtcctcccaacctctgaagtgctcagtagcccaacaacaaggctgctgggggcctgttcttcagcccccgtcagggcggggccagcctctctgtccaatgctgcctggacatttactggggaggtgagtagcaggcccagctccaggatctgaattggaatctcagattctctggataaagaatctgtctcaagtcaggaggtcctcattctgcgactcccaaccagggtggagtgggcacagacaggatgccttatgcttatctctagcacattccagggggttccagggttcctgcacctggaatccagtgtgtccaagccagtattaaattatctcaacacattccacaga

SEQ ID NO: 18608 - DNA, 2372 bp, Homo sapiens
  source 1..2372: mol_type = unassigned DNA
ctccgggcgcctccagctccggctcgggctccggctccggctccgggcgccgaccaggtccccttggcccccgccgcgcgccctccaacctgctgctgccgccgccgcgccccccaggctctgccagctacccgcgctctgagcccggggccagattcccatggaagcgccgcgatgttcgccccccggctgctggatttccagaagacgaaatacgcgaggttcatgaaccaccgagtccctgcccacaagaggtaccagcccacagagtatgaacatgcggccaactgtgccacccatgctttctggatcatccccagcatcctgggcagctccaacctctacttcctgtcggacgatgactgggagaccatctctgcctggatctacggcctcggcctctgcggcctcttcgtggtgtccactgtgtttcacaccatctcctggaagaagagccacctcaggatggtggaacactgtctacacatgttcgaccggatggtcatctatttcttcatagcggcttcctacgcaccctggctgaaccttcgggagctgggcccctgggcctcccacatgcgctggctggtctggattatggcttccgtgggcaccatctatgtcttcttcttccatgagcggtacaagcttgtggagcttctctgctacgtcgtaatgggcttcttccccgccctggtcatcctctccatggcggggaaactgaggcctggcatgacttgtctaaagaggcagtaggccagcccaacaccgagggcatctgggagctggtgaccggaggggtcttctactgcctgggcatggtcttcttcaagagtgacgggaggatcccctttgcccacgccatctggcatctctttgtagcatttggtgctggtacccactactatgccatctggaggtacctctatctgcccagcaccctgcagaccaaggtgtccaaatgaggtgacccagacttgagaggtcgtttgggctttaggagtggagcacgtttctgtgaacgttaacccagagcacagcgccaaggcctgtcttccctttattgggtagagttcttgatggctccaaggtgacttctggtgacagccagatcatccctcgagtccccagcgagaaagaaagcatttagccattcttacagaggagaaattaaccctgtaatgtgtttctattttagatgagtgtttcctaatacaagcaacattaacatcttcagaaaaggaagcaggcatggtcctggaaaattggggaatgacgggccaatctgtgtttcctaaggtcctgaagaatctggcaaagagtcctgtgggttgtttatacctgggtggccagggcctccctctctgttaccaaagtccaggctggcgaattgtctctggttcagggaaaggggacagcccagcttgaagatgagggatggtgaatggctgtgaccatggcagacatcaccaatcaagtgcagcacatgggtgatgtcagaattcttcccagcacagtgttctgggcagccagtaccaatcaatttggcactcatgatgggacctctttgcccttcctgtctggtgtgctctgaaatgggataatggccagagtagctgaaaatctccaaatgggcatttgcatgcctatctcctcatctccccctcccttttgggaaactcctggagtaggcagtttgggggcggtagagggaaactgaggcgcacacccatgcagcccctgatgttctgttccaccgtagttgattctcagtagagttgggaatgaggatgctgttacttggccatttcttcccatctccaaaaatccagagacattacgagagctattcattcataagatggggcaaacagcccccaggcacttgctccctgctccatacttaaggtttgtgatgccaacatttggattctctcttggtgccaatcagtggctgttagaggctactcaggtgtaccccaaacagaaggcacatggatctggggcgactgttccaggtcctcccaacctctgaagtgctcagtagcccaacaacaaggctgctgggggcctgttcttcagcccccgtcagggcggggccagcctctctgtccaatgctgcctggacatttactggggaggtgagtagcaggcccagctccaggatctgaattggaatctcagattctctggataaagaatctgtctcaagtcaggaggtcctcattctgcgactcccaaccagggtggagtgggcacagacaggatgccttatgcttatctctagcacattccagggggttccagggttcctgcacctggaatccagtgtgtccaagccagtattaaattatctcaacacattccacaga

SEQ ID NO: 18609 - DNA, 4612 bp, Homo sapiens
  source 1..4612: mol_type = unassigned DNA
ctccatctttctagtccccaccttccccggtgcagacacccggcgaagcccacccggttttcccagcggcatttccgatgacagcttcggggctacgtgtcctgtgctgtcggagacgcacaggaagcaaagtttgtgagaagccttgggggcgactttgccttgggcacccgcatttgtgcgtctgcgaggtgcctcggtgtgcgcggagctagtttcccagtttcccgggcccctcccttctccgagcccctctagcgatttgtttaggaaaagtgatgacatgaactagtagtggagaatcgcagcgccgctccccgccctggggagggaggggagccccggagagcctgccggtgggagctggaagcaggctcccggctgagcgccccagcccgaaaggcagggtctgggtgcgggaagagggctcggagctgccttcctgctgccttggggccgcccagatgagggaacagcccgatttgcctggttctgattctccaggctgtcgtggttgtggaatgcaaacgccagcacataatggaaacaggacctgaagacccttccagcatgccagaggaaagttcccccaggcggaccccgcagagcattccctaccaggacctccctcacctggtcaatgcagacggacagtacctcttctgcaggtactggaaacccacaggcacacccaaggccctcatctttgtgtcccatggagccggagagcacagtggccgctatgaagagctggctcggatgctgatggggctggacctgctggtgttcgcccacgaccatgttggccacggacagagcgaaggggagaggatggtagtgtctgacttccacgttttcgtcagggatgtgttgcagcatgtggattccatgcagaaagactaccctgggcttcctgtcttccttctgggccactccatgggaggcgccatcgccatcctcacggccgcagagaggccgggccacttcgccggcatggtactcatttcgcctctggttcttgccaatcctgaatctgcaacaactttcaaggtccttgctgcgaaagtgctcaaccttgtgctgccaaacttgtccctcgggcccatcgactccagcgtgctctctcggaataagacagaggtcgacatttataactcagaccccctgatctgccgggcagggctgaaggtgtgcttcggcatccaactgctgaatgccgtctcacgggtggagcgcgccctccccaagctgactgtgcccttcctgctgctccagggctctgccgatcgcctatgtgacagcaaaggggcctacctgctcatggagttagccaagagccaggacaagactctcaagatttatgaaggtgcctaccatgttctccacaaggagcttcctgaagtcaccaactccgtcttccatgaaataaacatgtgggtctctcaaaggacagccacggcaggaactgcgtccccaccctgaatgcattggccggtgcccggctcatggtctgggggatgcaggcaggggaagggcagagatggcttctcagatatggcttgccaaaaaaaaaaaaaaaaaaaaatcagaaattggagaaatccttagcacaattttctaaaaaataacagacatttttgttatacattagactatcagacactggacctaccttaatggttagacactttatgcaaaaaaagagaaaggtcccaggtgattttccacaaagaatgtgctaaaatgtccactgaaaacaaagccaagcctctgccctgcctctcccagctcccacaagggttccaggaattcctggtgttcccaggacaccagactgcaataactggaggcgcctccttcctgcccacccttcgctcacgccccagcgccctctctgaccagcctccgcttggtggccttcctctggccgtgtgatgaggtggttgctgtctccataggggccagctccccagggcagactcacgtgcccctctgaggctcagaaaatgcccagcccttcctcaaaatgagcagccacccatgactttgtgggctccttgttagcctgagaccaggctttgcagaggggcggggggtgaggcttagcccagaaggagaactgagcaggaaaccaaggctcttctctgtcccctgcccttcccctcctgccagggggaggctcaggttggtccccgagtgccgcctgtactcacaaaggctgcctttcctctagagtcactaattttacctgatgctatgagagaatcatattgaagatgaaatgtctaatatataatgtatattttaaagcagagactattttggtggataggtgggagggagcaaggggagtttgagggaatcagagcttgatgctactgtacagaactggacaggttgggccggcagtggtggggccagagggctctgtgctctaggagctaagccagcagcccccgagaggggacttggctgggcctttcctatgggcaaggcccagtgctcttcctgcccaccagggaccatggagcagtggcaccctatggggctatgatccctaggcctgggcctgggcctgcctatggcccagagctaccctgggagtgtcagtgctagcagcacagctacctctggtggcaggagaagagaggcccagcacagcagcaggccaggccttcctgtccaggtctgcatggagcactcggtgacccagagcagggactggaggcacccccagccctgccccaggccacagcaggacaggccgggacaggcctcacccaaggccaaggctggcatcagccaatcattcagagctgaggccctgggcctagcctgcccttctcaggtgccaataccaccccagccctgcccttggcctcactttttcccagcaataagtggggttcaccacccgcctcgggaatactttccccttctaaatgggacttgctgttacctcaggaggctccttagtgcaaatatgaccctggtcagggctttgccaccgttgaagccctgcagaaggtgcaatgtaggggttctggggccacagaggagaggccacttcccaccaggacccccaacatgaagtctaggcctcaggggctcccgcccttcttcctccagcagcgggaactgccactgctctcccaggccctgttctggaggctaaccttggttcctggagagtgtgcccctccaccctccctccagcagccctgatcacaccatgagagccaggaacgggtcaccctgctgaagatcactctgtgccctgggggaggagccaagccctcaccccacaaggggcaggtgggggcttggttgctgacccggcccaagtccccacagagcaccttctgtagctccagcttgtctccctggcttctctttgaaggagaaaaatgtaaaatatgcactgagaaagccagccccgcctgcttagtcagccccggcagcagggcagccatgggaactcaggaaaagcaggaaccctttccaaaagcccagagatgccctgggctcagatctgtaattctcccaggagctgtgatagagcaggccacacaaagtccctacgcctccctgctgcctcccccagatgcatgtggtggcatcaccattccccaaattgaatatcagcatgcggcctgaccagggactctttagatgcatgaatttatttatatgaaggctctcacagagacacacacagcacttcagtagcatttgcattcctggttaaagaatcaccaatatttaaaataaaaactttcctgaaattgggactgtcatgttatccagaagggctggtacatccgcccaccatgtccccctgctgggtcaggagccaacacaggaccctgcgtgtgagcgtgcctgacatctcacgcacggccactccagagccggtccctgtccttggaaagctgtgaagccttgcgttgagttccttctcgatactgacggctccgtgctgacattctgagctctggagtcacaccagcgcaggggcgtggaggaactgaggtttggaaggaatgccaggtctcgcacagcttggcctcgagaaggtgagaggaaggcaaaggccagggaggggacccagagaggcctggcacacaaggcccaagcaccaccgtcaacacagcccagtccatacagaaatgggtttcatgcctgaaaagctttttacagaaagatgccgcctgtagccagtgacagccgcaaccctacaggcctcagttccttgcagaggtgaggggtagagagtcagcctccctcccttccagcagcgacccagcttccctccacttccaggtggtgctgggctcaccgagggagcactggtgggtgctctgaaaacccacaggatcccacctccaggcccacctgggtcccatctcactctcttcttctttcaccaattgctaacatagaccttgttgggatcacgatggcttcacaagccagctgttgggtttgctatgtcactgtggctcagtcacatccctgcgtgtatactgtctgcggggcacatatgtatccatttagagctaaaggaatcagtgtacactacagctaatcctaataaatccgatgttttcgg

SEQ ID NO: 18610 - DNA, 4187 bp, Homo sapiens
  source 1..4187: mol_type = unassigned DNA
tggcggcgcagacgccgcaccctgtcgccgcgaagccggtcgcgcgcagctcgtcccggccctggcccgccgcaaacgaggatccgctgcgctcggggaacgcgacagcggcgctcgtggccccggacctgaagacccttccagcatgccagaggaaagttcccccaggcggaccccgcagagcattccctaccaggacctccctcacctggtcaatgcagacggacagtacctcttctgcaggtactggaaacccacaggcacacccaaggccctcatctttgtgtcccatggagccggagagcacagtggccgctatgaagagctggctcggatgctgatggggctggacctgctggtgttcgcccacgaccatgttggccacggacagagcgaaggggagaggatggtagtgtctgacttccacgttttcgtcagggatgtgttgcagcatgtggattccatgcagaaagactaccctgggcttcctgtcttccttctgggccactccatgggaggcgccatcgccatcctcacggccgcagagaggccgggccacttcgccggcatggtactcatttcgcctctggttcttgccaatcctgaatctgcaacaactttcaaggtccttgctgcgaaagtgctcaaccttgtgctgccaaacttgtccctcgggcccatcgactccagcgtgctctctcggaataagacagaggtcgacatttataactcagaccccctgatctgccgggcagggctgaaggtgtgcttcggcatccaactgctgaatgccgtctcacgggtggagcgcgccctccccaagctgactgtgcccttcctgctgctccagggctctgccgatcgcctatgtgacagcaaaggggcctacctgctcatggagttagccaagagccaggacaagactctcaagatttatgaaggtgcctaccatgttctccacaaggagcttcctgaagtcaccaactccgtcttccatgaaataaacatgtgggtctctcaaaggacagccacggcaggaactgcgtccccaccctgaatgcattggccggtgcccggctcatggtctgggggatgcaggcaggggaagggcagagatggcttctcagatatggcttgccaaaaaaaaaaaaaaaaaaaaatcagaaattggagaaatccttagcacaattttctaaaaaataacagacatttttgttatacattagactatcagacactggacctaccttaatggttagacactttatgcaaaaaaagagaaaggtcccaggtgattttccacaaagaatgtgctaaaatgtccactgaaaacaaagccaagcctctgccctgcctctcccagctcccacaagggttccaggaattcctggtgttcccaggacaccagactgcaataactggaggcgcctccttcctgcccacccttcgctcacgccccagcgccctctctgaccagcctccgcttggtggccttcctctggccgtgtgatgaggtggttgctgtctccataggggccagctccccagggcagactcacgtgcccctctgaggctcagaaaatgcccagcccttcctcaaaatgagcagccacccatgactttgtgggctccttgttagcctgagaccaggctttgcagaggggcggggggtgaggcttagcccagaaggagaactgagcaggaaaccaaggctcttctctgtcccctgcccttcccctcctgccagggggaggctcaggttggtccccgagtgccgcctgtactcacaaaggctgcctttcctctagagtcactaattttacctgatgctatgagagaatcatattgaagatgaaatgtctaatatataatgtatattttaaagcagagactattttggtggataggtgggagggagcaaggggagtttgagggaatcagagcttgatgctactgtacagaactggacaggttgggccggcagtggtggggccagagggctctgtgctctaggagctaagccagcagcccccgagaggggacttggctgggcctttcctatgggcaaggcccagtgctcttcctgcccaccagggaccatggagcagtggcaccctatggggctatgatccctaggcctgggcctgggcctgcctatggcccagagctaccctgggagtgtcagtgctagcagcacagctacctctggtggcaggagaagagaggcccagcacagcagcaggccaggccttcctgtccaggtctgcatggagcactcggtgacccagagcagggactggaggcacccccagccctgccccaggccacagcaggacaggccgggacaggcctcacccaaggccaaggctggcatcagccaatcattcagagctgaggccctgggcctagcctgcccttctcaggtgccaataccaccccagccctgcccttggcctcactttttcccagcaataagtggggttcaccacccgcctcgggaatactttccccttctaaatgggacttgctgttacctcaggaggctccttagtgcaaatatgaccctggtcagggctttgccaccgttgaagccctgcagaaggtgcaatgtaggggttctggggccacagaggagaggccacttcccaccaggacccccaacatgaagtctaggcctcaggggctcccgcccttcttcctccagcagcgggaactgccactgctctcccaggccctgttctggaggctaaccttggttcctggagagtgtgcccctccaccctccctccagcagccctgatcacaccatgagagccaggaacgggtcaccctgctgaagatcactctgtgccctgggggaggagccaagccctcaccccacaaggggcaggtgggggcttggttgctgacccggcccaagtccccacagagcaccttctgtagctccagcttgtctccctggcttctctttgaaggagaaaaatgtaaaatatgcactgagaaagccagccccgcctgcttagtcagccccggcagcagggcagccatgggaactcaggaaaagcaggaaccctttccaaaagcccagagatgccctgggctcagatctgtaattctcccaggagctgtgatagagcaggccacacaaagtccctacgcctccctgctgcctcccccagatgcatgtggtggcatcaccattccccaaattgaatatcagcatgcggcctgaccagggactctttagatgcatgaatttatttatatgaaggctctcacagagacacacacagcacttcagtagcatttgcattcctggttaaagaatcaccaatatttaaaataaaaactttcctgaaattgggactgtcatgttatccagaagggctggtacatccgcccaccatgtccccctgctgggtcaggagccaacacaggaccctgcgtgtgagcgtgcctgacatctcacgcacggccactccagagccggtccctgtccttggaaagctgtgaagccttgcgttgagttccttctcgatactgacggctccgtgctgacattctgagctctggagtcacaccagcgcaggggcgtggaggaactgaggtttggaaggaatgccaggtctcgcacagcttggcctcgagaaggtgagaggaaggcaaaggccagggaggggacccagagaggcctggcacacaaggcccaagcaccaccgtcaacacagcccagtccatacagaaatgggtttcatgcctgaaaagctttttacagaaagatgccgcctgtagccagtgacagccgcaaccctacaggcctcagttccttgcagaggtgaggggtagagagtcagcctccctcccttccagcagcgacccagcttccctccacttccaggtggtgctgggctcaccgagggagcactggtgggtgctctgaaaacccacaggatcccacctccaggcccacctgggtcccatctcactctcttcttctttcaccaattgctaacatagaccttgttgggatcacgatggcttcacaagccagctgttgggtttgctatgtcactgtggctcagtcacatccctgcgtgtatactgtctgcggggcacatatgtatccatttagagctaaaggaatcagtgtacactacagctaatcctaataaatccgatgttttcgg

SEQ ID NO: 18611 - DNA, 4941 bp, Homo sapiens
  source 1..4941: mol_type = unassigned DNA
gtcgccgcgaagccggtcgcgcgcagctcgtcccggccctggcccgccgcaaacgaggatccgctgcgctcggggaacgcgacagcggcgctcgtggccccggtaactgcctcccggcccctgccccagcccgccagtgccgccgtcaggggtggggagcagcactggggtcccggacacgcccggcgtgggctcccgctacccatgtgtgcgtgtgtgtgtgtgcacggtgtgtgtgcgcgcgtgtccgagtgtgcgcgcgtgtgcgcgcgcgcgcgccctccctgctccttcgcaccagcccccaaaccaacttgtccccatcaactccatctttctagtccccaccttccccggtgcagacacccggcgaagcccacccggttttcccagcggcatttccgatgacagcttcggggctacgtgtcctgtgctgtcggagacgcacaggaagcaaagtttgtgagaagccttgggggcgactttgccttgggcacccgcatttgtgcgtctgcgaggtgcctcggtgtgcgcggagctagtttcccagtttcccgggcccctcccttctccgagcccctctagcgatttgtttaggaaaagtgatgacatgaactagtagtggagaatcgcagcgccgctccccgccctggggagggaggggagccccggagagcctgccggtgggagctggaagcaggctcccggctgagcgccccagcccgaaaggcagggtctgggtgcgggaagagggctcggagctgccttcctgctgccttggggccgcccagatgagggaacagcccgatttgcctggttctgattctccaggctgtcgtggttgtggaatgcaaacgccagcacataatggaaacaggacctgaagacccttccagcatgccagaggaaagttcccccaggcggaccccgcagagcattccctaccaggacctccctcacctggtcaatgcagacggacagtacctcttctgcaggtactggaaacccacaggcacacccaaggccctcatctttgtgtcccatggagccggagagcacagtggccgctatgaagagctggctcggatgctgatggggctggacctgctggtgttcgcccacgaccatgttggccacggacagagcgaaggggagaggatggtagtgtctgacttccacgttttcgtcagggatgtgttgcagcatgtggattccatgcagaaagactaccctgggcttcctgtcttccttctgggccactccatgggaggcgccatcgccatcctcacggccgcagagaggccgggccacttcgccggcatggtactcatttcgcctctggttcttgccaatcctgaatctgcaacaactttcaaggtccttgctgcgaaagtgctcaaccttgtgctgccaaacttgtccctcgggcccatcgactccagcgtgctctctcggaataagacagaggtcgacatttataactcagaccccctgatctgccgggcagggctgaaggtgtgcttcggcatccaactgctgaatgccgtctcacgggtggagcgcgccctccccaagctgactgtgcccttcctgctgctccagggctctgccgatcgcctatgtgacagcaaaggggcctacctgctcatggagttagccaagagccaggacaagactctcaagatttatgaaggtgcctaccatgttctccacaaggagcttcctgaagtcaccaactccgtcttccatgaaataaacatgtgggtctctcaaaggacagccacggcaggaactgcgtccccaccctgaatgcattggccggtgcccggctcatggtctgggggatgcaggcaggggaagggcagagatggcttctcagatatggcttgccaaaaaaaaaaaaaaaaaaaaatcagaaattggagaaatccttagcacaattttctaaaaaataacagacatttttgttatacattagactatcagacactggacctaccttaatggttagacactttatgcaaaaaaagagaaaggtcccaggtgattttccacaaagaatgtgctaaaatgtccactgaaaacaaagccaagcctctgccctgcctctcccagctcccacaagggttccaggaattcctggtgttcccaggacaccagactgcaataactggaggcgcctccttcctgcccacccttcgctcacgccccagcgccctctctgaccagcctccgcttggtggccttcctctggccgtgtgatgaggtggttgctgtctccataggggccagctccccagggcagactcacgtgcccctctgaggctcagaaaatgcccagcccttcctcaaaatgagcagccacccatgactttgtgggctccttgttagcctgagaccaggctttgcagaggggcggggggtgaggcttagcccagaaggagaactgagcaggaaaccaaggctcttctctgtcccctgcccttcccctcctgccagggggaggctcaggttggtccccgagtgccgcctgtactcacaaaggctgcctttcctctagagtcactaattttacctgatgctatgagagaatcatattgaagatgaaatgtctaatatataatgtatattttaaagcagagactattttggtggataggtgggagggagcaaggggagtttgagggaatcagagcttgatgctactgtacagaactggacaggttgggccggcagtggtggggccagagggctctgtgctctaggagctaagccagcagcccccgagaggggacttggctgggcctttcctatgggcaaggcccagtgctcttcctgcccaccagggaccatggagcagtggcaccctatggggctatgatccctaggcctgggcctgggcctgcctatggcccagagctaccctgggagtgtcagtgctagcagcacagctacctctggtggcaggagaagagaggcccagcacagcagcaggccaggccttcctgtccaggtctgcatggagcactcggtgacccagagcagggactggaggcacccccagccctgccccaggccacagcaggacaggccgggacaggcctcacccaaggccaaggctggcatcagccaatcattcagagctgaggccctgggcctagcctgcccttctcaggtgccaataccaccccagccctgcccttggcctcactttttcccagcaataagtggggttcaccacccgcctcgggaatactttccccttctaaatgggacttgctgttacctcaggaggctccttagtgcaaatatgaccctggtcagggctttgccaccgttgaagccctgcagaaggtgcaatgtaggggttctggggccacagaggagaggccacttcccaccaggacccccaacatgaagtctaggcctcaggggctcccgcccttcttcctccagcagcgggaactgccactgctctcccaggccctgttctggaggctaaccttggttcctggagagtgtgcccctccaccctccctccagcagccctgatcacaccatgagagccaggaacgggtcaccctgctgaagatcactctgtgccctgggggaggagccaagccctcaccccacaaggggcaggtgggggcttggttgctgacccggcccaagtccccacagagcaccttctgtagctccagcttgtctccctggcttctctttgaaggagaaaaatgtaaaatatgcactgagaaagccagccccgcctgcttagtcagccccggcagcagggcagccatgggaactcaggaaaagcaggaaccctttccaaaagcccagagatgccctgggctcagatctgtaattctcccaggagctgtgatagagcaggccacacaaagtccctacgcctccctgctgcctcccccagatgcatgtggtggcatcaccattccccaaattgaatatcagcatgcggcctgaccagggactctttagatgcatgaatttatttatatgaaggctctcacagagacacacacagcacttcagtagcatttgcattcctggttaaagaatcaccaatatttaaaataaaaactttcctgaaattgggactgtcatgttatccagaagggctggtacatccgcccaccatgtccccctgctgggtcaggagccaacacaggaccctgcgtgtgagcgtgcctgacatctcacgcacggccactccagagccggtccctgtccttggaaagctgtgaagccttgcgttgagttccttctcgatactgacggctccgtgctgacattctgagctctggagtcacaccagcgcaggggcgtggaggaactgaggtttggaaggaatgccaggtctcgcacagcttggcctcgagaaggtgagaggaaggcaaaggccagggaggggacccagagaggcctggcacacaaggcccaagcaccaccgtcaacacagcccagtccatacagaaatgggtttcatgcctgaaaagctttttacagaaagatgccgcctgtagccagtgacagccgcaaccctacaggcctcagttccttgcagaggtgaggggtagagagtcagcctccctcccttccagcagcgacccagcttccctccacttccaggtggtgctgggctcaccgagggagcactggtgggtgctctgaaaacccacaggatcccacctccaggcccacctgggtcccatctcactctcttcttctttcaccaattgctaacatagaccttgttgggatcacgatggcttcacaagccagctgttgggtttgctatgtcactgtggctcagtcacatccctgcgtgtatactgtctgcggggcacatatgtatccatttagagctaaaggaatcagtgtacactacagctaatcctaataaatccgatgttttcggaa

SEQ ID NO: 18612 - DNA, 966 bp, Homo sapiens
  source 1..966: mol_type = unassigned DNA
gtcgtggttgtggaatgcaaacgccagcacataatggaaacaggacctgaagacccttccagcatgccagaggaaagttcccccaggcggaccccgcagagcattccctaccaggacctccctcacctggtcaatgcagacggacagtacctcttctgcaggtactggaaacccacaggcacacccaaggccctcatctttgtgtcccatggagccggagagcacagtggccgctatgaagagctggctcggatgctgatggggctggacctgctggtgttcgcccacgaccatgttggccacggacagagcgaaggggagaggatggtagtgtctgacttccacgttttcgtcagggatgtgttgcagcatgtggattccatgcagaaagactaccctgggcttcctgtcttccttctgggccactccatgggaggcgccatcgccatcctcacggccgcagagaggccgggccacttcgccggcatggtactcatttcgcctctggttcttgccaatcctgaatctgcaacaactttcaaggtcgacatttataactcagaccccctgatctgccgggcagggctgaaggtgtgcttcggcatccaactgctgaatgccgtctcacgggtggagcgcgccctccccaagctgactgtgcccttcctgctgctccagggctctgccgatcgcctatgtgacagcaaaggggcctacctgctcatggagttagccaagagccaggacaagactctcaagatttatgaaggtgcctaccatgttctccacaaggagcttcctgaagtcaccaactccgtcttccatgaaataaacatgtgggtctctcaaaggacagccacggcaggaactgcgtccccaccctgaatgcattggccggtgcccggctcatggtctgggggatgcaggcaggggaagggcagagatggcttctcagatatggcttgc

SEQ ID NO: 18613 - DNA, 410 bp, Homo sapiens
  source 1..410: mol_type = unassigned DNA
acagctaaaatagtctttaagatgaagtttcctgaaatgatttaaaataaacacagatgggaagggggaaaaactgtaatgaggcacttaaaaaataaagtgagcattttcttaagaacaaatgggatttttcagtcttggagaggtttgcaagaaatgacctgaagacccttccagcatgccagaggaaagttcccccaggcggaccccgcagagcattccctaccaggacctccctcacctggtcaatgcagacggacagtacctcttctgcaggtactggaaacccacaggcacacccaaggccctcatctttgtgtcccatggagccggagagcacagtggccgctatgaagagctggctcggatgctgatggggctggacctgctggtgttcgcccacgaccatg

SEQ ID NO: 18614 - DNA, 1023 bp, Homo sapiens
  source 1..1023: mol_type = unassigned DNA
atgaagacaagacctgaagacccttccagcatgccagaggaaagttcccccaggcggaccccgcagagcattccctaccaggacctccctcacctggtcaatgcagacggacagtacctcttctgcaggtactggaaacccacaggcacacccaaggccctcatctttgtgtcccatggagccggagagcacagtggccgctatgaagagctggctcggatgctgatggggctggacctgctggtgttcgcccacgaccatgttggccacggacagagcgaaggggagaggatggtagtgtctgacttccacgttttcgtcagggatgtgttgcagcatgtggattccatgcagaaagactaccctgggcttcctgtcttccttctgggccactccatgggaggcgccatcgccatcctcacggccgcagagaggccgggccacttcgccggcatggtactcatttcgcctctggttcttgccaatcctgaatctgcaacaactttcaaggtccttgctgcgaaagtgctcaaccttgtgctgccaaacttgtccctcgggcccatcgactccagcgtgctctctcggaataagacagaggtcgacatttataactcagaccccctgatctgccgggcagggctgaaggtgtgcttcggcatccaactgctgaatgccgtctcacgggtggagcgcgccctccccaagctgactgtgcccttcctgctgctccagggctctgccgatcgcctatgtgacagcaaaggggcctacctgctcatggagttagccaagagccaggacaagactctcaagatttatgaaggtgcctaccatgttctccacaaggagcttcctgaagtcaccaactccgtcttccatgaaataaacatgtgggtctctcaaaggacagccacggcaggaactgcgtccccaccctgaatgcattggccggtgcccggctcatggtctgggggatgcaggcaggggaagggcagagatggcttctcagatatggcttgc

SEQ ID NO: 18615 - DNA, 3059 bp, Homo sapiens
  source 1..3059: mol_type = unassigned DNA
gcgcggccggcccgaggggcggtccctgggctcccgctcgccgccgctgccgctcctcgttctgctcctcactccccagcggctggaggccggtaccggcgggcaggaggcgcccgaggatgtgctgctggccgctgctcctgctgtgggggctgctccccgggacggcggcggggggctcgggccgaacctatccgcaccggaccctcctggactcggagggcaagtactggctgggctggagccagcggggcagccagatcgccttccgcctccaggtgcgcactgcaggctacgtgggcttcggcttctcgcccaccggggccatggcgtccgccgacatcgtcgtgggcggggtggcccacgggcggccctacctccaggattattttacaaatgcaaatagagagttgaaaaaagatgctcagcaagattaccatctagaatatgccatggaaaatagcacacacacaataattgaatttaccagagagctgcatacatgtgacataaatgacaagagtataacggatagcactgtgagagtgatctgggcctaccaccatgaagatgcaggagaagctggtcccaagtaccatgactccaataggggcaccaagagtttgcggttattgaatcctgagaaaactagtgtgctatctacagccttaccatactttgatctggtaaatcaggacgtccccatcccaaacaaagatacaacatattggtgccaaatgtttaagattcctgtgttccaagaaaagcatcatgtaataaaggttgagccagtgatacagagaggccatgagagtctggtgcaccacatcctgctctatcagtgcagcaacaactttaacgacagcgttctggagtccggccacgagtgctatcaccccaacatgcccgatgcattcctcacctgtgaaactgtgatttttgcctgggctattggtggagagggcttttcttatccacctcatgttggattatcccttggcactccattagatccgcattatgtgctcctagaagtccattatgataatcccacttatgaggaaggcttaatagataattctggactgaggttattttacacaatggatataaggaaatatgatgctggggtgattgaggctggcctctgggtgagcctcttccataccatccctccagggatgcctgagttccagtctgagggtcactgcactttggagtgcctggaagaggctctggaagccgaaaagccaagtggaattcatgtgtttgctgttcttctccatgctcacctggctggcagaggcatcaggctgcgtcattttcgaaaagggaaggaaatgaaattacttgcctatgatgatgattttgacttcaatttccaggagtttcagtatctaaaggaagaacaaacaatcttaccaggagataacctaattactgagtgtcgctacaacacgaaagatagagctgagatgacttggggaggactaagcaccaggagtgaaatgtgtctctcataccttctttattacccaagaattaatcttactcgatgtgcaagtattccagacattatggaacaacttcagttcattggggttaaggagatctacagaccagtcacgacctggcctttcattatcaaaagtcccaagcaatataaaaacctttctttcatggatgctatgaataagtttaaatggactaaaaaggaaggtctctccttcaacaagctggtcctcagcctgccagtgaatgtgagatgttccaagacagacaatgctgagtggtcgattcaaggaatgacagcattacctccagatatagaaagaccctataaagcagaacctttggtgtgtggcacgtcttcttcctcttccctgcacagagatttctccatcaacttgcttgtttgccttctgctactcagctgcacgctgagcaccaagagcttgtgatcaaaattctgttggacttgacaatgttttctatgatctgaacctgtcatttgaagtacaggttaaagactgtgtccactttgggcatgaagagtgtggagacttttcttccccattttccctccctcctttttcctttccatgttacatgagagacatcaatcaggttctcttctctttcttagaaatatctgatgttatatatacatggtcaataaaataaaactggcctgacttaagataaccattttaaaaaattgggctgtcatgtgggaataaaagaattctttctttcctactacattctgttttatttaaatactcattgttgctatttcactttttgacttgacttttatatttctttaaaaaattccttccttttaaaaaatataaaagggactactgttcattccagttttcttcttctttgttgttcttctagtgtgacttttcaagtgtaacagccattcttcctgactttaatattgtccagttctggtcttttctgtgaattaccactgggccccttacctcaatgctttttgttgatgcccactctggttcccttgtttatctgagtctgttggtaccccaaatgaccccacacccatcttaaagtactttttttcaccttccctgtttagtactggccagatgagttttttctagagctctgtcactatctgaaaagaaagaggctatgggaaacatagaaatggtatgtattaataactgatcataggctgaggagaaaaaatgtagctggctgcaaacccagtgctgtgaggtgacttatatgaggttccagatcaaagacaggccgtgtgagccagtccaggagggtgtaagttctgaatggttccttgctgactttgggtgacacatgtaccacatactggctcagtttaagtcatggttctattgtagatttatttttatattagttaataaatgactttaaattgtcaccaattgaaaatcttgtcactcttttggttttctttatatagctcagccaaatcttgttttatgtcctgtcctcatctcttaagctaaatctgtttggatcatattaataaactaaatgaaattaca

SEQ ID NO: 18616 - DNA, 3764 bp, Homo sapiens
  source 1..3764: mol_type = unassigned DNA
gtgggagtgggcgcgggcgcaggcgaacggctgccggtcaggtgtccttgtccccttgagttgcgcgggtcgtgttcgagggcatggacgacaggtaccctgcgcttcagcgggcccagctgcgtctggatttcatccacgccaactccaccactcacagtttcctttttggagcactggctgaattgctggacaatgcaagagatgcaggggctgaaagacttgatgtcttttcagtggataatgaaaaactgcaggggggattcatgttgtgtttcctggatgatggatgtggcatgagccctgaggaagcttcagacatcatttactttggacgatccaaaaaacggctgtcaaccttgaagttcatagggcaatacggcaatggtcttaaaagtgggtccatgagaattggaaaagactttattctttttacgaagaaggaagaaacgatgacctgtgtgtttttttctcagacattctgtgaagaagaaagtcttagtgaggttgtagttccaatgccctcatggttaataagaaccagagaatctgtcacagatgatccccagaaatttgcaatggaattatctataatttataaatactccccatttaaaactgaagcagaattgatgcagcagtttgatgtgatctatggaaaatgtggtactttgctggttatttataacttgaagcttctgcttaatggagaaccagagttggatgttaaaactgacaaagaagatatactgatggctggagctctggaggatttcccagcgaggtggtcattcagagcctacacatctgttctgtattttaacccatggatgagaatattcattcaagccaagagagttaaaactaaacatctttgctattgcctctacagacccagaaagtatctttatgtcacatcttcttttaaaggagcatttaaagatgaagttaaaaaggcagaagaagcagtaaagattgctgaatccatattgaaagaagcacaaatcaaagtaaaccagtgtgacagaacctctttatcttctgccaaggatgtattacagagagctttggaagatgtagaagcaaagcaaaagaatcttaaagagaaacaaagagaattaaaaacagcaagaacgctctccctgttctatggagtgaacgtagaaaaccgaagccaagctggaatgttcatttacagtaataaccgtttgatcaaaatgcatgaaaaagtgggctcacagttgaaactgaagtccttacttggcgcaggcgtggttggaattgttaatatacccttggaggtcatggaaccatcccataataaacaggaatttctcaatgtccaagagtataatcatctactaaaagtcatgggacagtacttggtccagtactgtaaggacaccggcatcaataatagaaatttaacattgttttgcaatgaatttggataccagaatgacatcgatgtggagaaacctttaaattcttttcaatatcaaagaagacaagccatgggtatcccattcatcatacaatgtgatctttgtcttaaatggagagtcttgccttcctctactaattatcaggaaaaagaattttttgacatttggatttgtgctaataatcccaaccgcttggaaaacagttgtcatcaggtagaatgtctaccttccatcccactgggcaccatgagcacaatatcaccatcaaaaaatgagaaagagaagcaacttagagagtcggtcataaagtatcaaaatagactggcagaacagcagccacagcctcaatttataccagtggacgaaatcactgtcacttccacctgcctaacttcagcacataaggaaaataccaaaacccagaaaatcaggcttttgggcgatgacttgaagcatgaatctctttcatcctttgagctttcagcgagccgtagaggacagaaaagaaacatagaagagacagactctgatgtagagtatatttcagaaacaaaaattatgaaaaagtctatggaggagaaaatgaactctcaacagcagagaattccagtagctctgccagaaaatgtcaaactagctgagagatcccagagaagtcagattgctaatattaccactgtctggagagctcaaccaactgaagggtgcctgaagaatgcccaggccgcttcttgggaaatgaaaaggaagcagagtctgaactttgtagaggaatgtaaggtattgactgaagatgagaacacgagtgattcagatataatcctggtttcagataaaagcaacactgatgtttcattgaaacaagaaaaaaaggaaattcctcttttaaaccaagaaaaacaggagctgtgcaatgatgttctagcaatgaaaagaagctcttcattacctagctggaaaagcttgctcaatgtgccgatggaagatgtgaatctaagttctggacacatagccagagtttctgtgagtggcagttgtaaagttgcttcttcgccagcgtcttctcaaagcacacctgtcaaggaaacagtgagaaaactgaagtctaagttaagggagattcttctgtatttttttcctgagcatcagctaccatcagaattggaagaacctgcattaagttgtgagctggagcagtgcccagagcagatgaacaaaaagctgaaaatgtgtttcaaccagatacagaatacttacatggtccaatatgaaaaaaaaataaagaggaaattgcagtccattatctatgattcaaatacaagaggaatacataatgaaatctctctggggcaatgtgaaaataaaagaaaaatctctgaggataagctgaagaatcttcgtataaaactggcactattgttgcagaaactccaactgggtggtccagaaggtgacctggagcagactgacacttatttagaagctttgcttaaagaagataatcttctcttccagaacaatttaaataaagtaactatagatgcaagacatagactccctttagaaaaaaatgaaaagacttcggaaaattaagtcagagatggtattaccttttaaaaaatgctaataagaaaattggaagattcttttaaaaatttttcttttttgttgttgttactgtaaagtctattctgtttaacaataagaaataagaaataatttttttcaaataagaaaattgtgtactctagaaatggagaccgatttacaatttatgtattccctaatccaattatctaaatcttccttttctttcagaaatattaataatatctagagttctctaattttcatgtgagctactgaaaaaaatgaaaatgtcactcaagcttaacttttgttattccttaaaagattgttattgtaattttgttattccttaaaaacatttaaaagcagattttttcaaaatcgatatgtgaaggactacagaatcacctcctcttgaagatattgaaaaagaaagacattatgccctttctccactatagccaacactcagtcaagcagaaaatacaaatccccccaaaactttgagacatagcttatataattttattatttagtcatagtaaaagaataaatctcctaagcataatatgtatacatattacacatatgtaaaaattgttgttttacatttacatatacgtaaagaagtatgtttttacacttttcttgataagtgttttttttttgtttagaaatgtctgaaactttagacaaaaacagtaaaacatttaatattcatttgtgaaa

SEQ ID NO: 18617 - DNA, 2359 bp, Homo sapiens
  source 1..2359: mol_type = unassigned DNA
gcgtgcgcggcgggctgtcgttggctggagcagcggctgcgcgggtcgcggtgctgtgaggtctgcgggcgctggcaaatccggcccaggatgtagagctggcagtgcctgacggcgcgtctgacgcggagttgggtggggtagagagtagggggcggtagtcgggggtggtgggagaaggaggaggcggcgaatcacttataaatggcgccgaagcaggacccgaagcctaaattccaggagggtgagcgagtgctgtgctttcatgggcctcttctttatgaagcaaagtgtgtaaaggttgccataaaggacaaacaagtgaaatacttcatacattacagtggttggaataaaaaaagtgctgtgaggcccaggcgctctgaaaaatctttgaagacacatgaggatattgtagccctttttcctgttcctgaaggagctccctcagtacaccaccccctcctgacctctagttgggatgaatgggttccggagagcagagtactcaaatacgtggacaccaatttgcagaaacagcgagaacttcaaaaagccaatcaggagcagtatgcagaggggaagatgagaggggctgccccaggaaagaagacatctggtctgcaacagaaaaatgttgaagtgaaaacgaaaaagaacaaacagaaaacacctggaaatggagatggtggcagtaccagtgagacccctcagcctcctcggaagaaaagggcccgggtagatcctactgttgaaaatgaggaaacattcatgaacagagttgaagttaaagtaaagattcctgaagagctaaaaccgtggcttgttgatgactgggacttaattaccaggcaaaaacagctcttttatcttcctgccaagaagaatgtggattccattcttgaggattatgcaaattacaagaaatctcgtggaaacacagataataaggagtatgcggttaatgaagttgtggcagggataaaagaatacttcaacgtaatgttgggtacccagctactctataaatttgagagaccacagtatgctgaaattcttgcagatcatcccgatgcacccatgtcccaggtgtatggagcgccacatctcctgagattatttgtacgaattggagcaatgttggcttatacacctctggatgagaagagccttgctttattactcaattatcttcacgatttcctaaagtacctggcaaagaattctgcaactttgttcagtgccagcgattatgaagtggctcctcctgagtaccatcggaaagctgtgtgagaggcactctcactcacttatgtttggatctccgtaaacacatttttgttcttagtctatctcttgtacaaacgatgtgctttgaagatgttagtgtataacaattgatgtttgttttctgtttgattttaaacagagaaaaaataaaagggggtaatagctccttttttcttctttctttttttttttcatttcaaaattgctgccagtgttttcaatgatggacaacagagggatatgctgtagagtgttttattgcctagttgacaaagctgcttttgaatgctggtggttctattcctttgacactacgcacttttataatacatgttaatgctatatgacaaaatgctctgattcctagtgccaaaggttcaattcagtgtatataactgaacacactcatccatttgtgcttttgtttttttttatggtgcttaaagtaaagagcccatcctttgcaagtcatccatgttgttacttaggcattttatcttggctcaaattgttgaagaatggtggcttgtttcatggtttttgtatttgtgtctaatgcacgttttaacatgatagacgcaatgcattgtgtagctagttttctggaaaagtcaatcttttaggaattgtttttcagatcttcaataaattttttctttaaatttcaaagaacaatgtgcttgtgttgatgccttacaaaaaccattgtatatttgtgtattccttcttgtatttagacagtggtttttcaggtgcgtgctttgttttctggtatggcctttatggaatgagacgctttagctttggtacgtagcgctaatccatagcagctttggcagtttgctgtcttgagtcttagctaaaaagttagaagtttacatgactgttttttttattttccctaaattattacttactctgagcattaattaagggcattttcacctgtgtaaaattatggtcagcttttttctgtctataattgtttacttttgtgggtttactctagaaacatgagccaaaaatgtcaatagacaacacagtattaaaataacccaaaagttgtaaa

SEQ ID NO: 18618 - DNA, 2274 bp, Homo sapiens
  source 1..2274: mol_type = unassigned DNA
aacccatggccgggaaaagaagctcctgctccccgctccactcccggcgtcttcacacttggggaagggagaggcaggaagtgcaaggaccgcgcaagacccggccccccgagccgccaggggccgcgccagcagcccagatgcggtgggcgggagctgggggggcggcggggtcccgcgaagacctgcgacctggcgccctcgccggctgtgtcccggccagcccgctttccaggcgagcctcgctaaggagtgtgagaaaccaaatcctcagtgggtaaaccgcgctccgtccagcccactcggacgagagctctcccgggagccaggcgcgttgctgcacccgaggtggggaaaccggagcccgaagagcggaaggggcttattccaggcgacaggcagtgtcagtaactgaatcaggggccgaggaagtttccccagaagcgcggcttcgctcccggcccggcccgaccccgactactgtcccctaatacccagggagcggaagacgcgaccaactccaggcacagcggagccggcgcggggtccacaaagcaaaaaagaatgatccccttcccccatcctcaagtgactgatgctcttggaagatactccaactatatcctgagtagcactgtggagagccccagtctgagaagcatgaactttgagaagcaaggtgagcgagtgctgtgctttcatgggcctcttctttatgaagcaaagtgtgtaaaggttgccataaaggacaaacaagtgaaatacttcatacattacagtggttggaataaaaattgggatgaatgggttccggagagcagagtactcaaatacgtggacaccaatttgcagaaacagcgagaacttcaaaaagccaatcaggagcagtatgcagaggggaagatgagaggggctgccccaggaaagaagacatctggtctgcaacagaaaaatgttgaagtgaaaacgaaaaagaacaaacagaaaacacctggaaatggagatggtggcagtaccagtgagacccctcagcctcctcggaagaaaagggcccgggtagatcctactgttgaaaatgaggaaacattcatgaacagagttgaagttaaagtaaagattcctgaagagctaaaaccgtggcttgttgatgactgggacttaattaccaggcaaaaacagctcttttatcttcctgccaagaagaatgtggattccattcttgaggattatgcaaattacaagaaatctcgtggaaacacagataataaggagtatgcggttaatgaagttgtggcagggataaaagaatacttcaacgtaatgttgggtacccagctactctataaatttgagagaccacagtatgctgaaattcttgcagatcatcccgatgcacccatgtcccaggtgtatggagcgccacatctcctgagattatttgtacgaattggagcaatgttggcttatacacctctggatgagaagagccttgctttattactcaattatcttcacgatttcctaaagtacctggcaaagaattctgcaactttgttcagtgccagcgattatgaagtggctcctcctgagtaccatcggaaagctgtgtgagaggcactctcactcacttatgtttggatctccgtaaacacatttttgttcttagtctatctcttgtacaaacgatgtgctttgaagatgttagtgtataacaattgatgtttgttttctgtttgattttaaacagagaaaaaataaaagggggtaatagctccttttttcttctttctttttttttttcatttcaaaattgctgccagtgttttcaatgatggacaacagagggatatgctgtagagtgttttattgcctagttgacaaagctgcttttgaatgctggtggttctattcctttgacactacgcacttttataatacatgttaatgctatatgacaaaatgctctgattcctagtgccaaaggttcaattcagtgtatataactgaacacactcatccatttgtgcttttgtttttttttatggtgcttaaagtaaagagcccatcctttgcaagtcatccatgttgttacttaggcattttatcttggctcaaattgttgaagaatggtggcttgtttcatggtttttgtatttgtgtctaatgcacgttttaacatgatagacgcaatgcattgtgtagctagttttctggaaaagtcaatcttttaggaattgtttttcagatcttcaataaattttttctttaaatttc

SEQ ID NO: 18619 - DNA, 1880 bp, Homo sapiens
  source 1..1880: mol_type = unassigned DNA
agtcccggcgtgccctggggcggcgcgggcgcaggggcgcgtgcgcggcgggctgtcgttggctggagcagcggctgcgcgggtcgcggtgctgtgaggtctgcgggcgctggcaaatccggcccaggatgtagagctggcagtgcctgacggcgcgtctgacgcggagttgggtggggtagagagtagggggcggtagtcgggggtggtgggagaaggaggaggcggcgaatcacttataaatggcgccgaagcaggacccgaagcctaaattccaggagggtgagcgagtgctgtgctttcatgggcctcttctttatgaagcaaagtgtgtaaaggttgccataaaggacaaacaagtgaaatacttcatacattacagtggttggaataaaaattgggatgaatgggttccggagagcagagtactcaaatacgtggacaccaatttgcagaaacagcgagaacttcaaaaagccaatcaggagcagtatgcagaggggaagatgagaggggctgccccaggaaagaagacatctggtctgcaacagaaaaatgttgaagtgaaaacgaaaaagaacaaacagaaaacacctggaaatggagatggtggcagtaccagtgagacccctcagcctcctcggaagaaaagggcccgggtagatcctactgttgaaaatgaggaaacattcatgaacagagttgaagttaaagtaaagattcctgaagagctaaaaccgtggcttgttgatgactgggacttaattaccaggcaaaaacagctcttttatcttcctgccaagaagaatgtggattccattcttgaggattatgcaaattacaagaaatctcgtggaaacacagataataaggagtatgcggttaatgaagttgtggcagggataaaagaatacttcaacgtaatgttgggtacccagctactctataaatttgagagaccacagtatgctgaaattcttgcagatcatcccgatgcacccatgtcccaggtgtatggagcgccacatctcctgagattatttgtacgaattggagcaatgttggcttatacacctctggatgagaagagccttgctttattactcaattatcttcacgatttcctaaagtacctggcaaagaattctgcaactttgttcagtgccagcgattatgaagtggctcctcctgagtaccatcggaaagctgtgtgagaggcactctcactcacttatgtttggatctccgtaaacacatttttgttcttagtctatctcttgtacaaacgatgtgctttgaagatgttagtgtataacaattgatgtttgttttctgtttgattttaaacagagaaaaaataaaagggggtaatagctccttttttcttctttctttttttttttcatttcaaaattgctgccagtgttttcaatgatggacaacagagggatatgctgtagagtgttttattgcctagttgacaaagctgcttttgaatgctggtggttctattcctttgacactacgcacttttataatacatgttaatgctatatgacaaaatgctctgattcctagtgccaaaggttcaattcagtgtatataactgaacacactcatccatttgtgcttttgtttttttttatggtgcttaaagtaaagagcccatcctttgcaagtcatccatgttgttacttaggcattttatcttggctcaaattgttgaagaatggtggcttgtttcatggtttttgtatttgtgtctaatgcacgttttaacatgatagacgcaatgcattgtgtagctagttttctggaaaagtcaatcttttaggaattgtttttcagatcttcaataaattttttctttaaatttcaaa

SEQ ID NO: 18620 - DNA, 855 bp, Homo sapiens
  source 1..855: mol_type = unassigned DNA
caggacccgaagcctaaattccaggaggttgggatgaatgggttccggagagcagagtactcaaatacgtggacaccaatttgcagaaacagcgagaacttcaaaaagccaatcaggagcagtatgcagaggggaagatgagaggggctgccccaggaaagaagacatctggtctgcaacagaaaaatgttgaagtgaaaacgaaaaagaacaaacagaaaacacctggaaatggagatggtggcagtaccagtgagacccctcagcctcctcggaagaaaagggcccgggtagatcctactgttgaaaatgaggaaacattcatgaacagagttgaagttaaagtaaagattcctgaagagctaaaaccgtggcttgttgatgactgggacttaattaccaggcaaaaacagctcttttatcttcctgccaagaagaatgtggattccattcttgaggattatgcaaattacaagaaatctcgtggaaacacagataataaggagtatgcggttaatgaagttgtggcagggataaaagaatacttcaacgtaatgttgggtacccagctactctataaatttgagagaccacagtatgctgaaattcttgcagatcatcccgatgcacccatgtcccaggtgtatggagcgccacatctcctgagattatttgtacgaattggagcaatgttggcttatacacctctggatgagaagagccttgctttattactcaattatcttcacgatttcctaaagtacctggcaaagaattctgcaactttgttcagtgccagcgattatgaagtggctcctcctgagtaccatcggaaagctgtgtgagaggcactct

SEQ ID NO: 18621 - DNA, 1468 bp, Homo sapiens
  source 1..1468: mol_type = unassigned DNA
gaatcacttataaatggcgccgaagcaggacccgaagcctaaattccaggagggtgagtgtgcgcctttgggaaaaaggcacctaacggcgcaggagatagaggcgggctcgaggtgattgaggcttgagggccgggggcggcgcgggctgcgccctgagaaggcggcggtcagtgctttgtgcggggaaagcgcattgcggatggcaattccggtgagcgagtgctgtgctttcatgggcctcttctttatgaagcaaagtgtgtaaaggttgccataaaggacaaacaagtgaaatacttcatacattacagtggttggaataaaaattgggatgaatgggttccggagagcagagtactcaaatacgtggacaccaatttgcagaaacagcgagaacttcaaaaagccaatcaggagcagtatgcagaggggaagatgagaggggctgccccaggaaagaagacatctggtctgcaacagaaaaatgttgaagtgaaaacgaaaaagaacaaacagaaaacacctggaaatggagatggtggcagtaccagtgagacccctcagcctcctcggaagaaaagggcccgggtagatcctactgttgaaaatgaggaaacattcatgaacagagttgaagttaaagtaaagattcctgaagagctaaaaccgtggcttgttgatgactgggacttaattaccaggcaaaaacagctcttttatcttcctgccaagaagaatgtggattccattcttgaggattatgcaaattacaagaaatctcgtggaaacacagataataaggagtatgcggttaatgaagttgtggcagggataaaagaatacttcaacgtaatgttgggtacccagctactctataaatttgagagaccacagtatgctgaaattcttgcagatcatcccgatgcacccatgtcccaggtgtatggagcgccacatctcctgagattatttgtacgaattggagcaatgttggcttatacacctctggatgagaagagccttgctttattactcaattatcttcacgatttcctaaagtacctggcaaagaattctgcaactttgttcagtgccagcgattatgaagtggctcctcctgagtaccatcggaaagctgtgtgagaggcactctcactcacttatgtttggatctccgtaaacacatttttgttcttagtctatctcttgtacaaacgatgtgctttgaagatgttagtgtataacaattgatgtttgttttctgtttgattttaaacagagaaaaaataaaagggggtaatagctccttttttcttctttctttttttttttcatttcaaaattgctgccagtgttttcaatgatggacaacagagggatatgctgtagagtgttttattgcctagttgacaaagctgcttttgaatgctggtggttctattcctttgacactacgcacttttat

SEQ ID NO: 18622 - DNA, 527 bp, Homo sapiens
  source 1..527: mol_type = unassigned DNA
gaagacaagcagagagactcctccagacccactcagaccacgtgcacgccctccaagatggtatcccgtaaggctgtggctgctctgctggtggtgcatgtagctgccatgctggcctcccagacggaagccttcgtccccatcttcacctatggcgaactccagaggatgcaggaaaaggaacggaataaagggcaaaagaaatccctgagtgtatggcagaggtctggggaggaaggtcctgtagaccctgcggagcccatcagggaagaagaaaacgaaatgatcaagctgactgctcctctggaaattggaatgaggatgaactccagacagctggaaaagtacccggccaccctggaagggctgctgagtgagatgcttccccagcatgccaagtgatggccacgctggggagaaggtggacagatttgggaggcccctcctgcccaagtgaggccctgggaatttacagagcctgccagctgggcttggaaggaaaacaccctttccaaagcaaattcccc

SEQ ID NO: 18623 - DNA, 566 bp, Homo sapiens
  source 1..566: mol_type = unassigned DNA
cggacaccagaagacaagcagagagactcctccagacccactcagaccacgtgcacgccctccaagatggtatcccgtaaggctgtggctgctctgctggtggtgcatgtagctgccatgctggcctcccagacggaagccttcgtccccatcttcacctatggcgaactccagaggatgcaggaaaaggaacggaataaagggcaaaagaaatccctgagtgtatggcagaggtctggggaggaaggtcctgtagaccctgcggagcccatcagggaagaagaaaacgaaatgatcaagctgactgctcctctggaaattggaatgaggatgaactccagacagctggaaaagtacccggccaccctggaagggctgctgagtgagatgcttccccagcatgcagccaagtgatggccacgctggggagaaggtggacagatttgggaggcccctcctgcccaagtgaggccctgggaatttacagagcctgccagctgggcttggaaggaaaacaccctttccaaagcaaattcccctccagcaaataaagcatgaaatataca

SEQ ID NO: 18624 - DNA, 400 bp, Homo sapiens
  source 1..400: mol_type = unassigned DNA
ccagacccactcagaccacgtgcacgccctccaagatggtatcccgtaaggctgtggctgctctgctggtggtgcatgtagctgccatgctggcctcccagacggaagccttcgtccccatcttcacctatggcgaactccagaggatgcaggaaaaggaacggaataaagggcaaaagaaatccctgagtgtatggcagaggtctggggaggaaggtcctgtagaccctgcggagcccatcagggaagaagaaaacgaaatgatcaagctgactgctcctctggaaattggaatgaggatgaactccagacagctggaaaagtacccggccaccctggaagggctgctgacagccaagtgatggccacgctggggagaaggtggacagatttgggaggc

SEQ ID NO: 18625 - DNA, 1239 bp, Homo sapiens
  source 1..1239: mol_type = unassigned DNA
atgggcagcccctggaacggcagcgacggccccgagggggcgcgggagccgccgtggcccgcgctgccgccttgcgacgagcgccgctgctcgccctttcccctgggggcgctggtgccggtgaccgctgtgtgcctgtgcctgttcgtcgtcggggtgagcggcaacgtggtgaccgtgatgctgatcgggcgctaccgggacatgcggaccaccaccaacttgtacctgggcagcatggccgtgtccgacctactcatcctgctcgggctgccgttcgacctgtaccgcctctggcgctcgcggccctgggtgttcgggccgctgctctgccgcctgtccctctacgtgggcgagggctgcacctacgccacgctgctgcacatgaccgcgctcagcgtcgagcgctacctggccatctgccgcccgctccgcgcccgcgtcttggtcacccggcgccgcgtccgcgcgctcatcgctgtgctctgggccgtggcgctgctctctgccggtcccttcttgttcctggtgggcgtcgagcaggaccccggcatctccgtagtcccgggcctcaatggcaccgcgcggatcgcctcctcgcctctcgcctcgtcgccgcctctctggctctcgcgggcgccaccgccgtccccgccgtcggggcccgagaccgcggaggccgcggcgctgttcagccgcgaatgccggccgagccccgcgcagctgggcgcgctgcgtgtcatgctgtgggtcaccaccgcctacttcttcctgccctttctgtgcctcagcatcctctacgggctcatcgggcgggagctgtggagcagccggcggccgctgcgaggcccggccgcctcggggcgggagagaggccaccggcagaccgtccgcgtcctgctggtggtggttctggcatttataatttgctggttgcccttccacgttggcagaatcatttacataaacacggaagattcgcggatgatgtacttctctcagtactttaacatcgtcgctctgcaacttttctatctgagcgcatctatcaacccaatcctctacaacctcatttcaaagaagtacagagcggcggcctttaaactgctgctcgcaaggaagtccaggccgagaggcttccacagaagcagggacactgcgggggaagttgcaggggacactggaggagacacggtgggctacaccgagacaagcgctaacgtgaagacgatgggataa

SEQ ID NO: 18626 - DNA, 1390 bp, Homo sapiens
  source 1..1390: mol_type = unassigned DNA
atgggcagcccctggaacggcagcgacggccccgagggggcgcgggagccgccgtggcccgcgctgccgccttgcgacgagcgccgctgctcgccctttcccctgggggcgctggtgccggtgaccgctgtgtgcctgtgcctgttcgtcgtcggggtgagcggcaacgtggtgaccgtgatgctgatcgggcgctaccgggacatgcggaccaccaccaacttgtacctgggcagcatggccgtgtccgacctactcatcctgctcgggctgccgttcgacctgtaccgcctctggcgctcgcggccctgggtgttcgggccgctgctctgccgcctgtccctctacgtgggcgagggctgcacctacgccacgctgctgcacatgaccgcgctcagcgtcgagcgctacctggccatctgccgcccgctccgcgcccgcgtcttggtcacccggcgccgcgtccgcgcgctcatcgctgtgctctgggccgtggcgctgctctctgccggtcccttcttgttcctggtgggcgtcgagcaggaccccggcatctccgtagtcccgggcctcaatggcaccgcgcggatcgcctcctcgcctctcgcctcgtcgccgcctctctggctctcgcgggcgccaccgccgtccccgccgtcggggcccgagaccgcggaggccgcggcgctgttcagccgcgaatgccggccgagccccgcgcagctgggcgcgctgcgtgtcatgctgtgggtcaccaccgcctacttcttcctgccctttctgtgcctcagcatcctctacgggctcatcgggcgggagctgtggagcagccggcggccgctgcgaggcccggccgcctcggggcgggagagaggccaccggcagaccgtccgcgtcctgcgtaagtggagccgccgtggttccaaagacgcctgcctgcagtccgccccgccggggaccgcgcaaacgctgggtccccttcccctgctcgcccagctctgggcgccgcttccagctccctttcctatttcgattccagcctccacccgccgtggtggtggttctggcatttataatttgctggttgcccttccacgttggcagaatcatttacataaacacggaagattcgcggatgatgtacttctctcagtactttaacatcgtcgctctgcaacttttctatctgagcgcatctatcaacccaatcctctacaacctcatttcaaagaagtacagagcggcggcctttaaactgctgctcgcaaggaagtccaggccgagaggcttccacagaagcagggacactgcgggggaagttgcaggggacactggaggagacacggtgggctacaccgagacaagcgctaacgtgaagacgatgggataa

SEQ ID NO: 18627 - DNA, 2068 bp, Homo sapiens
  source 1..2068: mol_type = unassigned DNA
cggggcccgcacggaggaggcgccgggaccatggtcaccctcggctgagtttccggcggcgactttgattattggcaaataaccaccataacaataccgagcccccgggcttgcaccgcacgcactgactccgcgagcccgcacacggccgcgtcgcccgccaccgggccctgagcgccagccccaaacgagccgatggaaaaatccaaaaatttccgcatcgacgccctgctggcggtggaccccccacgagccgcctctgcgcagagcgcgccgctggccttggtcacgtcgctcgccgccgccgcatctggcaccggaggtggcggcggcggcggcggggcgagcggcgggactagcggcagctgcagccccgcgtcctcggagccgccggctgcgcccgccgaccgcctgcgcgccgagagcccgtcgccgccgcgcctgctggccgcgcactgcgcgctgctgcccaagccgggcttcctgggcgcgggcggcggcggcggcggcacgggcggcgggcacggggggccccaccaccacgcgcatccgggcgcagcggccgctgccgccgccgccgccgccgccgccgccgctgggggcctggcgctggggctgcaccctgggggcgcgcagggcggcgcgggcctcccggcgcaggcggcgctctacggccacccggtctacggctactccgcggcggcggcggcggctgcgctggcgggccagcacccggcgctctcctactcgtacccgcaggtgcaaggcgcgcaccccgcgcaccccgccgaccccatcaagctgggcgccggcaccttccagctggaccagtggctgcgcgcgtccaccgcgggcatgatcctgcctaagatgcccgacttcaactcccaggcgcagtcgaacctcctggggaagtgccgccggccgcgcaccgccttcaccagccagcagctgctggagctggagcaccagttcaagctcaacaagtacctgtcgcggcccaagcgcttcgaggtggccacctcgctcatgctcaccgagacccaggtgaagatttggttccagaaccggcggatgaaatggaaacgcagcaaaaaggccaaagagcaggcggcgcaggaagcggagaaacagaagggcggcggcgggggcgcggggaagggcggcgcggaggagccgggagccgaggagctgctggggccgccagcgcccggagacaagggcagcggacgccgcctgcgggacttgagggacagtgaccccgaggaggacgaggacgaggacgacgaggaccatttcccctacagcaacggcgccagcgtccacgccgcctcctccgactgctcctcggaggacgactcgccgcccccgcggcccagccaccagcccgcgccccagtaggagccccgcggcccagcaggtgcggcgcgcacggagcgccccggccggcggcttctcccggaggccccggcgcccgcacccacccggcccggccccgagagcaggctcgaccgccgccccatggacccctcgcccaggccggggctggagggattcggccgcggctccggtcctgggcgcttcccttttaagcaagggcgcctcacctgctcttcaagaaacagcgagagggagacccagggggctgaaacttgaactctggttcttttaaaattaattttggttggtgttgggggaggcgcgagtgcgtgtgagaagaaccgacccaccccgcgcaaggggaagcctcctgtctcccctttccccgcgtccgagaaggcggaaacccacagtgttacctgacttatgaaacttgaaaccgcctctggagccgccattctgcagagtatttggaaaaagaaaaaagggtttatgcttacgtctctggggtcggggggattatgtcacgagcgttcaaactgctggaaatctcaaaactgtactgtctttatttttgtatattgtatttatatataaaaagaaacgtctacgtatgcatgctaaattattatttagcttctcccatcgcccacgatggaatgtaaaataaattggttttgtactggat

SEQ ID NO: 18628 - DNA, 2029 bp, Homo sapiens
  source 1..2029: mol_type = unassigned DNA
ggcgcgggtccccaccacggcggcagcggcctccgcgcggtcgcctgagggctgcagcgcaaagaaccgggctcccgggcccggacgcggggaagcactcgcgtgggagtttgtgcgagcgcggcccggggcggggcccgcacggaggaggcgccgggaccatggtcaccctcggctgagtttccggcggcgactttgattattggcaaataaccaccataacaataccgagcccccgggcttgcaccgcacgcactgactccgcgagcccgcacacggccgcgtcgcccgccaccgggccctgagcgccagccccaaacgagccgatggaaaaatccaaaaatttccgcatcgacgccctgctggcggtggaccccccacgagccgcctctgcgcagagcgcgccgctggccttggtcacgtcgctcgccgccgccgcatctggcaccggaggtggcggcggcggcggcggggcgagcggcgggactagcggcagctgcagccccgcgtcctcggagccgccggctgcgcccgccgaccgcctgcgcgccgagagcccgtcgccgccgcgcctgctggccgcgcactgcgcgctgctgcccaagccgggcttcctgggcgcgggcggcggcggcggcggcacgggcggcgggcacggggggccccaccaccacgcgcatcccggcggcggctgcgctggcgggccagcacccggcgctctcctactcgtacccgcaggtgcaaggcgcgcaccccgcgcaccccgccgaccccatcaagctgggcgccggcaccttccagctggaccagtggctgcgcgcgtccaccgcgggcatgatcctgcctaagatgcccgacttcaactcccaggcgcagtcgaacctcctggggaagtgccgccggccgcgcaccgccttcaccagccagcagctgctggagctggagcaccagttcaagctcaacaagtacctgtcgcggcccaagcgcttcgaggtggccacctcgctcatgctcaccgagacccaggtgaagatttggttccagaaccggcggatgaaatggaaacgcagcaaaaaggccaaagagcaggcggcgcaggaagcggagaaacagaagggcggcggcgggggcgcggggaagggcggcgcggaggagccgggagccgaggagctgctggggccgccagcgcccggagacaagggcagcggacgccgcctgcgggacttgagggacagtgaccccgaggaggacgaggacgaggacgacgaggaccatttcccctacagcaacggcgccagcgtccacgccgcctcctccgactgctcctcggaggacgactcgccgcccccgcggcccagccaccagcccgcgccccagtaggagccccgcggcccagcaggtgcggcgcgcacggagcgccccggccggcggcttctcccggaggccccggcgcccgcacccacccggcccggccccgagagcaggctcgaccgccgccccatggacccctcgcccaggccggggctggagggattcggccgcggctccggtcctgggcgcttcccttttaagcaagggcgcctcacctgctcttcaagaaacagcgagagggagacccagggggctgaaacttgaactctggttcttttaaaattaattttggttggtgttgggggaggcgcgagtgcgtgtgagaagaaccgacccaccccgcgcaaggggaagcctcctgtctcccctttccccgcgtccgagaaggcggaaacccacagtgttacctgacttatgaaacttgaaaccgcctctggagccgccattctgcagagtatttggaaaaagaaaaaagggtttatgcttacgtctctggggtcggggggattatgtcacgagcgttcaaactgctggaaatctcaaaactgtactgtctttatttttgtatattgtatttatatataaaaagaaacgtctacgtatgcatgctaaattattatttagcttctcccatcgcccacgatggaatgtaaaataa

SEQ ID NO: 18629 - DNA, 1620 bp, Homo sapiens
  source 1..1620: mol_type = unassigned DNA
tctcttaacgggaaggggcagttggaggtgtgagactgagatctaatgattaacccgaaggctgcaggagaaggaagtcgccgggggaaggcgagccgagagcgccctgaattaggcaggcccgggaatgggggtcagggcttatcaccggggaaaggaacttgggccaggtcccccactggggcgttagagagacccgcggcccctccagggagagggagtgcttcaggagcagcaaacaagagaaatgggcttcggaggcccggggaggcaaggccaaggcccagggaacccccggctcttaccagggcgctgccctcctctggaagggcgttggatccggggtgcgatggccgaggcaggtggcctggcttgaaccagctatggggggactctcaacagtaggtgcctgccctggaatcctgggcgcccaacaagcccaggcgcagtcgaacctcctggggaagtgccgccggccgcgcaccgccttcaccagccagcagctgctggagctggagcaccagttcaagctcaacaagtacctgtcgcggcccaagcgcttcgaggtggccacctcgctcatgctcaccgagacccaggtgaagatttggttccagaaccggcggatgaaatggaaacgcagcaaaaaggccaaagagcaggcggcgcaggaagcggagaaacagaagggcggcggcgggggcgcggggaagggcggcgcggaggagccgggagccgaggagctgctggggccgccagcgcccggagacaagggcagcggacgccgcctgcgggacttgagggacagtgaccccgaggaggacgaggacgaggacgacgaggaccatttcccctacagcaacggcgccagcgtccacgccgcctcctccgactgctcctcggaggacgactcgccgcccccgcggcccagccaccagcccgcgccccagtaggagccccgcggcccagcaggtgcggcgcgcacggagcgccccggccggcggcttctcccggaggccccggcgcccgcacccacccggcccggccccgagagcaggctcgaccgccgccccatggacccctcgcccaggccggggctggagggattcggccgcggctccggtcctgggcgcttcccttttaagcaagggcgcctcacctgctcttcaagaaacagcgagagggagacccagggggctgaaacttgaactctggttcttttaaaattaattttggttggtgttgggggaggcgcgagtgcgtgtgagaagaaccgacccaccccgcgcaaggggaagcctcctgtctcccctttccccgcgtccgagaaggcggaaacccacagtgttacctgacttatgaaacttgaaaccgcctctggagccgccattctgcagagtatttggaaaaagaaaaaagggtttatgcttacgtctctggggtcggggggattatgtcacgagcgttcaaactgctggaaatctcaaaactgtactgtctttatttttgtatattgtatttatatataaaaagaaacgtctacgtatgcatgctaaattattatttagcttctcccatcgcccacgatggaatgtaaaataaattggttttgtactggat

SEQ ID NO: 18630 - DNA, 1847 bp, Homo sapiens
  source 1..1847: mol_type = unassigned DNA
aggggataggacgaagaaaccgaagggaaagctcagctgcagcggcgactttcagtttcatttccacggaccctcctgcctgggccgcagccgccgccgcgatgcccagtaagttcagctgccggcagctccgggaggcgggccagtgtttcgagagtttcctggtcgttcggggactggacatggagacagatcgcgagcggctgcggaccatttataaccgcgacttcaagatcagctttgggacccccgcccctggcttctcctccatgctgtatggaatgaagattgcaaatctggcctacgtcaccaagactcgggtcaggttcttcagactcgaccgctgggccgacgtgcggttcccagaaaagaggagaatgaagctggggtcagatatcagcaaacaccacaagtcactgctagccaagatcttttatgacagggctgagtatcttcatgggaaacatggtgtggatgtggaagtccaggggccccatgaagcccgagatgggcagctccttatccgcctggatttgaaccgcaaagaggtgctgaccctgaggcttcggaatggcggaacccagtctgttaccctcactcacctcttcccactctgccggacaccccagtttgctttctacaatgaagaccaggagttgccctgtccactgggccccggtgaatgctatgaactccatgtccattgtaagaccagctttgtgggctacttcccagccacagtgctctgggagctgctgggacctggggagtcgggttcagaaggagccggcacattctacattgcccgcttcttggctgccgtcgcccacagccccctggctgcacagctgaagcccatgactcccttcaagcggacccggatcaccggaaaccctgtggtgaccaatcggatagaggaaggagagagacctgaccgcgctaagggctatgacctggagttaagtatggcgctggggacatactacccacctccccgcctcaggcagctgctccccatgcttcttcagggaacaagtatcttcactgcccctaaggagatcgcagagatcaaggcccagctggagacagccctgaagtggaggaactatgaggtgaagctgcggctgctgctgcacctggaggaactgcagatggagcatgatatccggcactatgacctggagtcggtgcccatgacctgggaccctgtggaccagaaccccaggctgctcacgctggaggttcctggagtgactgagagccgcccctcagtgctacggggcgaccacctgtttgcccttttgtcctcggagacacaccaggaggaccccatcacatataagggctttgtgcacaaggtggaattggaccgtgtcaagctgagcttttccatgagcctcctgagccgctttgtggatgggctgaccttcaaggtgaactttaccttcaaccgccagccgctgcgagtccagcaccgtgccctggagctgacagggcgctggctgctgtggcccatgctctttcctgtggcacctcgggacgtcccgctgctgccctcagatgtgaaactcaagctgtacgaccggagtctggagtcaaacccagagcagctgcaggccatgaggcacattgttacgggcaccacccgtccagccttaactgcctgcctgaccctgaaccagaacccagctgaactgcccctccaagggacaggaaggctgggggagggagtttacaacccaagccattccaccccctcccctgctggggagaatgacacatcaagctgctaacaattgggggaaggggaaggaagaaaactctgaaaacaaaatcttgttctatgc

SEQ ID NO: 18631 - DNA, 3383 bp, Homo sapiens
  source 1..3383: mol_type = unassigned DNA
aggagggaagcctggtggggagaagggagcccgcaggatcaggggtcagagttagggggcttccctcctgctgcaccctcatctcagggccgccaacttccagctgcagcggcgactttcagtttcatttccacggaccctcctgcctgggccgcagccgccgccgcgatgcccagtaagttcagctgccggcagctccgggaggcgggccagtgtttcgagagtttcctggtcgttcggggactggacatggagacagatcgcgagcggctgcggaccatttataaccgcgacttcaagatcagctttgggacccccgcccctggcttctcctccatgctgtatggaatgaagattgcaaatctggcctacgtcaccaagactcgggtcaggttcttcagactcgaccgctgggccgacgtgcggttcccagaaaagaggagaatgaagctggggtcagatatcagcaaacaccacaagtcactgctagccaagatcttttatgacagggctgagtatcttcatgggaaacatggtgtggatgtggaagtccaggggccccatgaagcccgagatgggcagctccttatccgcctggatttgaaccgcaaagaggtgctgaccctgaggcttcggaatggcggaacccagtctgttaccctcactcacctcttcccactctgccggacaccccagtttgctttctacaatgaagaccaggagttgccctgtccactgggccccggtgaatgctatgaactccatgtccattgtaagaccagctttgtgggctacttcccagccacagtgctctgggagctgctgggacctggggagtcgggttcagaaggagccggcacattctacattgcccgcttcttggctgccgtcgcccacagccccctggctgcacagctgaagcccatgactcccttcaagcggacccggatcaccggaaaccctgtggtgaccaatcggatagaggaaggagagagacctgaccgcgctaagggctatgacctggagttaagtatggcgctggggacatactacccacctccccgcctcaggcagctgctccccatgcttcttcagggaacaagtatcttcactgcccctaaggagatcgcagagatcaaggcccagctggagacagccctgaagtggaggaactatgaggtgaagctgcggctgctgctgcacctggaggaactgcagatggagcatgatatccggcactatgacctggagtcggtgcccatgacctgggaccctgtggaccagaaccccaggctgctcacgctggaggttcctggagtgactgagagccgcccctcagtgctacggggcgaccacctgtttgcccttttgtcctcggagacacaccaggaggaccccatcacatataagggctttgtgcacaaggtggaattggaccgtgtcaagctgagcttttccatgagcctcctgagccgctttgtggatgggctgaccttcaaggtgaactttaccttcaaccgccagccgctgcgagtccagcaccgtgccctggagctgacagggcgctggctgctgtggcccatgctctttcctgtggcacctcgggacgtcccgctgctgccctcagatgtgaaactcaagctgtacgaccggagtctggagtcaaacccagagcagctgcaggccatgaggcacattgttacgggcaccacccgtccagccccctacatcatctttgggcctccaggcaccggcaagactgtcacgttagtggaggcaattaagcaggtggtgaagcacttgcccaaagcccacatcttggcctgcgctccatccaactcaggggctgacctactctgtcaaaggctccgggtccaccttcctagctccatctaccgcctcctggcccccagcagggacatccgcatggtacctgaggacatcaagccctgctgcaactgggacgcaaagaagggggagtatgtatttcccgccaagaagaagctgcaggaataccgggtcttaattaccaccctcatcactgccggcaggttggtctcggcccagtttcccattgatcacttcacacacatcttcatcgatgaggctggccactgcatggagcctgagagtctggtagctatagcagggctgatggaagtaaaggaaacaggtgatccaggagggcagctggtgctggcaggagaccctcggcagctggggcctgtgctgcgttccccactgacccagaagcatggactgggatactcactgctggagcggctgctcacctacaactccctgtacaagaagggccctgatggctatgacccccagttcataaccaagctgctccgcaactacaggtctcatcccaccatcctggacattcctaaccagctctattatgaaggggagctgcaggcctgtgctgatgtcgtggatcgagaacgcttctgccgctgggcgggcctacctcgacagggctttcccatcatctttcacggcgtaatgggcaaagatgagcgtgaaggcaacagcccatccttcttcaaccctgaagaggctgccacagtgacttcctacctgaagctgctcctggccccctcctccaagaagggcaaagctcgcctgagccctcgaagtgtgggcgtcatctccccgtaccggaaacaggtggagaaaatccgttactgcatcaccaaacttgacagggagcttcgaggactggatgacatcaaggacttgaaggtgggttcagtagaagaattccaaggccaagaacgaagcgtcatcctcatctccaccgtgcgaagcagccagagctttgtgcagctggatctggactttaatctgggtttccttaagaaccccaagaggttcaatgtagctgtgacccgggccaaggccctgctcatcatcgtggggaacccccttctcctgggccatgaccctgactggaaagtattcctggagttctgtaaagaaaacggagggtataccgggtgtcccttccctgccaaactggacctgcaacagggacagaatttactgcaaggtctgagcaagctcagcccctctacctcagggccccacagccatgactacctcccccaggagcgggagggtgaagggggcctgtctctgcaagtggagccagagtggaggaatgagctctgaagacacagcacccagccttctcgcaccagccaagccttaactgcctgcctgaccctgaaccagaacccagctgaactgcccctccaagggacaggaaggctgggggagggagtttacaacccaagccattccaccccctcccctgctggggagaatgacacatcaagctgctaacaattgggggaaggggaaggaagaaaact

SEQ ID NO: 18632 - DNA, 4100 bp, Homo sapiens
  source 1..4100: mol_type = unassigned DNA
gataggacgaagaaaccgaagggaaagctcagggccgccaacttccagctgcagcggcgactttcagtttcatttccacggaccctcctgcctgggccgcagccgccgccgcgatgcccagtaagttcagctgccggcagctccgggaggcgggccagtgtttcgagagtttcctggtcgttcggggactggacatggagacagatcgcgagcggctgcggaccatttataaccgcgacttcaagatcagtcttgcctccagcaaatccatcctccaatcctgatgccagagtgatctgaaatgcaaatatgatcttgccactcccctgcttaaaacccaccaaccgcagtggttctgtaaccacagtgtagcctctgacgtgggctgaaagcacaaagccaggctatttgatctctggagaaggatcctttcccttcctgcttgggttccacctgcaccctatgacttcgggtggaaactgctgtctgatcagccaccttgcccacacacttggacatctgtactgtctctgatcccttctctcctcaccaacaggctggaccccacatccacccctctgaatcaaatcattccgcttccccttagcctcagctctttcttctgggttgtttgtattttcttttctgtcccaaacagtttcccccacaaaaagaactttatgtctttctctgtcttccctcagtccttccagtcagcagcctgtgattgggcttttcccctcagaaacgaacaatccagaacccactgtttaaaacaactgtattttgccttgggaagtcccattgccttccctgaaaacattaaacattcctccgatccccagcctgagtctctctgtctctgggccccatcctgctccacagcagggctggtgtgtccagcacagagtgaccctccgatgccctttcccacccgccgccctgcctccctcgagccctgccttccctcacttcccagtctcctctgcttctggcagctttgggacccccgcccctggcttctcctccatgctgtatggaatgaagattgcaaatctggcctacgtcaccaagactcgggtcaggttcttcagactcgaccgctgggccgacgtgcggttcccagaaaagaggagaatgaagctggggtcagatatcagcaaacaccacaagtcactgctagccaagatcttttatgacagggctgagtatcttcatgggaaacatggtgtggatgtggaagtccaggggccccatgaagcccgagatgggcagctccttatccgcctggatttgaaccgcaaagaggtgctgaccctgaggcttcggaatggcggaacccagtctgttaccctcactcacctcttcccactctgccggacaccccagtttgctttctacaatgaagaccaggagttgccctgtccactgggccccggtgaatgctatgaactccatgtccattgtaagaccagctttgtgggctacttcccagccacagtgctctgggagctgctgggacctggggagtcgggttcagaaggagccggcacattctacattgcccgcttcttggctgccgtcgcccacagccccctggctgcacagctgaagcccatgactcccttcaagcggacccggatcaccggaaaccctgtggtgaccaatcggatagaggaaggagagagacctgaccgcgctaagggctatgacctggagttaagtatggcgctggggacatactacccacctccccgcctcaggcagctgctccccatgcttcttcagggaacaagtatcttcactgcccctaaggagatcgcagagatcaaggcccagctggagacagccctgaagtggaggaactatgaggtgaagctgcggctgctgctgcacctggaggaactgcagatggagcatgatatccggcactatgacctggagtcggtgcccatgacctgggaccctgtggaccagaaccccaggctgctcacgctggaggttcctggagtgactgagagccgcccctcagtgctacggggcgaccacctgtttgcccttttgtcctcggagacacaccaggaggaccccatcacatataagggctttgtgcacaaggtggaattggaccgtgtcaagctgagcttttccatgagcctcctgagccgctttgtggatgggctgaccttcaaggtgaactttaccttcaaccgccagccgctgcgagtccagcaccgtgccctggagctgacagggcgctggctgctgtggcccatgctctttcctgtggcacctcgggacgtcccgctgctgccctcagatgtgaaactcaagctgtacgaccggagtctggagtcaaacccagagcagctgcaggccatgaggcacattgttacgggcaccacccgtccagccccctacatcatctttgggcctccaggcaccggcaagactgtcacgttagtggaggcaattaagcaggtggtgaagcacttgcccaaagcccacatcttggcctgcgctccatccaactcaggggctgacctactctgtcaaaggctccgggtccaccttcctagctccatctaccgcctcctggcccccagcagggacatccgcatggtacctgaggacatcaagccctgctgcaactgggacgcaaagaagggggagtatgtatttcccgccaagaagaagctgcaggaataccgggtcttaattaccaccctcatcactgccggcaggttggtctcggcccagtttcccattgatcacttcacacacatcttcatcgatgaggctggccactgcatggagcctgagagtctggtagctatagcagggctgatggaagtaaaggaaacaggtgatccaggagggcagctggtgctggcaggagaccctcggcagctggggcctgtgctgcgttccccactgacccagaagcatggactgggatactcactgctggagcggctgctcacctacaactccctgtacaagaagggccctgatggctatgacccccagttcataaccaagctgctccgcaactacaggtctcatcccaccatcctggacattcctaaccagctctattatgaaggggagctgcaggcctgtgctgatgtcgtggatcgagaacgcttctgccgctgggcgggcctacctcgacagggctttcccatcatctttcacggcgtaatgggcaaagatgagcgtgaaggcaacagcccatccttcttcaaccctgaagaggctgccacagtgacttcctacctgaagctgctcctggccccctcctccaagaagggcaaagctcgcctgagccctcgaagtgtgggcgtcatctccccgtaccggaaacaggtggagaaaatccgttactgcatcaccaaacttgacagggagcttcgaggactggatgacatcaaggacttgaaggtgggttcagtagaagaattccaaggccaagaacgaagcgtcatcctcatctccaccgtgcgaagcagccagagctttgtgcagctggatctggactttaatctgggtttccttaagaaccccaagaggttcaatgtagctgtgacccgggccaaggccctgctcatcatcgtggggaacccccttctcctgggccatgaccctgactggaaagtattcctggagttctgtaaagaaaacggagggtataccgggtgtcccttccctgccaaactggacctgcaacagggacagaatttactgcaaggtctgagcaagctcagcccctctacctcagggccccacagccatgactacctcccccaggagcgggagggtgaagggggcctgtctctgcaagtggagccagagtggaggaatgagctctgaagacacagcacccagccttctcgcaccagccaagccttaactgcctgcctgaccctgaaccagaacccagctgaactgcccctccaagggacaggaaggctgggggagggagtttacaacccaagccattccaccccctcccctgctggggagaatgacacatcaagctgctaacaattgggggaaggggaaggaagaaaactctgaaaacaaaatcttgttctatg

SEQ ID NO: 18633 - DNA, 3552 bp, Homo sapiens
  source 1..3552: mol_type = unassigned DNA
gcttttcactgagtcccgaggctctggagggtgggcgtgagggtagccctggctgaggctcggaggtcctcccgggctgttcagagggccccaagcggtagccacgttctgatactggctagaagccaggggagggagcttggggtaaggggagggccctgagggaggggtcagacgctttaggaaagagttaatgcgaagagggggaggggataggacgaagaaaccgaagggaaagctcagctgcagcggcgactttcagtttcatttccacggaccctcctgcctgggccgcagccgccgccgcgatgcccagtaagttcagctgccggcagctccgggaggcgggccagtgtttcgagagtttcctggtcgttcggggactggacatggagacagatcgcgagcggctgcggaccatttataaccgcgacttcaagatcagctttgggacccccgcccctggcttctcctccatgctgtatggaatgaagattgcaaatctggcctacgtcaccaagactcgggtcaggttcttcagactcgaccgctgggccgacgtgcggttcccagaaaagaggagaatgaagctggggtcagatatcagcaaacaccacaagtcactgctagccaagatcttttatgacagggctgagtatcttcatgggaaacatggtgtggatgtggaagtccaggggccccatgaagcccgagatgggcagctccttatccgcctggatttgaaccgcaaagaggtgctgaccctgaggcttcggaatggcggaacccagtctgttaccctcactcacctcttcccactctgccggacaccccagtttgctttctacaatgaagaccaggagttgccctgtccactgggccccggtgaatgctatgaactccatgtccattgtaagaccagctttgtgggctacttcccagccacagtgctctgggagctgctgggacctggggagtcgggttcagaaggagccggcacattctacattgcccgcttcttggctgccgtcgcccacagccccctggctgcacagctgaagcccatgactcccttcaagcggacccggatcaccggaaaccctgtggtgaccaatcggatagaggaaggagagagacctgaccgcgctaagggctatgacctggagttaagtatggcgctggggacatactacccacctccccgcctcaggcagctgctccccatgcttcttcagggaacaagtatcttcactgcccctaaggagatcgcagagatcaaggcccagctggagacagccctgaagtggaggaactatgaggtgaagctgcggctgctgctgcacctggaggaactgcagatggagcatgatatccggcactatgacctggagtcggtgcccatgacctgggaccctgtggaccagaaccccaggctgctcacgctggaggttcctggagtgactgagagccgcccctcagtgctacggggcgaccacctgtttgcccttttgtcctcggagacacaccaggaggaccccatcacatataagggctttgtgcacaaggtggaattggaccgtgtcaagctgagcttttccatgagcctcctgagccgctttgtggatgggctgaccttcaaggtgaactttaccttcaaccgccagccgctgcgagtccagcaccgtgccctggagctgacagggcgctggctgctgtggcccatgctctttcctgtggcacctcgggacgtcccgctgctgccctcagatgtgaaactcaagctgtacgaccggagtctggagtcaaacccagagcagctgcaggccatgaggcacattgttacgggcaccacccgtccagccccctacatcatctttgggcctccaggcaccggcaagactgtcacgttagtggaggcaattaagcaggtggtgaagcacttgcccaaagcccacatcttggcctgcgctccatccaactcaggggctgacctactctgtcaaaggctccgggtccaccttcctagctccatctaccgcctcctggcccccagcagggacatccgcatggtacctgaggacatcaagccctgctgcaactgggacgcaaagaagggggagtatgtatttcccgccaagaagaagctgcaggaataccgggtcttaattaccaccctcatcactgccggcaggttggtctcggcccagtttcccattgatcacttcacacacatcttcatcgatgaggctggccactgcatggagcctgagagtctggtagctatagcagggctgatggaagtaaaggaaacaggtgatccaggagggcagctggtgctggcaggagaccctcggcagctggggcctgtgctgcgttccccactgacccagaagcatggactgggatactcactgctggagcggctgctcacctacaactccctgtacaagaagggccctgatggctatgacccccagttcataaccaagctgctccgcaactacaggtctcatcccaccatcctggacattcctaaccagctctattatgaaggggagctgcaggcctgtgctgatgtcgtggatcgagaacgcttctgccgctgggcgggcctacctcgacagggctttcccatcatctttcacggcgtaatgggcaaagatgagcgtgaaggcaacagcccatccttcttcaaccctgaagaggctgccacagtgacttcctacctgaagctgctcctggccccctcctccaagaagggcaaagctcgcctgagccctcgaagtgtgggcgtcatctccccgtaccggaaacaggtggagaaaatccgttactgcatcaccaaacttgacagggagcttcgaggactggatgacatcaaggacttgaaggtgggttcagtagaagaattccaaggccaagaacgaagcgtcatcctcatctccaccgtgcgaagcagccagagctttgtgcagctggatctggactttaatctgggtttccttaagaaccccaagaggttcaatgtagctgtgacccgggccaaggccctgctcatcatcgtggggaacccccttctcctgggccatgaccctgactggaaagtattcctggagttctgtaaagaaaacggagggtataccgggtgtcccttccctgccaaactggacctgcaacagggacagaatttactgcaaggtctgagcaagctcagcccctctacctcagggccccacagccatgactacctcccccaggagcgggagggtgaagggggcctgtctctgcaagtggagccagagtggaggaatgagctctgaagacacagcacccagccttctcgcaccagccaagccttaactgcctgcctgaccctgaaccagaacccagctgaactgcccctccaagggacaggaaggctgggggagggagtttacaacccaagccattccaccccctcccctgctggggagaatgacacatcaagctgctaacaattgggggaaggggaaggaagaaaactctgaaaacaaaatcttgttctatgcaaaa

SEQ ID NO: 18634 - DNA, 2965 bp, Homo sapiens
  source 1..2965: mol_type = unassigned DNA
agtgtttcgagagtttcctggtcgttcggggactggacatggagacagatcgcgagcggctgcggaccatttataaccgcgacttcaagatcagctttgggacccccgcccctggcttctcctccatgctgtatggaatgaagattgcaaatctggcctacgtcaccaagactcgggtcaggttcttcagactcgaccgctgggccgacgtgcggttcccagaaaagaggagaatgaagctggggtcagatatcagcaaacaccacaagtcactgctagccaagatcttttatgacagggctgagtatcttcatgggaaacatggcggaacccagtctgttaccctcactcacctcttcccactctgccggacaccccagtttgctttctacaatgaagaccaggagttgccctgtccactgggccccggtgaatgctatgaactccatgtccattgtaagaccagctttgtgggctacttcccagccacagtgctctgggagctgctgggacctggggagtcgggttcagaaggagccggcacattctacattgcccgcttcttggctgccgtcgcccacagccccctggctgcacagctgaagcccatgactcccttcaagcggacccggatcaccggaaaccctgtggtgaccaatcggatagaggaaggagagagacctgaccgcgctaagggctatgacctggagttaagtatggcgctggggacatactacccacctccccgcctcaggcagctgctccccatgcttcttcagggaacaagtatcttcactgcccctaaggagatcgcagagatcaaggcccagctggagacagccctgaagtggaggaactatgaggtgaagctgcggctgctgctgcacctggaggaactgcagatggagcatgatatccggcactatgacctggagtcggtgcccatgacctgggaccctgtggaccagaaccccaggctgctcacgctggaggttcctggagtgactgagagccgcccctcagtgctacggggcgaccacctgtttgcccttttgtcctcggagacacaccaggaggaccccatcacatataagggctttgtgcacaaggtggaattggaccgtgtcaagctgagcttttccatgagcctcctgagccgctttgtggatgggctgaccttcaaggtgaactttaccttcaaccgccagccgctgcgagtccagcaccgtgccctggagctgacagggcgctggctgctgtggcccatgctctttcctgtggcacctcgggacgtcccgctgctgccctcagatgtgaaactcaagctgtacgaccggagtctggagtcaaacccagagcagctgcaggccatgaggcacattgttacgggcaccacccgtccagccccctacatcatctttgggcctccaggcaccggcaagactgtcacgttagtggaggcaattaagcaggtggtgaagcacttgcccaaagcccacatcttggcctgcgctccatccaactcaggggctgacctactctgtcaaaggctccgggtccaccttcctagctccatctaccgcctcctggcccccagcagggacatccgcatggtacctgaggacatcaagccctgctgcaactgggacgcaaagaagggggagtatgtatttcccgccaagaagaagctgcaggaataccgggtcttaattaccaccctcatcactgccggcaggttggtctcggcccagtttcccattgatcacttcacacacatcttcatcgatgaggctggccactgcatggagcctgagagtctggtagctatagcagggctgatggaagtaaaggaaacaggtgatccaggagggcagctggtgctggcaggagaccctcggcagctggggcctgtgctgcgttccccactgacccagaagcatggactgggatactcactgctggagcggctgctcacctacaactccctgtacaagaagggccctgatggctatgacccccagttcataaccaagctgctccgcaactacaggtctcatcccaccatcctggacattcctaaccagctctattatgaaggggagctgcaggcctgtgctgatgtcgtggatcgagaacgcttctgccgctgggcgggcctacctcgacagggctttcccatcatctttcacggcgtaatgggcaaagatgagcgtgaaggcaacagcccatccttcttcaaccctgaagaggctgccacagtgacttcctacctgaagctgctcctggccccctcctccaagaagggcaaagctcgcctgagccctcgaagtgtgggcgtcatctccccgtaccggaaacaggtggagaaaatccgttactgcatcaccaaacttgacagggagcttcgaggactggatgacatcaaggacttgaaggtgggttcagtagaagaattccaaggccaagaacgaagcgtcatcctcatctccaccgtgcgaagcagccagagctttgtgcagctggatctggactttaatctgggtttccttaagaaccccaagaggttcaatgtagctgtgacccgggccaaggccctgctcatcatcgtggggaacccccttctcctgggccatgaccctgactggaaagtattcctggagttctgtaaagaaaacggagggtataccgggtgtcccttccctgccaaactggacctgcaacagggacagaatttactgcaaggtctgagcaagctcagcccctctacctcagggccccacagccatgactacctcccccaggagcgggagggtgaagggggcctgtctctgcaagtggagccagagtggaggaatgagctctgaagacacagcacccagccttctcgcaccagccaagccttaactgcctgcctgaccctgaaccagaacccagctgaactgcccctccaagggacaggaaggct

SEQ ID NO: 18635 - DNA, 3641 bp, Homo sapiens
  source 1..3641: mol_type = unassigned DNA
cgctggatgagcttccccattccggccgcagccgacctagatcccagccctgccctttgctctcctgcttttcactgagtcccgaggctctggagggtgggcgtgagggtagccctggctgaggctcggaggtcctcccgggctgttcagagggccccaagcggtagccacgttctgatactggctagaagccaggggagggagcttggggtaaggggagggccctgagggaggggtcagacgctttaggaaagagttaatgcgaagagggggaggggataggacgaagaaaccgaagggaaagctcagggccgccaacttccagctgcagcggcgactttcagtttcatttccacggaccctcctgcctgggccgcagccgccgccgcgatgcccagtaagttcagctgccggcagctccgggaggcgggccagtgtttcgagagtttcctggtcgttcggggactggacatggagacagatcgcgagcggctgcggaccatttataaccgcgacttcaagatcagctttgggacccccgcccctggcttctcctccatgctgtatggaatgaagattgcaaatctggcctacgtcaccaagactcgggtcaggttcttcagactcgaccgctgggccgacgtgcggttcccagaaaagaggagaatgaagctggggtcagatatcagcaaacaccacaagtcactgctagccaagatcttttatgacagggctgagtatcttcatgggaaacatggtgtggatgtggaagtccaggggccccatgaagcccgagatgggcagctccttatccgcctggatttgaaccgcaaagaggtgctgaccctgaggcttcggaatggcggaacccagtctgttaccctcactcacctcttcccactctgccggacaccccagtttgctttctacaatgaagaccaggagttgccctgtccactgggccccggtgaatgctatgaactccatgtccattgtaagaccagctttgtgggctacttcccagccacagtgctctgggagctgctgggacctggggagtcgggttcagaaggagccggcacattctacattgcccgcttcttggctgccgtcgcccacagccccctggctgcacagctgaagcccatgactcccttcaagcggacccggatcaccggaaaccctgtggtgaccaatcggatagaggaaggagagagacctgaccgcgctaagggctatgacctggagttaagtatggcgctggggacatactacccacctccccgcctcaggcagctgctccccatgcttcttcagggaacaagtatcttcactgcccctaaggagatcgcagagatcaaggcccagctggagacagccctgaagtggaggaactatgaggtgaagctgcggctgctgctgcacctggaggaactgcagatggagcatgatatccggcactatgacctggagtcggtgcccatgacctgggaccctgtggaccagaaccccaggctgctcacgctggaggttcctggagtgactgagagccgcccctcagtgctacggggcgaccacctgtttgcccttttgtcctcggagacacaccaggaggaccccatcacatataagggctttgtgcacaaggtggaattggaccgtgtcaagctgagcttttccatgagcctcctgagccgctttgtggatgggctgaccttcaaggtgaactttaccttcaaccgccagccgctgcgagtccagcaccgtgccctggagctgacagggcgctggctgctgtggcccatgctctttcctgtggcacctcgggacgtcccgctgctgccctcagatgtgaaactcaagctgtacgaccggagtctggagtcaaacccagagcagctgcaggccatgaggcacattgttacgggcaccacccgtccagccccctacatcatctttgggcctccaggcaccggcaagactgtcacgttagtggaggcaattaagcaggtggtgaagcacttgcccaaagcccacatcttggcctgcgctccatccaactcaggggctgacctactctgtcaaaggctccgggtccaccttcctagctccatctaccgcctcctggcccccagcagggacatccgcatggtacctgaggacatcaagccctgctgcaactgggacgcaaagaagggggagtatgtatttcccgccaagaagaagctgcaggaataccgggtcttaattaccaccctcatcactgccggcaggttggtctcggcccagtttcccattgatcacttcacacacatcttcatcgatgaggctggccactgcatggagcctgagagtctggtagctatagcagggctgatggaagtaaaggaaacaggtgatccaggagggcagctggtgctggcaggagaccctcggcagctggggcctgtgctgcgttccccactgacccagaagcatggactgggatactcactgctggagcggctgctcacctacaactccctgtacaagaagggccctgatggctatgacccccagttcataaccaagctgctccgcaactacaggtctcatcccaccatcctggacattcctaaccagctctattatgaaggggagctgcaggcctgtgctgatgtcgtggatcgagaacgcttctgccgctgggcgggcctacctcgacagggctttcccatcatctttcacggcgtaatgggcaaagatgagcgtgaaggcaacagcccatccttcttcaaccctgaagaggctgccacagtgacttcctacctgaagctgctcctggccccctcctccaagaagggcaaagctcgcctgagccctcgaagtgtgggcgtcatctccccgtaccggaaacaggtggagaaaatccgttactgcatcaccaaacttgacagggagcttcgaggactggatgacatcaaggacttgaaggtgggttcagtagaagaattccaaggccaagaacgaagcgtcatcctcatctccaccgtgcgaagcagccagagctttgtgcagctggatctggactttaatctgggtttccttaagaaccccaagaggttcaatgtagctgtgacccgggccaaggccctgctcatcatcgtggggaacccccttctcctgggccatgaccctgactggaaagtattcctggagttctgtaaagaaaacggagggtataccgggtgtcccttccctgccaaactggacctgcaacagggacagaatttactgcaaggtctgagcaagctcagcccctctacctcagggccccacagccatgactacctcccccaggagcgggagggtgaagggggcctgtctctgcaagtggagccagagtggaggaatgagctctgaagacacagcacccagccttctcgcaccagccaagccttaactgcctgcctgaccctgaaccagaacccagctgaactgcccctccaagggacaggaaggctgggggagggagtttacaacccaagccattccaccccctcccctgctggggagaatgacacatcaagctgctaacaattgggggaaggggaaggaagaaaactctgaaaacaaaatcttgttctatgcaaaagccttga

SEQ ID NO: 18636 - DNA, 275 bp, Homo sapiens
  source 1..275: mol_type = unassigned DNA
gggaggggataggacgaagaaaccgaagggaaagctcagctgcagcggcgactttcagtttcatttccacggaccctcctgcctgggccgcagccgccgccgcgatgcccagtaagttcagctgccggcagctccgggaggcgggccagtgtttcgagagtttcctggtcgttcggggactggacatggagacagatcgcgagcggctgcggaccatttataaccgcgacttcaagatcagtcttgcctccagcaaatccatcctccaatcctga

SEQ ID NO: 18637 - DNA, 3960 bp, Homo sapiens
  source 1..3960: mol_type = unassigned DNA
attggtggcgggcggcgggagcggcgcgggcgcgtgcgggcggcggcagcggcggtgacggcagcctaggccgggcgagggccatgctgagcctcgcagccaagctggtggccttcttctggaggacggcggacacccctagggaggaagccgggcagctggagcccgagctcgcggaaggtgacactaagctgaaaactgtacggggtgtcgtgacaaggtactgcagcgattatggcatgattgatgatatgatctacttctccagtgatgctgtgactagcagagtgcttctgaatgttggacaggaagtgattgcagttgtggaagaaaataaagtgtccaatggactgaaagcaatcagggtagaagctgtctctgataagtgggaagacgacagcagaaaccatgggagtccctcagactgcggcccccgagtgttgattggctgtgtgacttccctggtggagggcgcaggctgtatcagtcagaccacctacttctctctggagagtgtgtgcgaaggcttcgagccctgcaagggagactgggtggaggctgagtaccggatccggcctggcacgtggagcagcgaagccacctcagtgaagccactgagatacaagcgcgtggacaaggtctgcatctctagcctctgtggaaggaacggggtgttagaggaaagcatcttctttaccttggactccttgaaactgccagatgggtacacaccccggagaggtgacgtggtcaatgcagtggtggtggagagcagccagtcatgctatgtctggagggcactttgtatgaccctagtgaagaggcgagacgccgcccctgttcatgaggccactcatttctatggaacgattttgctgaagaacaaaggtgatattgaagttacacaggtgacgcattttggaaccctaaaggaaggaagaagtaaaaccatggtgatctggatagagaataaaggagacattcctcaaaacttagtcagctgtaaactggctggctgggataaatctaaacaattcagattccaaatgctggataaagaccagatgtgccccgtggtatcttttgtttctgttcctgagaaggagaattcatcagatgaaaatattaattcattaaatagccacacaaaaaacaaaacctctcagatgtcggagagcagtttggtgaacaacagaggaatctctccaggtgattgtacctgtaaaggagaaaatggagaaaaagacaacattctatcaaggaagcagatgacagagcctgagcctggggggcttgtccctccagggggaaaaaccttcattgtggtcatctgtgacggaaaaaatcctggccgctgcaaggagctccttttgctctgtttttccgatttcctaattgggcgataccttgaagtaaatgttatcagtggggaggagtcactaattgctgcgcgcgaaccattttcttggaaaaagcttaaaagttcacaagcgttaacatccgcaaaaactacagttgttgtgaccgcacagaaaaggaactcaagacgacaacttccaagttttcttccccaatatccaatcccagatagacttagaaaatgtgtggaacaaaaaattgacatcctgactttccagccattacttgcagagcttctgaacatgtcaaattacaaggagaagttttcgactttgctgtggcttgaggagatttatgcagaaatggaactgaaagagtataacatgagcgggatcatcttaagaaggaatggggatctgctggttctggaggtcccagggttggccgaagggaggccttctctctacgcaggtgataaactgattttaaaaactcaagagtacaatggacatgccatcgaatacatcagctacgtgactgagattcatgaagaagatgtaactcttaaaattaatccagaatttgaacaagcctataactttgaacctatggatgtggaatttacatataataggaccacaagcagacggtgtcactttgcacttgaacacgtcatccacttaggtgtaaaagtgttgtttccagaagaaattattttacagtctccacaagtgacgggaaattggaaccatgcacaagacaccaaaagcagtggacagtccaccagcaaaaagaataggaaaacaatgacggaccaagctgagcatggaacagaggagaggcgtgttggtgacaaggacctgccggtgctggcaccctttactgcagagatgagcgattgggtagatgaaattcagacccctaaagcaagaaagatggagtttttcaacccagtgctaaatgaaaatcagaagttagcagttaaaaggattctgagtggtgactgccgtcccctcccgtatattctctttggacctcctggtactggaaagacagtgacaataatagaggctgttttacaggtacactttgccttgccggacagtcggattttagtctgtgcgccctccaacagtgctgctgacctcgtgtgtctgcggctgcacgagagcaaggtgctacagccggccaccatggtccgggtgaacgccacctgcaggttcgaggagatagttattgacgccgtcaaaccgtattgcagagacggagaagacatctggaaagcctcacgcttccggataatcatcaccacatgcagcagctcagggctgttttaccaaataggagtgagagttgggcacttcactcacgtgtttgtggacgaggctgggcaggcaagtgagccggaatgcctcattcctctggggctgatgtcggacatcagtggccagatcgtgctggcaggagaccccatgcagctcggcccagtcattaagtccagactcgccatggcctatgggctgaacgtgtcctttttggaacggctgatgtctcgacccgcgtaccagagggacgaaaatgctttcggtgcttgtggcgcacataatcccctgttggtcacaaagctggtgaagaactaccggtcccacgaggccctgctgatgctgccctcacggctgttctaccacagggaactcgaggtctgtgcggaccccacagtggtgacctccttgctgggctgggagaagttgcctaagaaaggcttccctctcatcttccatggtgtgcggggcagcgaggcacgggagggaaaaagcccatcgtggttcaacccggccgaggccgtccaggtcctgcgctactgctgcctcctggcccacagcatctccagtcaggtgtctgccagcgacattggcgtcatcacgccctaccggaagcaggtggagaaaatcagaattcttttgcgtaatgttgatctgatggatataaaggttggatcagtagaggagtttcaaggacaagagtatctggtcatcatcatttcgaccgtacggtcaaatgaagatagatttgaagatgatcgatattttttgggtttcttgtccaactcaaaaagatttaatgttgcaatcaccagacccaaagctttgctgatagtgctgggaaacccccatgttctcgttcgagacccctgttttggtgctttgctggaatacagtattacaaacggtgtttacatgggatgcgatttacctcctgcactgcagtctctgcaaaactgtggcgagggggtggcagacccctcctacccagtggtgccagaatccacaggaccagagaagcatcaggagcccagctgatctgcagtggctgacagcagggaggccatgtgctcagcctggccacgttgccgttacagtctgctccgtggctcctgtggcctgcccttgtctcgcagccaggcagggtcgtgtgtgggtgtggggctgccaggttggacgcagctgctgctgccctgactttggcatatgccagcctgttcctgccacagggcagtcactgccgcctaccctgaaataaaccctcgagtgacccccagaa

SEQ ID NO: 18638 - DNA, 1701 bp, Homo sapiens
  source 1..1701: mol_type = unassigned DNA
agacgctgcgtgcaaagcactgggtgctgatgtggcttagcatctcctgacacctgtggcctgtcctccctccagccgggtgacacccagacccccagctcctgcacacccctgggcaaccctgctgtgcccccggggtgctgagcgtggctttgccagtgtgtcagaggcatcaattgctaaaacaattcggcagaaattaccatttagaacatctttgctctagagttgggcacttcactcacgtgtttgtggacgaggctgggcaggcaagtgagccggaatgcctcattcctctggggctgatgtcggacatcagtggccaggtcacaaagctggtgaagaactaccggtcccacgaggccctgctgatgctgccctcacggctgttctaccacagggaactcgaggtctgtgcggaccccacagtggtgacctccttgctgggctgggagaagttgcctaagaaaggcttccctctcatcttccatggtgtgcggggcagcgaggcacgggagggaaaaagcccatcgtggttcaacccggccgaggccgtccaggtcctgcgctactgctgcctcctggcccacagcatctccagtcaggtgtctgccagcgacattggcgtcatcacgccctaccggaagcaggtacgccctgcccaggcacgcctggttctgtgaggtccctgcagccctgctccttggctcctgcagctccacagaggcaggaacaagctccttgtgagcagcagcaggtttttaaaggggcaggaccgcacttgaatgtcgttcaacatgagaggtcacccaactgccatccatgggccagttccgggcagctgccagcttttctacggccagagcctcgaacagtttttacatttctaaatggttacatttatatgtcccttgatatttggccctttgggaaaacatttgccaacccccagctctaacccagtgtttctcaaagggggcactttgggtatatttgaatgggacgcttctcatttcgtatgactctgtgatgtgattataggagagttagcgtccccaggccccaggggctggtcccaggaagcatctccacacgttcacagtggctctggagctctggtggggacacaggtgcctcccatgccgaacaccaggtttcattcatgaagcatgtgtccctgtggtgttcacaccaccaagcagaacttggaaagaacccccaaaatacagaagaaaaggtgagtcccctaggccatcacagtaacagatcacctgtaccgcgcgtgtgctgaccgcagagcccgtcaaagatgttatgtttccttttttctgacctcggggactcgagaggtgagtgcttagttctcccagaggtacagagattacgaaggcttatggagacaagtaagttgccagacatcacacagccagtgtcctggtgtcttaacctcagcttgtaggtgccatcctgctgagacatccagcttagagctgccatcctcagctctaagcatcagacatgcatctcgtttctcctgaaggatttcctccatccttgatatgtgcttgtggggagggaggattttccacatgaaacttggctttcctagtaagcattgtcccccgtccccagtttaactaaaactgcaatttgtgttctaatcaattcagattagaagaaagcaataaagaattaaaaaac

SEQ ID NO: 18639 - DNA, 3086 bp, Homo sapiens
  source 1..3086: mol_type = unassigned DNA
ccatgctgagcctcgcagccaagctggtggccttcttctggaggacggcggacacccctagggaggaagccgggcagctggagcccgagctcgcggaaggtgacactaagctgaaaactgtacggggtgtcgtgacaaggtactgcagcgattatggcatgattgatgatatgatctacttctccagtgatgctgtgactagcagagtgcttctgaatgttggacaggaagtgattgcagttgtggaagaaaataaagtgtccaatggactgaaagcaatcagggtagaagctgtctctgataagtgggaagacgacagcagaaaccatgggagtccctcagactgcggcccccgagtgttgattggctgtgtgacttccctggtggagggcgcaggctgtatcagtcagaccacctacttctctctggagagtgtgtgcgaaggcttcgagccctgcaagggagactgggtggaggctgagtaccggatccggcctggcacgtggagcagcgaagccacctcagtgaagccactgagatacaagcgcgtggacaaggtctgcatctctagcctctgtggaaggaacggggtgttagaggaaagcatcttctttaccttggactccttgaaactgccagatgggtacacaccccggagaggtgacgtggtcaatgcagtggtggtggagagcagccagtcatgctatgtctggagggcactttgtatgaccctagtgaagaggcgagacgccgcccctgttcatgaggccactcatttctatggaacgattttgctgaagaacaaaggtgatattgaagttacacaggtgacgcattttggaaccctaaaggaaggaagaagtaaaaccatggtgatctggatagagaataaaggagacattcctcaaaacttagtcagctgtaaactggctggctgggataaatctaaacaattcagattccaaatgctggataaagaccagatgtgccccgtggtatcttttgtttctgttcctgagaaggagaattcatcagatgaaaatattaattcattaaatagccacacaaaaaacaaaacctctcagatgtcggagagcagtttggtgaacaacagaggaatctctccaggtgattgtacctgtaaaggagaaaatggagaaaaagacaacattctatcaaggaagcagatgacagagcctgagcctggggggcttgtccctccagggggaaaaaccttcattgtggtcatctgtgacggaaaaaatcctggccgctgcaaggagctccttttgctctgtttttccgatttcctaattgggcgataccttgaagtaaatgttatcagtggggaggagtcactaattgctgcgcgcgaaccattttcttggaaaaagcttaaaagttcacaagcgttaacatccgcaaaaactacagttgttgtgaccgcacagaaaaggaactcaagacgacaacttccaagttttcttccccaatatccaatcccagatagacttagaaaatgtgtggaacaaaaaattgacatcctgactttccagccattacttgcagagcttctgaacatgtcaaattacaaggagaagttttcgactttgctgtggcttgaggagatttatgcagaaatggaactgaaagagtataacatgagcgggatcatcttaagaaggaatggggatctgctggttctggaggtcccagggttggccgaagggaggccttctctctacgcaggtgataaactgattttaaaaactcaagagtacaatggacatgccatcgaatacatcagctacgtgactgagattcatgaagaagatgtaactcttaaaattaatccagaatttgaacaagcctataactttgaacctatggatgtggaatttacatataataggaccacaagcagacggtgtcactttgcacttgaacacgtcatccacttaggtgtaaaagtgttgtttccagaagaaattattttacagtctccacaagtgacgggaaattggaaccatgcacaagacaccaaaagcagtggacagtccaccagcaaaaagaataggaaaacaatgacggaccaagctgagcatggaacagaggagaggcgtgttggtgacaaggacctgccggtgctggcaccctttactgcagagatgagcgattgggtagatgaaattcagacccctaaagcaagaaagatggagtttttcaacccagtgctaaatgaaaatcagaagttagcagttaaaaggattctgagtggtgactgccgtcccctcccgtatattctctttggacctcctggtactggaaagacagtgacaataatagaggctgttttacaggtacactttgccttgccggacagtcggattttagtctgtgcgccctccaacagtgctgctgacctcgtgtgtctgcggctgcacgagagcaaggtgctacagccggccaccatggtccgggtgaacgccacctgcaggttcgaggagatagttattgacgccgtcaaaccgtattgcagagacggagaagacatctggaaagcctcacgcttccggataatcatcaccacatgcagcagctcagggctgttttaccaaataggagtgagagttgggcacttcactcacgtgtttgtggacgaggctgggcaggcaagtgagccggaatgcctcattcctctggggctgatgtcggacatcagtggccaggtcacaaagctggtgaagaactaccggtcccacgaggccctgctgatgctgccctcacggctgttctaccacagggaactcgaggtctgtgcggaccccacagtggtgacctccttgctgggctgggagaagttgcctaagaaaggcttccctctcatcttccatggtgtgcggggcagcgaggcacgggagggaaaaagcccatcgtggttcaacccggccgaggccgtccaggtcctgcgctactgctgcctcctggcccacagcatctccagtcaggtgtctgccagcgacattggcgtcatcacgccctaccggaagcaggtacgccctgcccaggcacgcctggttctgtga

SEQ ID NO: 18640 - DNA, 1422 bp, Homo sapiens
  source 1..1422: mol_type = unassigned DNA
gagagccgtgtgtggctaccggattggacagcacggatctgaacaagacagggattttttttgttaatgtgtgttgatgagtcaaaggtcaagagccgaagagccagtcctcactggggtgcagagggctctttgggggcagagcgggcactgcatggaccctgcaccctggagctgatgttcagagttgggcacttcactcacgtgtttgtggacgaggctgggcaggcaagtgagccggaatgcctcattcctctggggctgatgtcggacatcagtggccagatcgtgctggcaggagaccccatgcagctcggcccagtcattaagtccagactcgccatggcctatgggctgaacgtgtcctttttggaacggctgatgtctcgacccgcgtaccagagggacgaaaatgctttcggtgcttgtggcgcacataatcccctgttggtcacaaagctggtgaagaactaccggtcccacgaggccctgctgatgctgccctcacggctgttctaccacagggaactcgaggtctgtgcggaccccacagtggtgacctccttgctgggctgggagaagttgcctaagaaaggcttccctctcatcttccatggtgtgcggggcagcgaggcacgggagggaaaaagcccatcgtggttcaacccggccgaggccgtccaggtcctgcgctactgctgcctcctggcccacagcatctccagtcaggtgtctgccagcgacattggcgtcatcacgccctaccggaagcaggtggagaaaatcagaattcttttgcgtaatgttgatctgatggatataaaggttggatcagtagaggagtttcaaggacaagagtatctggtcatcatcatttcgaccgtacggtcaaatgaagatagatttgaagatgatcgatattttttgggtttcttgtccaactcaaaaagatttaatgttgcaatcaccagacccaaagctttgctgatagtgctgggaaacccccatgttctcgttcgagacccctgttttggtgctttgctggaatacagtattacaaacggtgtttacatgggatgcgatttacctcctgcactgcagtctctgcaaaactgtggcgagggggtggcagacccctcctacccagtggtgccagaatccacaggaccagagaagcatcaggagcccagctgatctgcagtggctgacagcagggaggccatgtgctcagcctggccacgttgccgttacagtctgctccgtggctcctgtggcctgcccttgtctcgcagccaggcagggtcgtgtgtgggtgtggggctgccaggttggacgcagctgctgctgccctgactttggcatatgccagcctgttcctgccacagggcagtcactgccgcctaccctgaaataaaccctcga

SEQ ID NO: 18641 - DNA, 3763 bp, Homo sapiens
  source 1..3763: mol_type = unassigned DNA
ggcagcctaggccgggcgagggccatgctgagcctcgcagccaagctggtggccttcttctggaggacggcggacacccctagggaggaagccgggcagctggagcccgagctcgcggaaggtgacactaagctgaaaactgtacggggtgtcgtgacaaggtactgcagcgattatggcatgattgatgatatgatctacttctccagtgatgctgtgactagcagagtgcttctgaatgttggacaggaagtgattgcagttgtggaagaaaataaagtgtccaatggactgaaagcaatcagggtagaagctgtctctgataagtgggaagacgacagcagaaaccatgggagtccctcagactgcggcccccgagtgttgattggctgtgtgacttccctggtggagggcgcaggctgtatcagtcagaccacctacttctctctggagagtgtgtgcgaaggcttcgagccctgcaagggagactgggtggaggctgagtaccggatccggcctggcacgtggagcagcgaagccacctcagtgaagccactgagatacaagcgcgtggacaaggtctgcatctctagcctctgtggaaggaacggggtgttagaggaaagcatcttctttaccttggactccttgaaactgccagatgggtacacaccccggagaggtgacgtggtcaatgcagtggtggtggagagcagccagtcatgctatgtctggagggcactttgtatgaccctagtgaagaggcgagacgccgcccctgttcatgaggccactcatttctatggaacgattttgctgaagaacaaaggtgatattgaagttacacaggtgacgcattttggaaccctaaaggaaggaagaagtaaaaccatggtgatctggatagagaataaaggagacattcctcaaaacttagtcagctgtaaactggctggctgggataaatctaaacaattcagattccaaatgctggataaagaccagatgtgccccgtggtatcttttgtttctgttcctgagaaggagaattcatcagatgaaaatattaattcattaaatagccacacaaaaaacaaaacctctcagatgtcggagagcagtttggtgaacaacagaggaatctctccaggtgattgtacctgtaaaggagaaaatggagaaaaagacaacattctatcaaggaagcagatgacagagcctgagcctggggggcttgtccctccagggggaaaaaccttcattgtggtcatctgtgacggaaaaaatcctggccgctgcaaggagctccttttgctctgtttttccgatttcctaattgggcgataccttgaagtaaatgttatcagtggggaggagtcactaattgctgcgcgcgaaccattttcttggaaaaagcttaaaagttcacaagcgttaacatccgcaaaaactacagttgttgtgaccgcacagaaaaggaactcaagacgacaacttccaagttttcttccccaatatccaatcccagatagacttagaaaatgtgtggaacaaaaaattgacatcctgactttccagccattacttgcagagcttctgaacatgtcaaattacaaggagaagttttcgactttgctgtggcttgaggagatttatgcagaaatggaactgaaagagtataacatgagcgggatcatcttaagaaggaatggggatctgctggttctggaggtcccagggttggccgaagggaggccttctctctacgcaggtgataaactgattttaaaaactcaagagtacaatggacatgccatcgaatacatcagctacgtgactgagattcatgaagaagatgtaactcttaaaattaatccagaatttgaacaagcctataactttgaacctatggatgtggaatttacatataataggaccacaagcagacggtgtcactttgcacttgaacacgtcatccacttaggtgtaaaagtgttgtttccagaagaaattattttacagtctccacaagtgacgggaaattggaaccatgcacaagacaccaaaagcagtggacagtccaccagcaaaaagaataggaaaacaatgacggaccaagctgagcatggaacagaggagaggcgtgttggtgacaaggacctgccggtgctggcaccctttactgcagagatgagcgattgggtagatgaaattcagacccctaaagcaagaaagatggagtttttcaacccagtgctaaatgaaaatcagaagttagcagttaaaaggattctgagtggtgactgccgtcccctcccgtatattctctttggacctcctggtactggaaagacagtgacaataatagaggctgttttacaggtacactttgccttgccggacagtcggattttagtctgtgcgccctccaacagtgctgctgacctcgtgtgtctgcggctgcacgagagcaaggtgctacagccggccaccatggtccgggtgaacgccacctgcaggttcgaggagatagttattgacgccgtcaaaccgtattgcagagacggagaagacatctggaaagcctcacgcttccggataatcatcaccacatgcagcagctcagggctgttttaccaaataggagtgagagttgggcacttcactcacgtgtttgtggacgaggctgggcaggcaagtgagccggaatgcctcattcctctggggctgatgtcggacatcagtggccagatcgtgctggcaggagaccccatgcagctcggcccagtcattaagtccagactcgccatggcctatgggctgaacgtgtcctttttggaacggctgatgtctcgacccgcgtaccagagggacgaaaatgctttcggtgcttgtggcgcacataatcccctgttggtcacaaagctggtgaagaactaccggtcccacgaggccctgctgatgctgccctcacggctgttctaccacagggaactcgaggtctgtgcggaccccacagtggtgacctccttgctgggctgggagaagttgcctaagaaaggcttccctctcatcttccatggtgtgcggggcagcgaggcacgggagggaaaaagcccatcgtggttcaacccggccgaggccgtccaggtcctgcgctactgctgcctcctggcccacagcatctccagtcaggtgtctgccagcgacattggcgtcatcacgccctaccggaagcaggtggagaaaatcagaattcttttgcgtaatgttgatctgatggatataaaggttggatcagtagaggagtttcaaggacaagagtatctggtcatcatcatttcgaccgacccctgttttggtgctttgctggaatacagtattacaaacggtgtttacatgggatgcgatttacctcctgcactgcagtctctgcaaaactgtggcgagggggtggcagacccctcctacccagtggtgccagaatccacaggaccagagaagcatcaggagcccagctgatctgcagtggctgacagcagggaggccatgtgctcagcctggccacgttgccgttacagtctgctccgtggctcctgtggcctgcccttgtctcgcagccaggcagggtcgtgtgtgggtgtggggctgccaggttggacgcagctgctgctgccctgactttggcatatgccagcctgttcctgccacagggcagtcactgccgcctaccctgaaataaaccctcgagtgacccccagaa

SEQ ID NO: 18642 - DNA, 853 bp, Homo sapiens
  source 1..853: mol_type = unassigned DNA
ataggtctttgagtgcagtgcgggccggcaggcaacgctgggcccggcctttcctcatctccgctggcggggatccccgttcgcctcaggaggcttccgaccccacagcatcccgccgctctgggcgcccgtcctctgtgaggtctctccggtgacaccagcccctcttcccgccctcactttgtgtgtttacgccgagcagctgccaagtcgtctctccatgtcgttcctccctgtccgcagcgtcattggcggtggtgacactaagctgaaaactgtacggggtgtcgtgacaaggtactgcagcgattatggcatgattgatgatatgatctacttctccagtgatgctgtgactagcagagtgcttctgaatgttggacaggaagtgattgcagttgtggaagaaaataaagtgtccaatggactgaaagcaatcagggtagaagctgtctctgataagtgggaagacgacagcagaaaccatgggagtccctcagactgcggcccccgagtgttgattggctgtgtgacttccctggtggagggcgcaggctgtatcagtcagaccacctacttctctctggagagtgtgtgcgaaggcttcgagccctgcaagggagactgggtggaggctgagtaccggatccggcctggcacgtggagcagcgaagccacctcagtgaagccactgagatacaagcgcgtggacaaggtagcgtgccgactagtggctcctctctgtgcttctggcagacctgccatcaggggtaacttgcacggcccaggcttctcctgcatgtgttggaagcctggaaaaataaagctttgtcatggccaaagagaaaaaaaa

SEQ ID NO: 18643 - DNA, 3941 bp, Homo sapiens
  source 1..3941: mol_type = unassigned DNA
ataggtctttgagtgcagtgcgggccggcaggcaacgctgggcccggcctttcctcatctccgctggcggggatccccgttcgcctcaggaggcttccgaccccacagcatcccgccgctctgggcgcccgtcctctgtgaggtctctccggtgacaccagcccctcttcccgccctcactttgtgtgtttacgccgagcagctgccaagtcgtctctccatgtcgttcctccctgtccgcagcgtcattggcggtggtgacactaagctgaaaactgtacggggtgtcgtgacaaggtactgcagcgattatggcatgattgatgatatgatctacttctccagtgatgctgtgactagcagagtgcttctgaatgttggacaggaagtgattgcagttgtggaagaaaataaagtgtccaatggactgaaagcaatcagggtagaagctgtctctgataagtgggaagacgacagcagaaaccatgggagtccctcagactgcggcccccgagtgttgattggctgtgtgacttccctggtggagggcgcaggctgtatcagtcagaccacctacttctctctggagagtgtgtgcgaaggcttcgagccctgcaagggagactgggtggaggctgagtaccggatccggcctggcacgtggagcagcgaagccacctcagtgaagccactgagatacaagcgcgtggacaaggtctgcatctctagcctctgtggaaggaacggggtgttagaggaaagcatcttctttaccttggactccttgaaactgccagatgggtacacaccccggagaggtgacgtggtcaatgcagtggtggtggagagcagccagtcatgctatgtctggagggcactttgtatgaccctagtgaagaggcgagacgccgcccctgttcatgaggccactcatttctatggaacgattttgctgaagaacaaaggtgatattgaagttacacaggtgacgcattttggaaccctaaaggaaggaagaagtaaaaccatggtgatctggatagagaataaaggagacattcctcaaaacttagtcagctgtaaactggctggctgggataaatctaaacaattcagattccaaatgctggataaagaccagatgtgccccgtggtatcttttgtttctgttcctgagaaggagaattcatcagatgaaaatattaattcattaaatagccacacaaaaaacaaaacctctcagatgtcggagagcagtttggtgaacaacagaggaatctctccaggtgattgtacctgtaaaggagaaaatggagaaaaagacaacattctatcaaggaagcagatgacagagcctgagcctggggggcttgtccctccagggggaaaaaccttcattgtggtcatctgtgacggaaaaaatcctggccgctgcaaggagctccttttgctctgtttttccgatttcctaattgggcgataccttgaagtaaatgttatcagtggggaggagtcactaattgctgcgcgcgaaccattttcttggaaaaagcttaaaagttcacaagcgttaacatccgcaaaaactacagttgttgtgaccgcacagaaaaggaactcaagacgacaacttccaagttttcttccccaatatccaatcccagatagacttagaaaatgtgtggaacaaaaaattgacatcctgactttccagccattacttgcagagcttctgaacatgtcaaattacaaggagaagttttcgactttgctgtggcttgaggagatttatgcagaaatggaactgaaagagtataacatgagcgggatcatcttaagaaggaatggggatctgctggttctggaggtcccagggttggccgaagggaggccttctctctacgcaggtgataaactgattttaaaaactcaagagtacaatggacatgccatcgaatacatcagctacgtgactgagattcatgaagaagatgtaactcttaaaattaatccagaatttgaacaagcctataactttgaacctatggatgtggaatttacatataataggaccacaagcagacggtgtcactttgcacttgaacacgtcatccacttaggtgtaaaagtgttgtttccagaagaaattattttacagtctccacaagtgacgggaaattggaaccatgcacaagacaccaaaagcagtggacagtccaccagcaaaaagaataggaaaacaatgacggaccaagctgagcatggaacagaggagaggcgtgttggtgacaaggacctgccggtgctggcaccctttactgcagagatgagcgattgggtagatgaaattcagacccctaaagcaagaaagatggagtttttcaacccagtgctaaatgaaaatcagaagttagcagttaaaaggattctgagtggtgactgccgtcccctcccgtatattctctttggacctcctggtactggaaagacagtgacaataatagaggctgttttacaggtacactttgccttgccggacagtcggattttagtctgtgcgccctccaacagtgctgctgacctcgtgtgtctgcggctgcacgagagcaaggtgctacagccggccaccatggtccgggtgaacgccacctgcaggttcgaggagatagttattgacgccgtcaaaccgtattgcagagacggagaagacatctggaaagcctcacgcttccggataatcatcaccacatgcagcagctcagggctgttttaccaaataggagtgagagttgggcacttcactcacgtgtttgtggacgaggctgggcaggcaagtgagccggaatgcctcattcctctggggctgatgtcggacatcagtggccagatcgtgctggcaggagaccccatgcagctcggcccagtcattaagtccagactcgccatggcctatgggctgaacgtgtcctttttggaacggctgatgtctcgacccgcgtaccagagggacgaaaatgctttcggtgcttgtggcgcacataatcccctgttggtcacaaagctggtgaagaactaccggtcccacgaggccctgctgatgctgccctcacggctgttctaccacagggaactcgaggtctgtgcggaccccacagtggtgacctccttgctgggctgggagaagttgcctaagaaaggcttccctctcatcttccatggtgtgcggggcagcgaggcacgggagggaaaaagcccatcgtggttcaacccggccgaggccgtccaggtcctgcgctactgctgcctcctggcccacagcatctccagtcaggtgtctgccagcgacattggcgtcatcacgccctaccggaagcaggtggagaaaatcagaattcttttgcgtaatgttgatctgatggatataaaggttggatcagtagaggagtttcaaggacaagagtatctggtcatcatcatttcgaccgtacggtcaaatgaagatagatttgaagatgatcgatattttttgggtttcttgtccaactcaaaaagatttaatgttgcaatcaccagacccaaagctttgctgatagtgctgggaaacccccatgttctcgttcgactgtggcgagggggtggcagacccctcctacccagtggtgccagaatccacaggaccagagaagcatcaggagcccagctgatctgcagtggctgacagcagggaggccatgtgctcagcctggccacgttgccgttacagtctgctccgtggctcctgtggcctgcccttgtctcgcagccaggcagggtcgtgtgtgggtgtggggctgccaggttggacgcagctgctgctgccctgactttggcatatgccagcctgttcctgccacagggcagtcactgccgcctaccctgaaataaaccctcgagtgaccccc

SEQ ID NO: 18644 - DNA, 3889 bp, Homo sapiens
  source 1..3889: mol_type = unassigned DNA
atgacgtcactcccaccaggcacctcgccttgtcaggagctgccaggcagcggcggtgacggcagcctaggccgggcgagggccatgctgagcctcgcagccaagctggtggccttcttctggaggacggcggacacccctagggaggaagccgggcagctggagcccgagctcgcggaaggtgacactaagctgaaaactgtacggggtgtcgtgacaaggtactgcagcgattatggcatgattgatgatatgatctacttctccagtgatgctgtgactagcagagtgcttctgaatgttggacaggaagtgattgcagttgtggaagaaaataaagtgtccaatggactgaaagcaatcagggtagaagctgtctctgataagtgggaagacgacagcagaaaccatgggagtccctcagactgcggcccccgagtgttgattggctgtgtgacttccctggtggagggcgcaggctgtatcagtcagaccacctacttctctctggagagtgtgtgcgaaggcttcgagccctgcaagggagactgggtggaggctgagtaccggatccggcctggcacgtggagcagcgaagccacctcagtgaagccactgagatacaagcgcgtggacaaggtctgcatctctagcctctgtggaaggaacggggtgttagaggaaagcatcttctttaccttggactccttgaaactgccagatgggtacacaccccggagaggtgacgtggtcaatgcagtggtggtggagagcagccagtcatgctatgtctggagggcactttgtatgaccctagtgaagaggcgagacgccgcccctgttcatgaggccactcatttctatggaacgattttgctgaagaacaaaggtgatattgaagttacacaggtgacgcattttggaaccctaaaggaaggaagaagtaaaaccatggtgatctggatagagaataaaggagacattcctcaaaacttagtcagctgtaaactggctggctgggataaatctaaacaattcagattccaaatgctggataaagaccagatgtgccccgtggtatcttttgtttctgttcctgagaaggagaattcatcagatgaaaatattaattcattaaatagccacacaaaaaacaaaacctctcagatgtcggagagcagtttggtgaacaacagaggaatctctccaggtgattgtacctgtaaaggagaaaatggagaaaaagacaacattctatcaaggaagcagatgacagagcctgagcctggggggcttgtccctccagggggaaaaaccttcattgtggtcatctgtgacggaaaaaatcctggccgctgcaaggagctccttttgctctgtttttccgatttcctaattgggcgataccttgaagtaaatgttatcagtggggaggagtcactaattgctgcgcgcgaaccattttcttggaaaaagcttaaaagttcacaagcgttaacatccgcaaaaactacagttgttgtgaccgcacagaaaaggaactcaagacgacaacttccaagttttcttccccaatatccaatcccagatagacttagaaaatgtgtggaacaaaaaattgacatcctgactttccagccattacttgcagagcttctgaacatgtcaaattacaaggagaagttttcgactttgctgtggcttgaggagatttatgcagaaatggaactgaaagagtataacatgagcgggatcatcttaagaaggaatggggatctgctggttctggaggtcccagggttggccgaagggaggccttctctctacgcaggtgataaactgattttaaaaactcaagagtacaatggacatgccatcgaatacatcagctacgtgactgagattcatgaagaagatgtaactcttaaaattaatccagaatttgaacaagcctataactttgaacctatggatgtggaatttacatataataggaccacaagcagacggtgtcactttgcacttgaacacgtcatccacttaggtgtaaaagtgttgtttccagaagaaattattttacagtctccacaagtgacgggaaattggaaccatgcacaagacaccaaaagcagtggacagtccaccagcaaaaagaataggaaaacaatgacggaccaagctgagcatggaacagaggagaggcgtgttggtgacaaggacctgccggtgctggcaccctttactgcagagatgagcgattgggtagatgaaattcagacccctaaagcaagaaagatggagtttttcaacccagtgctaaatgaaaatcagaagttagcagttaaaaggattctgagtggtgactgccgtcccctcccgtatattctctttggacctcctggtactggaaagacagtgacaataatagaggctgttttacaggtacactttgccttgccggacagtcggattttagtctgtgcgccctccaacagtgctgctgacctcgtgtgtctgcggctgcacgagagcaaggtgctacagccggccaccatggtccgggtgaacgccacctgcaggttcgaggagatagttattgacgccgtcaaaccgtattgcagagacggagaagacatctggaaagcctcacgcttccggataatcatcaccacatgcagcagctcagggctgttttaccaaataggagtgagagttgggcacttcactcacgtgtttgtggacgaggctgggcaggcaagtgagccggaatgcctcattcctctggggctgatgtcggacatcagtggccagatcgtgctggcaggagaccccatgcagctcggcccagtcattaagtccagactcgccatggcctatgggctgaacgtgtcctttttggaacggctgatgtctcgacccgcgtaccagagggacgaaaatgctttcggtgcttgtggcgcacataatcccctgttggtcacaaagctggtgaagaactaccggtcccacgaggccctgctgatgctgccctcacggctgttctaccacagggaactcgaggtctgtgcggaccccacagtggtgacctccttgctgggctgggagaagttgcctaagaaaggcttccctctcatcttccatggtgtgcggggcagcgaggcacgggagggaaaaagcccatcgtggttcaacccggccgaggccgtccaggtcctgcgctactgctgcctcctggcccacagcatctccagtcaggtgtctgccagcgacattggcgtcatcacgccctaccggaagcaggtggagaaaatcagaattcttttgcgtaatgttgatctgatggatataaaggttggatcagtagaggagtttcaaggacaagagtatctggtcatcatcatttcgaccgtacggtcaaatgaagatagatttgaagatgatcgatattttttgggtttcttgtccaactcaaaaagatttaatgttgcaatcaccagacccaaagctttgctgatagtgctgggaaacccccatgttctcgttcgagacccctgttttggtgctttgctggaatacagtattacaaacggtgtttacatgggatgcgatttacctcctgcactgcagtctctgcaaaactgtggcgagggggtggcagacccctcctacccagtggtgccagaatccacaggaccagagaagcatcaggagcccagctgatctgcagtggctgacagcagggaggccatgtgctcagcctggccacgttgccgttacagtctgctccgtggctcctgtggcctgcccttgtctcgcagccaggcagggtcgtgtgtgggtgtggggctgccaggttggacgcagctgctgctgccctgactttggcata

SEQ ID NO: 18645 - DNA, 1103 bp, Homo sapiens
  source 1..1103: mol_type = unassigned DNA
gcatgtgcggtgaggctcgcggccggagtgcggcgctgggcggaagctaccatggcggccgagcgaaagacaaggttgtccaagaatctactgcgcatgaagtttatgcaaaggggactggactcagaaaccaagaaacaactagaagaagaagaaaagaaaatcattagtgaagagcactggtacttggatttgccagagcttaaagagaaagagagtttcataatagaagagcagagtttcttactatgtgaagatcttctctatggaagaatgtcattcagaggatttaatcctgaggttgagaaattgatgcttcagatgaatgctaagcacaaagcagaagaagttgaagatgaaacagtagagcttgatgtgtcagatgaagagatggctagaagatatgagaccttggtggggacaattgggaaaaagtttgccagaaagagagaccatgccaattatgaagaagatgaaaatggagacataacaccaattaaagcaaagaagatgttcttaaagccccaggattaagatggatgccttaagcgatggcccaggggtgcttggtggaagtcagcagggcatctggagctcatcccaatggtgtctctatagttattaatactgtaacgtttacttgtaaagagattatcattttagaaacatgctgtttttgaaacagatgtgtgatggatgttgtacatcctttgcttcttggtattcattcagagtggatttttagcccctgatctacaaatgtacattgttacagggctgcttcctaaagattttttttacctcaggtttctcttaatatagttctccagtcactgaccttgaattgacttacataaactactgccaatgtttaaattgcccttatgtttatatttattatgtcaagccaattcgtacatacaatttggaatcaaatgtcataagaatttattatataaatttatcaagaataaaaatgcctctccagccttaagtatttacatgctcccaggtcattgtcagtttatggtattatgttgttttatttaaagcattgaattgatagaaaaatttgctctgtaataaaaatctactttcacata

SEQ ID NO: 18646 - DNA, 4390 bp, Homo sapiens
  source 1..4390: mol_type = unassigned DNA
gttacgccgctgatgtggagtagggccgagcgcggaacgcgaggggctgctggggtgtttgtcgcagcgggttttcctcggcggtttgcggagctgctaggatggagcaggttgcggagggagcaagggtgaccgcagtccctgtgtcagctgccgacagcactgaggagttggccgaagtcgaagaaggagttggagtagtgggcgaagataatgacgcagccgcgagaggagcggaggcctttggcgacagtgaggaggacggagaggatgtgttcgaggtggagaagatcctggacatgaagaccgaggggggtaaagttctttacaaagttcgctggaaaggctatacatcggatgatgatacctgggagcccgagattcacctggaggactgtaaagaagtgcttcttgaatttaggaagaaaattgcagagaacaaagccaaagcagtcaggaaggatattcagagactatccttaaataacgacatatttgaggcgaactctgatagcgatcagcaaagtgagacaaaagaagatacttccccaaagaagaaaaagaaaaaattgaggcagagagaagagaaaagcccagatgatctgaaaaagaaaaaagcaaaggccgggaagctaaaagacaagtccaaaccagacctggagagctccttggaaagtttagtttttgatttaaggacaaagaaaagaatttctgaagccaaagaagaactaaaggagtccaaaaagcccaaaaaagatgaagtaaaagaaacaaaagaattaaagaaagttaaaaagggtgaaataagagatttaaagacgaaaacaagagaagatcccaaagaaaatagaaaaacaaaaaaagaaaaatttgtcgaatcccaggtggaatctgaatcaagtgtacttaatgattctccctttccagaggatgacagtgaagggctacattccgacagcagagaagagaaacaaaacactaaaagtgcaagagagagagcagggcaggacatggggctggagcatggctttgagaagcccctagacagtgccatgagtgctgaggaggataccgatgtcagaggcaggaggaaaaagaagaccccgagaaaggctgaggacactagagagaacaggaagctagagaacaagaacgctttcttagagaagaaaactgtgcctaaaaagcagaggaatcaagacagaagcaaaagtgctgcagagttagagaagctgatgcctgtatctgcccaaacgccaaagggccggaggttgagcggggaagagagaggcctctggtccacggactcagccgaggaggacaaagaaaccaaaagaaatgaatccaaagaaaaatatcagaaaaggcatgattctgacaaggaagaaaaaggcagaaaagagccaaaaggattaaagacacttaaggaaatcagaaatgcatttgatttatttaaattaactccagaagaaaaaaatgatgtttctgagaataatcggaaaagggaagaaataccactggattttaaaaccatagacgatcacaaaaccaaggaaaacaaacagtcacttaaagaaaggagaaacaccagagacgaaacggatacttgggcatacattgctgcagaaggtgatcaggaggttttagacagcgtgtgccaagcagatgagaattcagatggcaggcagcagattctgagtttgggcatggacctgcagttggaatggatgaagttggaagatttccaaaagcaccttgatgggaaagatgagaattttgctgcaacagatgcaattccaagtaatgtgttaagggatgctgtgaaaaatggggattatattactgtaaaagttgcacttaattcaaatgaagaatataacctggaccaagaggattccagtggaatgacactggtgatgcttgccgccgccggagggcaggacgacctcctgcgactcctcatcacaaaaggcgcgaaagtgaacggtcggcagaagaacgggaccaccgccctcattcatgctgcagagaagaactttttaacaacagtggctattcttttggaagcaggagcttttgtaaatgtccagcaaagcaatggtgagactgcactgatgaaggcctgtaaaagaggaaattcagacatcgtacgactcgtaattgaatgtggagctgactgcaatattttgtcaaagcaccagaatagtgccctgcactttgcgaagcagtctaacaatgtgcttgtgtacgacttgctgaagaaccatttagagacactttcaagagtagcagaagagacaataaaggattactttgaagctcgccttgctctgctagaaccagtttttccaatcgcatgtcatcgactctgtgagggtccagatttttcaacagatttcaattacaaacccccacagaacataccagaaggctctggcatcctgctgtttatcttccatgcaaactttttgggtaaagaagttattgctcggctctgtggaccgtgtagtgtacaagctgtagttctgaatgataaatttcagcttcctgtttttctgacagggtctcgctctgttgtccaggctggagtgcagtggcgcggattacagctcactggagtcttgacttcccaggcacaagcaatcctcccacctcagcctcctaactacctgggactaaaaatgacagtcattttgtttactcattcagccctgttgcaggtcccaataaactcttcataaggttgacagaagcaccctctgccaaggttaagttgctaataggtgcatacagagtgcagctgcagtgaccaaacagaagggactgggcggagttctcttcagaccgattcctatactctctttgacagcagtttggaattcttctagcacatctatgtaaagttttgtctgtaaacctcttgcagttaagcctgttgtctgttgtagtctgtaagatgcgacatagctgtgtctgtgccagtatgccggaatctcagtgcagtgtccagactgcgtatttcagtttttccacaatgtggatagtacatatgaggattatttaagaaaattaaagacttcactttcttttttctggagacggagtttcgctcttgttgcccaggctggagtgcaatggtgcgatctcggctcactgcaagctctgcctcctgggttcaagtgattctcctgcctcagcctcctgagtagctgggattacagacacccgccatggcacccagctaattttgtatttttagtagagatggggtttatccatgttggtcaggctggtcttgaactcctgacctcaggtgatccgcccgcctcggcctcccaaagtgcttggattacaggcatgagccaccgcacccagcaagagttattttcttaacttgaaattttctactagccctggtgaacttctgtgcttaaaaaaaaaaaaaaaaaaaggaaaaattcagctctaaaacatttgcttacagcaagggagccatgttatattcaagttacccaagcaccaaataaagtgtgggtttgctgcccttgaaagggttgggaggcctgatctttttctagtagacagttgccacacattccccaagcacaaaaggtggagatggcagtcactttgtaaatatgctgtagtcacttatcatcttttcaaagggtaacaagagaatctaagatgtagtaagaatgtaaaccagtacactatgagacctaaaagagagtattaaatgtgaacttttagcagagcgtggtggctcacacctataatcccagcgctttggaggctgaggttggaggattgcttaagtccaggagttcaagaccagcctgggtaacatggggtggaacaagcctgtagtcccagatactcaggaggctgaggtgaaaggattgcttgagccagggaggtcaaggctgcagtgagccgtgaaaggccactgcactccagcctgagtgacagaatgagaccttgtctcaaaaaaaaaaaaaagtttcttggaacctatacggtttttttttgttttttttttttgaaaagccagaccttgtgcccttgttttgaacaccgactgggaagatggggcttaggtaacagccaaacctggctgtcagctgtgtgggagccaccaccctctctgggaagagttcctgcttctgtatggcaagcataaatcaagctcagtctgggttatggagaagttgaaaattgttttgttcctcattagtttataattgtatgaaatacgattttaatgaaaacttttcagaattcacgtttgtgtagatatttcagagaaccatttttactttacatcctaaaactgccttttcctatggttttgtcaataaaacactatgatgttggtctgtttcctttt

SEQ ID NO: 18647 - DNA, 4217 bp, Homo sapiens
  source 1..4217: mol_type = unassigned DNA
ggaacgcgaggggctgctggggtgtttgtcgcagcgggttttcctcggcggtttgcggagctgctaggatggagcaggttgcggagggagcaagggtgaccgcagtccctgtgtcagctgccgacagcactgaggagttggccgaagtcgaagaaggagttggagtagtgggcgaagataatgacgcagccgcgagaggagcggaggcctttggcgacagtgaggaggacggagaggatgtgttcgaggtggagaagatcctggacatgaagaccgaggggggtaaagttctttacaaagttcgctggaaaggctatacatcggatgatgatacctgggagcccgagattcacctggaggactgtaaagaagtgcttcttgaatttaggaagaaaattgcagagaacaaagccaaagcagtcaggaaggatattcagagactatccttaaataacgacatatttgaggcgaactctgatagcgatcagcaaagtgagacaaaagaagatacttccccaaagaagaaaaagaaaaaattgaggcagagagaagagaaaagcccagatgatctgaaaaagaaaaaagcaaaggccgggaagctaaaagacaagtccaaaccagacctggagagctccttggaaagtttagtttttgatttaaggacaaagaaaagaatttctgaagccaaagaagaactaaaggagtccaaaaagcccaaaaaagatgaagtaaaagaaacaaaagaattaaagaaagttaaaaagggtgaaataagagatttaaagacgaaaacaagagaagatcccaaagaaaatagaaaaacaaaaaaagaaaaatttgtcgaatcccaggtggaatctgaatcaagtgtacttaatgattctccctttccagaggatgacagtgaagggctacattccgacagcagagaagagaaacaaaacactaaaagtgcaagagagagagcagggcaggacatggggctggagcatggctttgagaagcccctagacagtgccatgagtgctgaggaggataccgatgtcagaggcaggaggaaaaagaagaccccgagaaaggctgaggacactagagagaacaggaagctagagaacaagaacgctttcttagagaagaaaactgtgcctaaaaagcagaggaatcaagacagaagcaaaagtgctgcagagttagagaagctgatgcctgtatctgcccaaacgccaaagggccggaggttgagcggggaagagagaggcctctggtccacggactcagccgaggaggacaaagaaaccaaaagaaatgaatccaaagaaaaatatcagaaaaggcatgattctgacaaggaagaaaaaggcagaaaagagccaaaaggattaaagacacttaaggaaatcagaaatgcatttgatttatttaaattaactccagaagaaaaaaatgatgtttctgagaataatcggaaaagggaagaaataccactggattttaaaaccatagacgatcacaaaaccaaggaaaacaaacagtcacttaaagaaaggagaaacaccagagacgaaacggatacttgggcatacattgctgcagaaggtgatcaggaggttttagacagcgtgtgccaagcagatgagaattcagatggcaggcagcagattctgagtttgggcatggacctgcagttggaatggatgaagttggaagatttccaaaagcaccttgatgggaaagatgagaattttgctgcaacagatgcaattccaagtaatgtgttaagggatgctgtgaaaaatggggattatattactgtaaaagttgcacttaattcaaatgaagaatataacctggaccaagaggattccagtggaatgacactggtgatgcttgccgccgccggagggcaggacgacctcctgcgactcctcatcacaaaaggcgcgaaagtgaacggtcggcagaagaacgggaccaccgccctcattcatgctgcagagaagaactttttaacaacagtggctattcttttggaagcaggagcttttgtaaatgtccagcaaagcaatggtgagactgcactgatgaaggcctgtaaaagaggaaattcagacatcgtacgactcgtaattgaatgtggagctgactgcaatattttgtcaaagcaccagaatagtgccctgcactttgcgaagcagtctaacaatgtgcttgtgtacgacttgctgaagaaccatttagagacactttcaagagtagcagaagagacaataaaggattactttgaagctcgccttgctctgctagaaccagtttttccaatcgcatgtcatcgactctgtgagggtccagatttttcaacagatttcaattacaaacccccacagaacataccagaaggctctggcatcctgctgtttatcttccatgcaaactttttgggtaaagaagttattgctcggctctgtggaccgtgtagtgtacaagctgtagttctgaatgataaatttcagcttcctgtttttctggacagtcattttgtttactcattcagccctgttgcaggtcccaataaactcttcataaggttgacagaagcaccctctgccaaggttaagttgctaataggtgcatacagagtgcagctgcagtgaccaaacagaagggactgggcggagttctcttcagaccgattcctatactctctttgacagcagtttggaattcttctagcacatctatgtaaagttttgtctgtaaacctcttgcagttaagcctgttgtctgttgtagtctgtaagatgcgacatagctgtgtctgtgccagtatgccggaatctcagtgcagtgtccagactgcgtatttcagtttttccacaatgtggatagtacatatgaggattatttaagaaaattaaagacttcactttcttttttctggagacggagtttcgctcttgttgcccaggctggagtgcaatggtgcgatctcggctcactgcaagctctgcctcctgggttcaagtgattctcctgcctcagcctcctgagtagctgggattacagacacccgccatggcacccagctaattttgtatttttagtagagatggggtttatccatgttggtcaggctggtcttgaactcctgacctcaggtgatccgcccgcctcggcctcccaaagtgcttggattacaggcatgagccaccgcacccagcaagagttattttcttaacttgaaattttctactagccctggtgaacttctgtgcttaaaaaaaaaaaaaaaaaaaggaaaaattcagctctaaaacatttgcttacagcaagggagccatgttatattcaagttacccaagcaccaaataaagtgtgggtttgctgcccttgaaagggttgggaggcctgatctttttctagtagacagttgccacacattccccaagcacaaaaggtggagatggcagtcactttgtaaatatgctgtagtcacttatcatcttttcaaagggtaacaagagaatctaagatgtagtaagaatgtaaaccagtacactatgagacctaaaagagagtattaaatgtgaacttttagcagagcgtggtggctcacacctataatcccagcgctttggaggctgaggttggaggattgcttaagtccaggagttcaagaccagcctgggtaacatggggtggaacaagcctgtagtcccagatactcaggaggctgaggtgaaaggattgcttgagccagggaggtcaaggctgcagtgagccgtgaaaggccactgcactccagcctgagtgacagaatgagaccttgtctcaaaaaaaaaaaaaagtttcttggaacctatacggtttttttttgttttttttttttgaaaagccagaccttgtgcccttgttttgaacaccgactgggaagatggggcttaggtaacagccaaacctggctgtcagctgtgtgggagccaccaccctctctgggaagagttcctgcttctgtatggcaagcataaatcaagctcagtctgggttatggagaagttgaaaattgttttgttcctcattagtttataattgtatgaaatacgattttaatgaaaacttttcagaattcacgtttgtgtagatatttcagagaaccatttttactttacatcctaaaactgccttttcctatggttttgtcaataaaacactatgatgtt

SEQ ID NO: 18648 - DNA, 2705 bp, Homo sapiens
  source 1..2705: mol_type = unassigned DNA
gttacgccgctgatgtggagtagggccgagcgcggaacgcgaggggctgctggggtgtttgtcgcagcgggttttcctcggcggtttgcggagctgctaggatggagcaggttgcggagggagcaagggtgaccgcagtccctgtgtcagctgccgacagcactgaggagttggccgaagtcgaagaaggagttggagtagtgggcgaagataatgacgcagccgcgagaggagcggaggcctttggcgacagtgaggaggacggagaggatgtgttcgaggtggagaagatcctggacatgaagaccgaggggggtaaagttctttacaaagttcgctggaaaggctatacatcggatgatgatacctgggagcccgagattcacctggaggactgtaaagaagtgcttcttgaatttaggaagaaaattgcagagaacaaagccaaagcagtcaggaaggatattcagagactatccttaaataacgacatatttgaggcgaactctgatagcgatcagcaaagtgagacaaaagaagatacttccccaaagaagaaaaagaaaaaattgaggcagagagaagagaaaagcccagatgatctgaaaaagaaaaaagcaaaggccgggaagctaaaagacaagtccaaaccagacctggagagctccttggaaagtttagtttttgatttaaggacaaagaaaagaatttctgaagccaaagaagaactaaaggagtccaaaaagcccaaaaaagatgaagtaaaagaaacaaaagaattaaagaaagttaaaaagggtgaaataagagatttaaagacgaaaacaagagaagatcccaaagaaaatagaaaaacaaaaaaagaaaaatttgtcgaatcccaggtggaatctgaatcaagtgtacttaatgattctccctttccagaggatgacagtgaagggctacattccgacagcagagaagagaaacaaaacactaaaagtgcaagagagagagcagggcaggacatggggctggagcatggctttgagaagcccctagacagtgccatgagtgctgaggaggataccgatgtcagaggcaggaggaaaaagaagaccccgagaaaggctgaggacactagagagaacaggaagctagagaacaagaacgctttcttagagaagaaaactgtgcctaaaaagcagaggaatcaagacagaagcaaaagtgctgcagagttagagaagctgatgcctgtatctgcccaaacgccaaagggccggaggttgagcggggaagagagaggcctctggtccacggactcagccgaggaggacaaagaaaccaaaagaaatgaatccaaagaaaaatatcagaaaaggcatgattctgacaaggaagaaaaaggcagaaaagagccaaaaggattaaagacacttaaggaaatcagaaatgcatttgatttatttaaattaactccagaagaaaaaaatgatgtttctgagaataatcggaaaagggaagaaataccactggattttaaaaccatagacgatcacaaaaccaaggaaaacaaacagtcacttaaagaaaggagaaacaccagagacgaaacggatacttgggcatacattgctgcagaaggtgatcaggaggttttagacagcgtgtgccaagcagatgagaattcagatggcaggcagcagattctgagtttgggcatggacctgcagttggaatggatgaagttggaagatttccaaaagcaccttgatgggaaagatgagaattttgctgcaacagatgcaattccaagtaatgtgttaagggatgctgtgaaaaatggggattatattactgtaaaagttgcacttaattcaaatgaagaatataacctggaccaagaggattccagtggaatgacactggtgatgcttgccgccgccggagggcaggacgacctcctgcgactcctcatcacaaaaggcgcgaaagtgaacggtcggcagaagaacgggaccaccgccctcattcatgctgcagagaagaactttttaacaacagtggctattcttttggaagcaggagcttttgtaaatgtccagcaaagcaatggtgagactgcactgatgaaggcctgtaaaagaggaaattcagacatcgtacgactcgtaattgaatgtggagctgactgcaatattttgtcaaagcaccagaatagtgccctgcactttgcgaagcagtctaacaatgtgcttgtgtacgacttgctgaagaaccatttagagacactttcaagagtagcagaagagacaataaaggattactttgaagctcgccttgctctgctagaaccagtttttccaatcgcatgtcatcgactctgtgagggtccagatttttcaacagatttcaattacaaacccccacagaacataccagaaggctctggcatcctgctgtttatcttccatgcaaactttttgggtaaagaagttattgctcggctctgtggaccgtgtagtgtacaagctgtagttctgaatgataaatttcagcttcctgtttttctgacagggtctcgctctgttgtccaggctggagtgcagtggcgcggattacagctcactggagtcttgacttcccaggcacaagcaatcctcccacctcagcctcctaactacctgggactaaaaatgcacgccaccacatccggctaa

SEQ ID NO: 18649 - DNA, 2175 bp, Homo sapiens
  source 1..2175: mol_type = unassigned DNA
gaggggctgctggggtgtttgtcgcagcgggttttcctcggcggtttgcggagctgctaggatggagcaggttgcggagggagcaagggtgaccgcagtccctgtgtcagctgccgacagcactgaggagttggccgaagtcgaagaaggagttggagtagtgggcgaagataatgacgcagccgcgagaggagcggaggcctttggcgacagtgaggaggacggagaggatgtgttcgaggtggagaagatcctggacatgaagaccgaggggggtaaagttctttacaaagttcgctggaaaggctatacatcggatgatgatacctgggagcccgagattcacctggaggactgtaaagaagtgcttcttgaatttaggaagaaaattgcagagaacaaagccaaagcagtcaggaaggatattcagagactatccttaaataacgacatatttgaggcgaactctgatagcgatcagcaaagtgagacaaaagaagatacttccccaaagaagaaaaagaaaaaattgaggcagagagaagagaaaagcccagatgatctgaaaaagaaaaaagcaaaggccgggaagctaaaagacaagtccaaaccagacctggagagctccttggaaagtttagtttttgatttaaggacaaagaaaagaatttctgaagccaaagaagaactaaaggagtccaaaaagcccaaaaaagatgaagtaaaagaaacaaaagaattaaagaaagttaaaaagggtgaaataagagatttaaagacgaaaacaagagaagatcccaaagaaaatagaaaaacaaaaaaagaaaaatttgtcgaatcccaggtggaatctgaatcaagtgtacttaatgattctccctttccagaggatgacagtgaagggctacattccgacagcagagaagagaaacaaaacactaaaagtgcaagagagagagcagggcaggacatggggctggagcatggctttgagaagcccctagacagtgccatgagtgctgaggaggataccgatgtcagaggcaggaggaaaaagaagaccccgagaaaggctgaggacactagagagaacaggaagctagagaacaagaacgctttcttagagaagaaaactgtgcctaaaaagcagaggaatcaagacagaagcaaaagtgctgcagagttagagaagctgatgcctgtatctgcccaaacgccaaagggccggaggttgagcggggaagagagaggcctctggtccacggactcagccgaggaggacaaagaaaccaaaagaaatgaatccaaagaaaaatatcagaaaaggcatgattctgacaaggaagaaaaaggcagaaaagagccaaaaggattaaagacacttaaggaaatcagaaatgcatttgatttatttaaattaactccagaagaaaaaaatgatgtttctgagaataatcggaaaagggaagaaataccactggattttaaaaccatagacgatcacaaaaccaaggaaaacaaacagtcacttaaagaaaggagaaacaccagagacgaaacggatacttgggcatacattgctgcagaaggtgatcaggaggttttagacagcgtgtgccaagcagatgagaattcagatggcaggcagcagattctgagtttgggcatggacctgcagttggaatggatgaagttggaagatttccaaaagcaccttgatgggaaagatgagaattttgctgcaacagatgcaattccaagtaatgtgttaagggatgctgtgaaaaaaaaaaaaaaaaaaaagtttcttggaacctatacgttttttttgttttttttttttgaaaagccagaccttgtgcccttgttttgaacaccgactgggaagatggggcttaggtaacagccaaacctggctgtcagctgtgtgggagccaccaccctctctgggaagagttcctgcttctgtatggcaagcataaatcaagctcagtctgggttatggagaagttgaaaattgttttgttcctcattagtttataattgtatgaaatacgattttaatgaaaacttttcagaattcacgtttgtgtagatatttcagagaaccatttttactttacatcctaaaactgccttttcctatggttttgtcaataaaacactatgatgttg

SEQ ID NO: 18650 - DNA, 3194 bp, Homo sapiens
  source 1..3194: mol_type = unassigned DNA
atatacaggaggagataaaaaatttagtcaaattacagactagtagtgcttccttagcttcctgtgaaggaaattcttcaaacaaacaagtatcttcggaaagtcaaatgggttttttttctctaagcagtgagagaaatgaatctgttatccattatcctgaatccacagaacctgaaatacagcaagaaatgtccacgtcacaaccagactgcaatgtggatagttgctcagtaagcagtggatatggcaccttttgtatctcagaattaaatctgtacaaatctaaagaccctaaggagttcatggagcacatagatgttcccaaaggacagtatgtagcacctgcggtgccggctgagtcacttgtagatggtgtgaaaaatgagaatttttatatacagactcctgaagagtgtcatgtgtctttaaaggaagatgtatccatttctcctggtgaatttgaacataattttcttggtgaaaataaggtttctgaagtatacagtgggaaaacaaatagtaatgctataacatcatgggcacaaaaactgaagcagaaccaaccaaagagagcacatgtagaagatggaggttcaagatctaaacaaggaaatgagcaaagtaagaagacaccaattgagaaatctgattttgctgctgctacacatcctcgtgctttttacctcagtaaaccagatgaaactccaaatgcttggatgtctgattcaggaacaggattgacttactggaaactagaggaaaaggatatgcaccactctttgcctgaaactttagagaagacgttcatatcattgtcttccacagatgtgtcaccaaaccagtctaatactagtaatgagatgaagctaccgtcactgaaggatatttattataaaaaacaaagggaaaacaagcagttacctgagaggaatctcacttctgcttccaacccaaatcatccaccagaggtcctgactctagatcctacgttacacatgaagccaaagcagcagatttcagggattcaacctcacggccttccgaatgcccttgatgacagaatatccttttccccggactctgttctagagcctagtatgtctagtccctctgacatagactcattttcacaagcaagtaatgtcacttctcagttacctggatttccaaaatatccctcacacacaaaagcttctccggtggactcttggaaaaatcagacattccaaaacgaaagtaggaccagttccacgtttccgtcagtatataccattactagtaatgatatctcggtcaacactgtagatgaagaaaacactgtcatggttgcttcggcctcagtcagtcagtcccagcttccaggtacagccaacagtgtcccagaatgcatttcattgacttccttggaagatcctgtgatattgtctaagattaggcagaatctgaaggaaaagcatgctcgacacatagcagatcttcgagcttattatgaatcagaaataaatagtttgaaacagaagctggaggcaaaagaaatctctggagttgaagattggaagataaccaatcaaattcttgtagacagatgtggccaattagatagtgctttgcatgaagctactagtcgcgtgagaacacttgaaaataagaataacttactggaaattgaagtgaatgatttgagagaacgcttcagtgcagccagcagtgcttccaaaattttgcaggaacgaattgaagaaatgagaacaagcagtaaagaaaaagacaataccatcattcgactaaaatctagactgcaagatttagaagaagcatttgagaatgcttacaaactctcagatgataaagaagctcaactaaaacaagagaacaaaatgtttcaagatcttttaggagagtatgagtcccttggaaaagaacacaggagagtaaaggatgcattaaatacaactgagaacaaattgcttgatgcatatactcagatttctgatttgaaaagaatgatttcaaaacttgaagctcaggtcaagcaagtagaacatgaaaatatgttaagccttcgtcataattctagaattcacgtgagaccctcgcgtgccaacacactagcaacttcagacgtcagcaggcggaaatggctgattccaggtgcagagtattccatctttactggccagcctctggacacccaggacagtaacgtggataaccagctggaggaaacctgtagcctagggcaccgttcacctctggaaaaggattcttcacctggaagttcatcaacaagcttgttgataaaaaagcaaagagagacttcagacacgccgatcatgagagctttaaaagaacttgatgagggaaaaatatttaaaaattgggggacacagacagagaaagaggacacctcaaatataaatcctcggcaaactgaaacttcagttaatgcaagtcgttctccagaaaagtgtgcccaacagagacaaaagagacttaattcggcctcacagagatcatcatctttaccaccttcaaatcgtaaatcaagtactccaacaaaaagagagattatgctaacaccagtgactgtggcttatagtccaaagcgatcccctaaagaaaacttgtccccaggatttagtcatctgcttagcaaaaatgagagcagtccaattcgatttgatatacttttggatgatttagatactgttcctgtgtctacattacaacgtaccaatccaagaaagcaactccagtttcttcctctagatgactcggaagaaaaaacttattctgagaaagccaccgataaccatgttaatcatagctcttgccctgaaccggtgccaaatggagtgaagaaagtatctgtgagaacagcctgggagaagaataaatcagttagctacgaacagtgtaagccggtttcagtcactccacaggggaatgattttgaatatacagcaaaaattcggaccctagctgaaacagaacgattttttgatgaacttacaaaagaaaaggaccagattgaggcagcactaagcaggatgccttctcctggaggacgaatcactttacagacaagattaaatcagacccctcagatatgtgaggaatcaagccataaatgtgcatttgctggacattatgtaccatgtcatctctatgactacagatttcaaggataa

SEQ ID NO: 18651 - DNA, 5799 bp, Homo sapiens
  source 1..5799: mol_type = unassigned DNA
cagcatatacaggaggagataaaaaatttagtcaaattacagactagtagtgcttccttagcttcctgtgaaggaaattcttcaaacaaacaagtatcttcggaaagtcaaatgggttttttttctctaagcagtgagagaaatgaatctgttatccattatcctgaatccacagaacctgaaatacagcaagaaatgtccacgtcacaaccagactgcaatgtggatagttgctcagtaagcagtggatatggcaccttttgtatctcagaattaaatctgtacaaatctaaagaccctaaggagttcatggagcacatagatgttcccaaaggacagtatgtagcacctgcggtgccggctgagtcacttgtagatggtgtgaaaaatgagaatttttatatacagactcctgaagagtgtcatgtgtctttaaaggaagatgtatccatttctcctggtgaatttgaacataattttcttggtgaaaataaggtttctgaagtatacagtgggaaaacaaatagtaatgctataacatcatgggcacaaaaactgaagcagaaccaaccaaagagagcacatgtagaagatggaggttcaagatctaaacaaggaaatgagcaaagtaagaagacaccaattgagaaatctgattttgctgctgctacacatcctcgtgctttttacctcagtaaaccagatgaaactccaaatgcttggatgtctgattcaggaacaggattgacttactggaaactagaggaaaaggatatgcaccactctttgcctgaaactttagagaagacgttcatatcattgtcttccacagatgtgtcaccaaaccagtctaatactagtaatgagatgaagctaccgtcactgaaggatatttattataaaaaacaaagggaaaacaagcagttacctgagaggaatctcacttctgcttccaacccaaatcatccaccagaggtcctgactctagatcctacgttacacatgaagccaaagcagcagatttcagggattcaacctcacggccttccgaatgcccttgatgacagaatatccttttccccggactctgttctagagcctagtatgtctagtccctctgacatagactcattttcacaagcaagtaatgtcacttctcagttacctggatttccaaaatatccctcacacacaaaagcttctccggtggactcttggaaaaatcagacattccaaaacgaaagtaggaccagttccacgtttccgtcagtatataccattactagtaatgatatctcggtcaacactgtagatgaagaaaacactgtcatggttgcttcggcctcagtcagtcagtcccagcttccaggtacagccaacagtgtcccagaatgcatttcattgacttccttggaagatcctgtgatattgtctaagattaggcagaatctgaaggaaaagcatgctcgacacatagcagatcttcgagcttattatgaatcagaaataaatagtttgaaacagaagctggaggcaaaagaaatctctggagttgaagattggaagataaccaatcaaattcttgtagacagatgtggccaattagatagtgctttgcatgaagctactagtcgcgtgagaacacttgaaaataagaataacttactggaaattgaagtgaatgatttgagagaacgcttcagtgcagccagcagtgcttccaaaattttgcaggaacgaattgaagaaatgagaacaagcagtaaagaaaaagacaataccatcattcgactaaaatctagactgcaagatttagaagaagcatttgagaatgcttacaaactctcagatgataaagaagctcaactaaaacaagagaacaaaatgtttcaagatcttttaggagagtatgagtcccttggaaaagaacacaggagagtaaaggatgcattaaatacaactgagaacaaattgcttgatgcatatactcagatttctgatttgaaaagaatgatttcaaaacttgaagctcaggtcaagcaagtagaacatgaaaatatgttaagccttcgtcataattctagaattcacgtgagaccctcgcgtgccaacacactagcaacttcagacgtcagcaggcggaaatggctgattccaggtgcagagtattccatctttactggccagcctctggacacccaggacagtaacgtggataaccagctggaggaaacctgtagcctagggcaccgttcacctctggaaaaggattcttcacctggaagttcatcaacaagcttgttgataaaaaagcaaagagagacttcagacacgccgatcatgagagctttaaaagaacttgatgagggaaaaatatttaaaaattgggggacacagacagagaaagaggacacctcaaatataaatcctcggcaaactgaaacttcagttaatgcaagtcgttctccagaaaagtgtgcccaacagagacaaaagagacttaattcggcctcacagagatcatcatctttaccaccttcaaatcgtaaatcaagtactccaacaaaaagagagattatgctaacaccagtgactgtggcttatagtccaaagcgatcccctaaagaaaacttgtccccaggatttagtcatctgcttagcaaaaatgagagcagtccaattcgatttgatatacttttggatgatttagatactgttcctgtgtctacattacaacgtaccaatccaagaaagcaactccagtttcttcctctagatgactcggaagaaaaaacttattctgagaaagccaccgataaccatgttaatcatagctcttgccctgaaccggtgccaaatggagtgaagaaagtatctgtgagaacagcctgggagaagaataaatcagttagctacgaacagtgtaagccggtttcagtcactccacaggggaatgattttgaatatacagcaaaaattcggaccctagctgaaacagaacgattttttgatgaacttacaaaagaaaaggaccagattgaggcagcactaagcaggatgccttctcctggaggacgaatcactttacagacaagattaaatcaggaagccttggaagatcgtttggaaaggattaatcgagaactgggttcagttcgcatgacgctaaagaaattccatgttttgcgcacctctgcaaatctttgagatttgtagccattaaattttgagacatttttgtttgcactaatgtataattatgcagtcagaaaaggcaaactattttgtactgtttataagccttcaaacagtagttttacaatcatgctattcttacacttgctattttatacttcaaatggccacatattttcaagatatttttgttatgctcaggaatctcttgtatattttactatttaaaaagcattatttttaaatagtatctgtctccaatttatatcaagaataaggaaatataaacagaggaagcagcttgtttctaaacaaatagtgttatccttttacaattaactgcacatcaattttatagacttgttctacattgtaaatacaattcagtttttaaaaaataaagcttaatagcttccataatgatagactagtacatgctgaatacataaacaattacagtgtaccttggatttcagttgtgttgaggtttttaaaaaatgataatgcaattcgtatttgaaacgtgtcttagagtgaatatcagaatagtaataatggactcttggaaagctttgaaaactacatgaatataactcattttctttaaactttattgtctgtaagagaaaaaagagagattgtaattctctaattttatcttttctaaaaaagttaaacaattggagagccctctctggagggctctcagagtagctctctgcccattgttctgaattaacttgtgtcccaccctggacaataaatggacagataaaccctttgaaatacaagccaccaccccgtgagggattaagagggcagcctggttttcttagtgtgcatggcttcagctgtccgtcatagttgtcatctggatatgttcacccctttccactccttcaccctggccaaaaggaaaatatttccactgtaggtgctgtaagaacactagactttagatcatcacaatctactgtatttgttaatggacagggagtgtgtccggatggagcctggtgccttcccctcggccttgcagagggctccagcccactgcctctgtggtagccgctggctctcagaagtagcacgtgggcaggagtctctcctctgatccaggagcattggcaggtttgtgttgggactgctggttaagttggagctgtgtaactacttagtttttggtagccaatcagaacgcagtgccccacatattccagctcggtacatgttgataaacagactcatccaaactttcaaaatggattcgtactaaacatgctcaggttttaaattttggtttgcttttgagcttttcctctttatgtggctcttaataataagtagttagaatgaaccaagccatcccagttattccaagcaggctctcaaatgacctttgagcacccttcacctggctggtccccaggccaggggtccacagccctgctcccttctcagcaaggagggtggcctgtctgacagtgcagttgaacctttgctccctactctgcaacttttgaagacttcaggctaatcaaaattacttataattagaatcaagtgcctttattcttgttttttatttttattttattttatttatttatttttttagatggagttttgcccttgttgcccaggctggagtgcaatggcatgatctcagctcactgcaacctctgcctcccgggttcaagcgattctcctgcctcagcctgctgggtagctgggattacaggcatctgccaccacgcccggctaattttgtgtgtgtgtatatgtctatgtgtgtgtgtgtatgtatatatcttttttttttttttagtagagatggtgtttcaccatattggccaggctggtctcaaactcctgaactcatgtgatccgcctgccttggcccctcaaagtgctgggattacaggcatgagccaccacacccggcctattcttggtattctttattcttggttttctagcctttagaaaaaaaaaatctagtcttggtaaagaaaatgttcattttaatcaagctccagtacagcttgtgtcaagacctagtaagaccacctttaatgtgttcctggatatgacattaaaaactaacttgaaaattgttaggatatttccttgttccctacttttattgtaaaatctactacattcttaagaattaaaaaatgccatttcagaagagatgatagttttatcttgccaaggaattatcttcttagtagcctatattggcttattccaaaaaaggcgttaacctccatcaaaacatcttctgcgcctctctctcagcatatgctttgatatttgaagtgtgtaatagattggagctatcagtcacttatttctaaaaaatgtattcttttttcttcatagctgtgaagagggataccaaggaaagttctttctgctgtctttctcttcggtaatgcttatcttatgaacactcaactgaaaaaacactccacctaaaagcaggaaagatggcaattctaaatagcagctattatccccgggtataaactatttttgttgttggcttggggctttgctgcaggtattaatagtttaaaaagaaaaaaaaaaaaaaaa

SEQ ID NO: 18652 - DNA, 998 bp, Homo sapiens
  source 1..998: mol_type = unassigned DNA
gagggacggtgggggtgaccccctctcctcttggcttgacaggaagcatggcactctggcgggcataccagcgggccctggccgctcacccgtggaaagtacaggtcctgacagctgggtccctgatgggcctgggtgacattatctcacagcagctggtggagaggcggggtctgcaggaacaccagagaggccggactctgaccatggtgtccctgggctgtggctttgtgggccctgtggtaggaggctggtacaaggttttggatcggttcatccctggcaccaccaaagtggatgcactgaagaagatgttgttggatcaggggggctttgccccgtgttttctaggctgctttctcccactggtaggggcacttaatggactgtcagcccaggacaactgggccaaactacagcgggattatcctgatgcccttatcaccaactactatctatggcctgctgtgcagttagccaacttctacctggtcccccttcattacaggttggccgttgtccaatgtgttgctgttatctggaactcctacctgtcctggaaggcacatcggctctaagcctgcctcactccatcgtttccaccttgcagtgatgcagcttgaccctggaacggtcagacaacctcctcaaagtgggcataccagtttccacggggttgggttgccggtcagagcttaagaggactagcaccctgcaatgcccctcttcactctaaaatgtacactgactgctttagagcccttgataatagtcttattcccaccacatactaggcactccataaatatctgttgaaccttcatgaccttatcaactttacacccatatcccagcaaatgccactcatccccactcttcatagacacatttgttactctaaccctgcctaggcttcttgtagctccagctctttagagactcccggaaccctttatatggtgcctcagtaaatatgttattaaatatgtaatccggaa

SEQ ID NO: 18653 - DNA, 2011 bp, Homo sapiens
  source 1..2011: mol_type = unassigned DNA
acagtgactatgatactgcctcctaagcaaggacacaccccagtgatgagaaataggcaaaccatggtcttgaaatgcctaggagtataggctggggtttggagggaaatagttggatgacctcaggaaatagaaaaaaacaggcagctgctttttggagagagtggagatgagatcagtgcctacctggaacaaaaccctctggcattctagactggctgaatatgtagtgtagggactttatcatctgtcagaaaatctcctttaagaagaagcgatcaagaagtttagtcctggccaggtgtggtggctcacgcctgtaatcccaacactttgggaggccaaggcaggcggattacttgaggtcagaagttcaagaccagcctggccaatgtatggtgaaaccccgtctctaccaaaaatgtaaaaaattagccaggtgtgatggcacacacctgcaatcccagctactcaggaggctgaggcagaagaatcatttgaacctgggatgcagaggttgcagtgagccgagatcctgccactgcactccagcctgggtgacggagcgagactccgtctcaaaaagagttcagcccctatcctgtacagatgagaaaatagacctggaggaaacccaagtctatcaacagcagagaccacaacccatgtcagtgcaaagaagccaagtgttgcactaccctattgggatccagctcacattgagccagttttgttttttgagctgttacgcaagtgccttctgtcgaagagaagctttactcaattctacagggcagcccccttcctattttcagtggtagaaaagatgagacctggggatccacacttgaggctgtagattggtgctggcagccctgcttctgcaactgagtctcagccctagtcttgaccttgttctttttctctaacaagccttttctctttctaaccctccctcccaatatacccacttcatactatccattgttcatacacttctctacctttattcctcttctcatattcctcccttcgccagagtgtctttttccaccatcttcacctgagttcaattcatccttcaaggtcccggctcaaattccaccttcaccaaagagcttcccagttttctccagtaaaaaatagtttccctcccttgtgttcccaagggggaagggaggaaaaaggataaacaagcattaagcacttgatccattttaggcacttcgcatgtgtcacttgtatgagggccctgtggtaggaggctggtacaaggttttggatcggttcatccctggcaccaccaaagtggatgcactgaagaagatgttgttggatcaggggggctttgccccgtgttttctaggctgctttctcccactggtaggggcacttaatggactgtcagcccaggacaactgggccaaactacagcgggattatcctgatgcccttatcaccaactactatctatggcctgctgtgcagttagccaacttctacctggtcccccttcattacaggttggccgttgtccaatgtgttgctgttatctggaactcctacctgtcctggaaggcacatcggctctaagcctgcctcactccatcgtttccaccttgcagtgatgcagcttgaccctggaacggtcagacaacctcctcaaagtgggcataccagtttccacggggttgggttgccggtcagagcttaagaggactagcaccctgcaatgcccctcttcactctaaaatgtacactgactgctttagagcccttgataatagtcttattcccaccacatactaggcactccataaatatctgttgaaccttcatgaccttatcaactttacacccatatcccagcaaatgccactcatccccactcttcatagacacatttgttactctaaccctgcctaggcttcttgtagctccagctctttagagactcccggaaccctttatatggtgcctcagtaaatatgttattaaatatgtaatccgg

SEQ ID NO: 18654 - DNA, 1005 bp, Homo sapiens
  source 1..1005: mol_type = unassigned DNA
gcggaagttcctaggccagcctgtcacgtgggagggaggctcggcgctcaggaagcatggcactctggcgggcataccagcgggccctggccgctcacccgtggaaagtacaggtcctgacagctgggtccctgatgggcctgggtgacattatctcacagcagctggtggagaggcggggtctgcaggaacaccagagaggccggactctgaccatggtgtccctgggctgtggctttgtgggccctgtggtaggaggctggtacaaggttttggatcggttcatccctggcaccaccaaagtggatgcactgaagaagatgttgttggatcaggggggctttgccccgtgttttctaggctgctttctcccactggtaggggcacttaatggactgtcagcccaggacaactgggccaaactacagcgggattatcctgatgcccttatcaccaactactatctatggcctgctgtgcagttagccaacttctacctggtcccccttcattacaggttggccgttgtccaatgtgttgctgttatctggaactcctacctgtcctggaaggcacatcggctctaagcctgcctcactccatcgtttccaccttgcagtgatgcagcttgaccctggaacggtcagacaacctcctcaaagtgggcataccagtttccacggggttgggttgccggtcagagcttaagaggactagcaccctgcaatgcccctcttcactctaaaatgtacactgactgctttagagcccttgataatagtcttattcccaccacatactaggcactccataaatatctgttgaaccttcatgaccttatcaactttacacccatatcccagcaaatgccactcatccccactcttcatagacacatttgttactctaaccctgcctaggcttcttgtagctccagctctttagagactcccggaaccctttatatggtgcctcagtaaatatgttattaaatatgtaatccgg

SEQ ID NO: 18655 - DNA, 906 bp, Homo sapiens
  source 1..906: mol_type = unassigned DNA
caggaagcatggcactctggcgggcataccagcgggccctggccgctcacccgtggaaagtacaggtcctgacagctgggtccctgatgggcctgggtgacattatctcacagcagctggtggagaggcggggtctgcaggaacaccagagaggccggactctgaccatggtgtccctgggctgtggctttgtgggccctgtggtaggaggctggtacaaggttttggatcggttcatccctggcaccaccaaagtggatgcactgaagaagatgttgttggatcaggggggctttgccccgtgttttctaggctgctttctcccactggtaggggcacttaatggactgtcagcccaggacaactgggccaaactacagcgggattatcctgatgcccttatcaccaactactatgttggccgttgtccaatgtgttgctgttatctggaactcctacctgtcctggaaggcacatcggctctaagcctgcctcactccatcgtttccaccttgcagtgatgcagcttgaccctggaacggtcagacaacctcctcaaagtgggcataccagtttccacggggttgggttgccggtcagagcttaagaggactagcaccctgcaatgcccctcttcactctaaaatgtacactgactgctttagagcccttgataatagtcttattcccaccacatactaggcactccataaatatctgttgaaccttcatgaccttatcaactttacacccatatcccagcaaatgccactcatccccactcttcatagacacatttgttactctaaccctgcctaggcttcttgtagctccagctctttagagactcccggaaccctttatatggtgcctcagtaaatatgttattaaatatgtaatccggaa

SEQ ID NO: 18656 - DNA, 603 bp, Homo sapiens
  source 1..603: mol_type = unassigned DNA
gcggaagttcctaggccagcctgtcacgtgggagggaggctcggcgctcaggaagcatggcactctggcgggcataccagcgggccctggccgctcacccgtggaaagtacaggtcctgacagctgggtccctgatgggcctgggtgacattatctcacagcagctggtggagaggcggggtctgcaggaacaccagagaggccggactctgaccatggtgtccctgggctgtggctttgtggattatcctgatgcccttatcaccaactactatctatggcctgctgtgcagttagccaacttctacctggtcccccttcattacaggttggccgttgtccaatgtgttgctgttatctggaactcctacctgtcctggaaggcacatcggctctaagcctgcctcactccatcgtttccaccttgcagtgatgcagcttgaccctggaacggtcagacaacctcctcaaagtgggcataccagtttccacggggttgggttgccggtcagagcttaagaggactagcaccctgcaatgcccctcttcactctaaaatgtacactgactgctttagagcccttgataatagtcttattccca

SEQ ID NO: 18657 - DNA, 859 bp, Homo sapiens
  source 1..859: mol_type = unassigned DNA
ctcggcgctcaggaagcatggcactctggcgggcataccagcgggccctggccgctcacccgtggaaagtacaggtcctgacagctgcccatcccaggagatgtcctgacaacacctgtgtaccctgcatagggtccctgatgggcctgggtgacattatctcacagcagctggtggagaggcggggtctgcaggaacaccagagaggccggactctgaccatggtgtccctgggctgtggctttgtgggccctgtggtaggaggctggtacaaggttttggatcggttcatccctggcaccaccaaagtggatgcactgaagaagatgttgttggatcaggggggctttgccccgtgttttctaggctgctttctcccactggtaggggcacttaatggactgtcagcccaggacaactgggccaaactacagcgggattatcctgatgcccttatcaccaactactatctatggcctgctgtgcagttagccaacttctacctggtcccccttcattacaggttggccgttgtccaatgtgttgctgttatctggaactcctacctgtcctggaaggcacatcggctctaagcctgcctcactccatcgtttccaccttgcagtgatgcagcttgaccctggaacggtcagacaacctcctcaaagtgggcataccagtttccacggggttgggttgccggtcagagcttaagaggactagcaccctgcaatgcccctcttcactctaaaatgtacactgactgctttagagcccttgataatagtcttattcccaccacatactaggcactccataaatatctgttgaaccttcatgaccttatcaactttacacc

SEQ ID NO: 18658 - DNA, 575 bp, Homo sapiens
  source 1..575: mol_type = unassigned DNA
ggagggaggctcggcgctcaggaagcatggcactctggcgggcataccagcgggccctggccgctcacccgtggaaagtacaggtcctgacagctggcctcctggactgaaggacacgcttcctgctcctcactccaagaagccacttcttgcccctctgccttctgcgcatgaaactcaaaagccacaaaagaatattgctgtctgccatccccacgagggtccctgatgggcctgggtgacattatctcacagcagctggtggagaggcggggtctgcaggaacaccagagaggccggactctgaccatggtgtccctgggctgtggctttgtgggccctgtggtaggaggctggtacaaggttttggatcggttcatccctggcaccaccaaagtggatgcactgaagaagatgttgttggatcaggggggctttgccccgtgttttctaggctgctttctcccactggtaggggcacttaatggactgtcagcccaggacaactgggccaaactacagcgggattatcctgatgcccttatcaccaactactatctatggcctgctgtgca

SEQ ID NO: 18659 - DNA, 482 bp, Homo sapiens
  source 1..482: mol_type = unassigned DNA
ggtccctgatgggcctgggtgacattatctcacagcagctggtggagaggcggggtctgcaggaacaccagagaggccggactctgaccatggtgtccctgggctgtggctttgtgggccctgtggtaggaggctggtacaaggttttggatcggttcatccctggcaccaccaaagtggatgcactgaagaagatgttgttggatcaggattatcctgatgcccttatcaccaactactatctatggcctgctgtgcagttagccaacttctacctggtcccccttcattacaggttggccgttgtccaatgtgttgctgttatctggaactcctacctgtcctggaaggcacatcggctctaagcctgcctcactccatcgtttccaccttgcagtgatgcagcttgaccctggaacggtcagacaacctcctcaaagtgggcataccagtttccacggggttgggttgccggtcagagc

SEQ ID NO: 18660 - DNA, 623 bp, Homo sapiens
  source 1..623: mol_type = unassigned DNA
ctgacagccaggggaagaagacaggttttacagggataaaaaagggggattatcctgatgcccttatcaccaactactatctatggcctgctgtgcagttagccaacttctacctggtcccccttcattacaggttggccgttgtccaatgtgttgctgttatctggaactcctacctgtcctggaaggcacatcggctctaagcctgcctcactccatcgtttccaccttgcagtgatgcagcttgaccctggaacggtcagacaacctcctcaaagtgggcataccagtttccacggggttgggttgccggtcagagcttaagaggactagcaccctgcaatgcccctcttcactctaaaatgtacactgactgctttagagcccttgataatagtcttattcccaccacatactaggcactccataaatatctgttgaaccttcatgaccttatcaactttacacccatatcccagcaaatgccactcatccccactcttcatagacacatttgttactctaaccctgcctaggcttcttgtagctccagctctttagagactcccggaaccctttatatggtgcctcagtaaatatgttattaaatatgtaatccggaa

SEQ ID NO: 18661 - DNA, 1939 bp, Homo sapiens
  source 1..1939: mol_type = unassigned DNA
gggcccggagccggcgagtgctcccgggaactctgcctgcgcggcggcagcgaccggaggccaggcccagcacgccggagctggcctgctggggaggggcgggaggcgcgcgcgggagggtccgcccggccagggccccgggcgctcgcagaggccggccgcgctcccagcccgcccggagcccatgcccggcggctggccagtgctgcggcagaagggggggcccggctctgcatggccccggctgctgacatgacttctttgccactcggtgtcaaagtggaggactccgccttcggcaagccggcggggggaggcgcgggccaggcccccagcgccgccgcggccacggcagccgccatgggcgcggacgaggagggggccaagcccaaagtgtccccttcgctcctgcccttcagcgtggaggcgctcatggccgaccacaggaagccgggggccaaggagagcgccctggcgccctccgagggcgtgcaggcggcgggtggctcggcgcagccactgggcgtcccgccggggtcgctgggagccccggacgcgccctcttcgccgcggccgctcggccatttctcggtggggggactcctcaagctgccagaagatgcgctcgtcaaagccgagagccccgagaagcccgagaggaccccgtggatgcagagcccccgcttctccccgccgccggccaggcggctgagccccccagcctgcaccctccgcaaacacaagacgaaccgtaagccgcggacgcccttcaccaccgcgcagctgctggcgctggagcgcaagttccgccagaagcagtacctgtccatcgccgagcgcgcggagttctccagctcgctcagcctcactgagacgcaggtgaagatatggttccagaaccgccgcgccaaggcaaagagactacaagaggcagagctggagaagctgaagatggccgccaagcccatgctgccaccggctgccttcggcctctccttccctctcggcggccccgcagctgtagcggccgcggcgggtgcctcgctctacggtgcctctggccccttccagcgcgccgcgctgcctgtggcgcccgtgggactctacacggcccatgtgggctacagcatgtaccacctgacatagagggtcccaggtcgcccacctgtgggccagccgattcctccagccctggtgctgtacccccgacgtgctcccctgctcggcaccgccagccgccttccctttaaccctcacactgctccagtttcacctctttgctccctgagttcactctccgaagtctgatccctgccaaaaagtggctggaagagtcccttagtactcttctagcatttagatctacactctcgagttaaagatggggaaactgagggcagagaggttaacagatttatctaaggtccccagcagaattgacagttgaacagagctagaggccatgtctcctgcatagcttttccctgtcctgacaccaggcaagaaaagcgcagagaaatcggtgtctgacgattttggaaatgagaacaatctcaaaaaaaaaaaaaaaaaaaaaaaaaaaaaaaaaaaagaaaagagaaaaaaaagactagccagccaggaagatgaatcctagcttcttccattggaaaatttaagacaagttcaacaacaaaacatttgctctggggggcagggaaaacacagatgtgttgcaaaggtaggttgaagggacctctctcttaccagtaccagaaacacaattgtaaaattaaaaaaaaaaaaaaactctttctatttaacagtacatttgtgtggctctcaaacatccctttggaagggattgtgtgtactatgtaatatactgtatatttgaaattttattatcatttatattatagctatatttgttaaataaattaattttaagctacaaaaa

SEQ ID NO: 18662 - DNA, 2489 bp, Homo sapiens
  source 1..2489: mol_type = unassigned DNA
cttcccctcggaggaaaggctcagctcccagcgcgcccctcccgtctccgcagcaaaaaagtttgagtcgccgctgccgggttgccagcggagtcgcgcgtcgggagctacgtagggcagagaagtcatggcttctccgtccaaaggcaatgacttgttttcgcccgacgaggagggcccagcagtggtggccggaccaggcccggggcctgggggcgccgagggggccgcggaggagcgccgcgtcaaggtctccagcctgcccttcagcgtggaggcgctcatgtccgacaagaagccgcccaaggaggcgtccccgctgccggccgaaagcgcctcggccggggccaccctgcggccactgctgctgtcggggcacggcgctcgggaagcgcacagccccgggccgctggtgaagcccttcgagaccgcctcggtcaagtcggaaaattcagaagatggagcggcgtggatgcaggaacccggccgatattcgccgccgccaagacatatgagccctaccacctgcaccctgaggaaacacaagaccaatcggaagccgcgcacgccctttaccacatcccagctcctcgccctggagcgcaagttccgtcagaaacagtacctctccattgcagagcgtgcagagttctccagctctctgaacctcacagagacccaggtcaaaatctggttccagaaccgaagggccaaggcgaaaagactgcaggaggcagaactggaaaagctgaaaatggctgcaaaacctatgctgccctccagcttcagtctccctttccccatcagctcgcccctgcaggcagcgtccatatatggagcatcctacccgttccatagacctgtgcttcccatcccgcctgtgggactctatgccacgccagtgggatatggcatgtaccacctgtcctaaggaagaccagatcaatagactccatgatggatgcttgtttcaaagggtttcctctccctctccacgaaggcagtaccagccagtactcctgctctgctaaccctgcgtgcaccaccctaagcggctaggctgacagggccacacgacatagctgaaatttgttctgtaggcggaggcaccaagccctgttttcttggtgtaatcttccagatgcccccttttcctttcacaaagattggctctgatggtttttatgtataaatatatatatataataaaatataatacatttttatacagcagacgtaaaaattcaaattattttaaaaggcaaaatttatatacatatgtgctttttttctatatctcaccttcccaaaagacactgtgtaagtccatttgttgtattttcttaaagagggagacaaattatttgcaaaatgtgctaaagtcaatgatttttacgggattattgacttctgcttatggaaaacaaagaaacagacacaatgcacacagaaaatattagatatggagagattattcaaagtgaaggggacacatcatatttctgcattttacttgcattaaaagaaacctctttatatactacagttgttcctatctctcccccgccccccaccgccccaccacacacatatttttaaagtttttccttttttaagaatatttttgtaagaccaatacctgggatgagaagaatcctgagactgcctggaggtgaggtagaaaattagaaatacttcctaattcttctcaaggctgttggtaactttatttcagataattggagagtaaaatgttaaaacctgttgagaggaattgatggtttctgagaaatactaggtacattcatcctcacagattgcaaaggtgatttgggtgggggtttagtaattttctgcttaaaaaatgagtatcttgtaaccattacctatatgctaaatattcttgaacaattagtagatccagaaagaaaaaaaaatatgctttctctgtgtgtgtacctgttgtatgtcctaaacttattagaaaattttatatacttttttacatgttggggggcagaaggtaaagccatgttttgacttggtgaaaatgggattgtcaaacagcccattaagttccctggtatttcaccttcctgtccatctgtcccctccctccggtatacctttatccctttgaaagggtgcttgtacaatttgatatattttattgaagagttatctcttattctgaattaaattaagcatttgttttattgcagtaaagtttgtccaaactcacaattattttaagaggtgttctctgttcttagctgggcttagctcgaaagtgctacccacatgagggggaagctggtcttttttaatattttaatgtaagtcaaccaagagttgtggccagattcagccatgttggggtgattggtggtggtggggagtgaactgaaactactgaaatactttgaaatgtttcctctggcagcttgttacttatggaaaagaggtggaattgctgcgaggagtttttc

SEQ ID NO: 18663 - DNA, 1861 bp, Homo sapiens
  source 1..1861: mol_type = unassigned DNA
gtagtgggtcagggagggcaccggaacagcgcgacccgacagcccgggaaacggacagccgtgtcagaagggcaggtgccagtgggcaggaggccggagagaaagccgcagcttccttccacctcgcgccgggcccgcggccgcgcacggggaccgctccgagttcctcccggcgggaaccccccgccccagaactttggtctcgtcccacccacccccgcccgcgccatggtctcgccctagggagccatcgataactctacgctcggcctcgatcgactcgctccggctcccctcgccgtcctggacacggcggagtgcggagccgcccgtaagctctagggcccgtgcaggccacaccatgaacacctccccaggcacggtgggcagtgacccggtcatcctggccactgcaggctacgaccacaccgtgcgcttctggcaggcccacagcggcatctgcacccggacggtgcagcaccaggactcccaggtgaatgccttggaggtcacaccggaccgcagcatgattgctgctgcaggttaccagcacatccgcatgtatgatctcaactccaataaccctaaccccatcatcagctacgacggcgtcaacaagaacatcgcgtctgtgggcttccacgaagacggccgctggatgtacacgggcggcgaggactgcacagccaggatctgggacctcaggtcccggaacctgcagtgccagcggatcttccaggtgaacgcacccattaactgcgtgtgcctgcaccccaaccaggcagagctcatcgtgggtgaccagagcggggctatccacatctgggacttgaaaacagaccacaacgagcagctgatccctgagcccgaggtctccatcacgtccgcccacatcgatcccgacgccagctacatggcagctgtcaatagcaccggaaactgctatgtctggaatctgacggggggcattggtgacgaggtgacccagctcatccccaagactaagatccctgcccacacgcgctacgccctgcagtgtcgcttcagccccgactccacgctcctcgccacctgctcggctgatcagacgtgcaagatctggaggacgtccaacttctccctgatgacggagctgagcatcaagagcggcaaccccggggagtcctcccgcggctggatgtggggctgcgccttctcgggggactcccagtacatcgtcactgcttcctcggacaacctggcccggctctggtgtgtggagactggagagatcaagagagagtatggcggccaccagaaggctgttgtctgcctggccttcaatgacagtgtgctgggctagcctgtgacccctcgggactgcctggtgcaggtggtggcagctggagggacccatgcagcacccaggtcagagcagaccctcccctgccggcctgcgccagctggacctgatggccccctgtggcgccttgacctgctgggccaggctgccctgggactctcagcccccagttgcttatccagatgtgacagagctcgacccaagccaggctgcacactcctggactgggctagcctgcactgcctgggaaagtcggccgagggcccaaagctgctgaggggtctgaggctggtgcccacccccaagctagtgtgttctctgcccctccctgcccgcgtttcagggcctcggtccatagagaacaccaccaccatggccaggtggaagggtttattagtccctgccagcagctgtcctccctggtgcaggtggcctggccagcccactggattggggacgggccaggctgggccaggtcgggggctcagtctgggaggtaataaaagcagaccgacacgc

SEQ ID NO: 18664 - DNA, 1870 bp, Homo sapiens
  source 1..1870: mol_type = unassigned DNA
gacagcccgggaaacggacagccgtgtcagaagggcaggtgccagtgggcaggaggccggagagaaagccgcagcttccttccacctcgcgccgggcccgcggccgcgcacggggaccgctccgagttcctcccggcgggaaccccccgccccagaactttggtctcgtcccacccacccccgcccgcgccatggtctcgccctagggagccatcgataactctacgctcggcctcgatcgactcgctccggctcccctcgccgtcctggacacggcggagtgcggagccgcccgtaagatgctctgacctttgacccctgccgttcagctctagggcccgtgcaggccacaccatgaacacctccccaggcacggtgggcagtgacccggtcatcctggccactgcaggctacgaccacaccgtgcgcttctggcaggcccacagcggcatctgcacccggacggtgcagcaccaggactcccaggtgaatgccttggaggtcacaccggaccgcagcatgattgctgctgcaggttaccagcacatccgcatgtatgatctcaactccaataaccctaaccccatcatcagctacgacggcgtcaacaagaacatcgcgtctgtgggcttccacgaagacggccgctggatgtacacgggcggcgaggactgcacagccaggatctgggacctcaggtcccggaacctgcagtgccagcggatcttccaggtgaacgcacccattaactgcgtgtgcctgcaccccaaccaggcagagctcatcgtgggtgaccagagcggggctatccacatctgggacttgaaaacagaccacaacgagcagctgatccctgagcccgaggtctccatcacgtccgcccacatcgatcccgacgccagctacatggcagctgtcaatagcaccggaaactgctatgtctggaatctgacggggggcattggtgacgaggtgacccagctcatccccaagactaagatccctgcccacacgcgctacgccctgcagtgtcgcttcagccccgactccacgctcctcgccacctgctcggctgatcagacgtgcaagatctggaggacgtccaacttctccctgatgacggagctgagcatcaagagcggcaaccccggggagtcctcccgcggctggatgtggggctgcgccttctcgggggactcccagtacatcgtcactgcttcctcggacaacctggcccggctctggtgtgtggagactggagagatcaagagagagtatggcggccaccagaaggctgttgtctgcctggccttcaatgacagtgtgctgggctagcctgtgacccctcgggactgcctggtgcaggtggtggcagctggagggacccatgcagcacccaggtcagagcagaccctcccctgccggcctgcgccagctggacctgatggccccctgtggcgccttgacctgctgggccaggctgccctgggactctcagcccccagttgcttatccagatgtgacagagctcgacccaagccaggctgcacactcctggactgggctagcctgcactgcctgggaaagtcggccgagggcccaaagctgctgaggggtctgaggctggtgcccacccccaagctagtgtgttctctgcccctccctgcccgcgtttcagggcctcggtccatagagaacaccaccaccatggccaggtggaagggtttattagtccctgccagcagctgtcctccctggtgcaggtggcctggccagcccactggattggggacgggccaggctgggccaggtcgggggctcagtctgggaggtaataaaagcagaccgacacgcagatgttgctcgggaa

SEQ ID NO: 18665 - DNA, 1720 bp, Homo sapiens
  source 1..1720: mol_type = unassigned DNA
gtgcggagccgcccgtaagatgctctgacctttgacccctgccgttcagctctagggcccgtgcaggccacaccatgaacacctccccaggcacggtgggcagtgacccggtcatcctggccactgcaggctacgaccacaccgtgcgcttctggcaggcccacagcggcatctgcacccggacggtgcagcaccaggactcccaggtgaatgccttggaggtcacaccggaccgcagcatgattgctgctgcaggttaccagcacatccgcatgtatgatctcaactccaataaccctaaccccatcatcagctacgacggcgtcaacaagaacatcgcgtctgtgggcttccacgaagacggccgctggatgtacacgggcggcgaggactgcacagccaggatctgggacctcaggtcccggaacctgcagtgccagcggatcttccaggtgaacgcacccattaactgcgtgtgcctgcaccccaaccaggcagagctcatcgtgggtgaccagagcggggctatccacatctgggacttgaaaacagaccacaacgagcagctgatccctgagcccgaggtctccatcacgtccgcccacatcgatcccgacgccagctacatggcagctgtcaatagcaccggaaactgctatgtctggaatctgacggggggcattggtgacgaggtgacccagctcatccccaagactaagatccctgcccacacgcgctacgccctgcagtgtcgcttcagccccgactccacgctcctcgccacctgctcggctgatcagacgtgcaagatctggaggacgtccaacttctccctgatgacggagctgagcatcaagagcggcaaccccggggagtcctcccgcggctggatgtggggctgcgccttctcgggggactcccagtacatcgtcactggtgagccccgccctggcctcccccatccctggcccccggcgctggcctccagagccagcccacctcggctgcagcttcccctctgctggggccgcctgcttggcctgcacctgcgctcttagccctgcacaatctccccctccagcttcctcggacaacctggcccggctctggtgtgtggagactggagagatcaagagagagtatggcggccaccagaaggctgttgtctgcctggccttcaatgacagtgtgctgggctagcctgtgacccctcgggactgcctggtgcaggtggtggcagctggagggacccatgcagcacccaggtcagagcagaccctcccctgccggcctgcgccagctggacctgatggccccctgtggcgccttgacctgctgggccaggctgccctgggactctcagcccccagttgcttatccagatgtgacagagctcgacccaagccaggctgcacactcctggactgggctagcctgcactgcctgggaaagtcggccgagggcccaaagctgctgaggggtctgaggctggtgcccacccccaagctagtgtgttctctgcccctccctgcccgcgtttcagggcctcggtccatagagaacaccaccaccatggccaggtggaagggtttattagtccctgccagcagctgtcctccctggtgcaggtggcctggccagcccactggattggggacgggccaggctgggccaggtcgggggctcagtctgggaggtaataaaagcagaccgacacgca

SEQ ID NO: 18666 - DNA, 1432 bp, Homo sapiens
  source 1..1432: mol_type = unassigned DNA
atggagcacgcgccctggagccccggagccagctctagggcccgtgcaggccacaccatgaacacctccccaggcacggtgggcagtgacccggtcatcctggccactgcaggctacgaccacaccgtgcgcttctggcaggcccacagcggcatctgcacccggacggtgcagcaccaggactcccaggtgaatgccttggaggtcacaccggaccgcagcatgattgctgctgcaggttaccagcacatccgcatgtatgatctcaactccaataaccctaaccccatcatcagctacgacggcgtcaacaagaacatcgcgtctgtgggcttccacgaagacggccgctggatgtacacgggcggcgaggactgcacagccaggatctgggacctcaggtcccggaacctgcagtgccagcggatcttccaggtgaacgcacccattaactgcgtgtgcctgcaccccaaccaggcagagctcatcgtgggtgaccagagcggggctatccacatctgggacttgaaaacagaccacaacgagcagctgatccctgagcccgaggtctccatcacgtccgcccacatcgatcccgacgccagctacatggcagctgtcaatagcaccgctcctcgccacctgctcggctgatcagacgtgcaagatctggaggacgtccaacttctccctgatgacggagctgagcatcaagagcggcaaccccggggagtcctcccgcggctggatgtggggctgcgccttctcgggggactcccagtacatcgtcactgcttcctcggacaacctggcccggctctggtgtgtggagactggagagatcaagagagagtatggcggccaccagaaggctgttgtctgcctggccttcaatgacagtgtgctgggctagcctgtgacccctcgggactgcctggtgcaggtggtggcagctggagggacccatgcagcacccaggtcagagcagaccctcccctgccggcctgcgccagctggacctgatggccccctgtggcgccttgacctgctgggccaggctgccctgggactctcagcccccagttgcttatccagatgtgacagagctcgacccaagccaggctgcacactcctggactgggctagcctgcactgcctgggaaagtcggccgagggcccaaagctgctgaggggtctgaggctggtgcccacccccaagctagtgtgttctctgcccctccctgcccgcgtttcagggcctcggtccatagagaacaccaccaccatggccaggtggaagggtttattagtccctgccagcagctgtcctccctggtgcaggtggcctggccagcccactggattggggacgggccaggctgggccaggtcgggggctcagtctgggaggtaataaaagcagaccgacacgc

SEQ ID NO: 18667 - DNA, 1832 bp, Homo sapiens
  source 1..1832: mol_type = unassigned DNA
gtgtcagaagggcaggtgccagtgggcaggaggccggagagaaagccgcagcttccttccacctcgcgccgggcccgcggccgcgcacggggaccgctccgagttcctcccggcgggaaccccccgccccagaactttggtctcgtcccacccacccccgcccgcgccatggtctcgccctagggagccatcgataactctacgctcggcctcgatcgactcgctccggctcccctcgccgtcctggacacggcggagtgcggagccgcccgtaagatgctctgacctttgacccctgccgttcagctctagggcccgtgcaggccacaccatgaacacctccccaggcacggtgggcagtgacccggtcatcctggccactgcaggctacgaccacaccgtgcgcttctggcaggcccacagcggcatctgcacccggacggtgcagcaccaggactcccaggtgaatgccttggaggtcacaccggaccgcagcatgattgctgctgcaggttaccagcacatccgcatgtatgatctcaactccaataaccctaaccccatcatcagctacgacggcgtcaacaagaacatcgcgtctgtgggcttccacgaagacggccgctggatgtacacgggcggcgaggactgcacagccaggatctgggacctcaggtcccggaacctgcagtgccagcggatcttccaggtgaacgcacccattaactgcgtgtgcctgcaccccaaccaggcagagctcatcgtgggtgaccagagcggggctatccacatctgggacttgaaaacagaccacaacgagcagctgatccctgagcccgaggtctccatcacgtccgcccacatcgatcccgacgccagctacatggcagctgtcaatagcaccggaaactgctatgtctggaatctgacggggggcattggtgacgaggtgacccagctcatccccaagactaagatccctgcccacacgcgctacgccctgcagtgtcgcttcagccccgactccacgctcctcgccacctgctcggctgatcagacgtgcaagatctggaggacgtccaacttctccctgatgacggagctgagcatcaagagcggcaaccccggggagtcctcccgcggctggatgtggggctgcgccttctcgggggactcccagtacatcgtcactgcttcctcggacaacctggcccggctctggtgtgtggagactggagagatcaagagagagtatggcggccaccagaaggctgttgtctgcctggccttcaatgacagtgtgctgggctagcctgtgacccctcgggactgcctggtgcaggtggtggcagctggagggacccatgcagcacccaggtcagagcagaccctcccctgccggcctgcgccagctggacctgatggccccctgtggcgccttgacctgctgggccaggctgccctgggactctcagcccccagttgcttatccagatgtgacagagctcgacccaagccaggctgcacactcctggactgggctagcctgcactgcctgggaaagtcggccgagggcccaaagctgctgaggggtctgaggctggtgcccacccccaagctagtgtgttctctgcccctccctgcccgcgtttcagggcctcggtccatagagaacaccaccaccatggccaggtggaagggtttattagtccctgccagcagctgtcctccctggtgcaggtggcctggccagcccactggattggggacgggccaggctgggccaggtcgggggctcagtctgggaggtaataaaagcagaccgacacgca

SEQ ID NO: 18668 - DNA, 1691 bp, Homo sapiens
  source 1..1691: mol_type = unassigned DNA
cgcagcccgcccctgcggcagagtggcgcccgcgcgtgactcccccctgccggctgcggaggtgggggggggacggcgcccccgccgtgtgcgtggggcggggatggagcacgcgccctggagccccggagccagatgctctgacctttgacccctgccgttcagctctagggcccgtgcaggccacaccatgaacacctccccaggcacggtgggcagtgacccggtcatcctggccactgcaggctacgaccacaccgtgcgcttctggcaggcccacagcggcatctgcacccggacggtgcagcaccaggactcccaggtgaatgccttggaggtcacaccggaccgcagcatgattgctgctgcaggttaccagcacatccgcatgtatgatctcaactccaataaccctaaccccatcatcagctacgacggcgtcaacaagaacatcgcgtctgtgggcttccacgaagacggccgctggatgtacacgggcggcgaggactgcacagccaggatctgggacctcaggtcccggaacctgcagtgccagcggatcttccaggtgaacgcacccattaactgcgtgtgcctgcaccccaaccaggcagagctcatcgtgggtgaccagagcggggctatccacatctgggacttgaaaacagaccacaacgagcagctgatccctgagcccgaggtctccatcacgtccgcccacatcgatcccgacgccagctacatggcagctgtcaatagcaccggaaactgctatgtctggaatctgacggggggcattggtgacgaggtgacccagctcatccccaagactaagatccctgcccacacgcgctacgccctgcagtgtcgcttcagccccgactccacgctcctcgccacctgctcggctgatcagacgtgcaagatctggaggacgtccaacttctccctgatgacggagctgagcatcaagagcggcaaccccggggagtcctcccgcggctggatgtggggctgcgccttctcgggggactcccagtacatcgtcactgcttcctcggacaacctggcccggctctggtgtgtggagactggagagatcaagagagagtatggcggccaccagaaggctgttgtctgcctggccttcaatgacagtgtgctgggctagcctgtgacccctcgggactgcctggtgcaggtggtggcagctggagggacccatgcagcacccaggtcagagcagaccctcccctgccggcctgcgccagctggacctgatggccccctgtggcgccttgacctgctgggccaggctgccctgggactctcagcccccagttgcttatccagatgtgacagagctcgacccaagccaggctgcacactcctggactgggctagcctgcactgcctgggaaagtcggccgagggcccaaagctgctgaggggtctgaggctggtgcccacccccaagctagtgtgttctctgcccctccctgcccgcgtttcagggcctcggtccatagagaacaccaccaccatggccaggtggaagggtttattagtccctgccagcagctgtcctccctggtgcaggtggcctggccagcccactggattggggacgggccaggctgggccaggtcgggggctcagtctgggaggtaataaaagcagaccgacacgca

SEQ ID NO: 18669 - DNA, 3074 bp, Homo sapiens
  source 1..3074: mol_type = unassigned DNA
cgcgccagggaggttgtcgggaggggccggcgaataaaacgagcggcgaaagaaccgaaaaaaggctcgacgctaccgtgtatgaggaactttgatccttgcgggccaccattccggaagtagaatttagaggaagaaaataccggagttgcagggtataggtaaatttctcaaggttataggttggggttcttagaactttttgtggtgtgtgttggcctagagcgactcagaagcgttagtgacttcacctaaaaaagctaacctctctgctgagcgcgaccggtatgcggcgcaggatgagcctcagggcttctgttaagagtctgtctgagaaagccggtctgcgctgttcctcggtggcgaccttaattatgagatgagctaatgctttactgacttaaccatggcgcagcgggcagtgtggctcataagccacgaaccgggaactccactttgtggcaccgtgagattctccagacggtatccaactgttgaaaaacgagccagagtcttcaatggagcaagttatgtgcctgttcctgaagatggtccctttcttaaagcactgctctttgaacttagattattggatgatgataaagacttcgttgagagtcgtgatagctgttcacgcatcaataaaacatccatttatggactcctgataggaggtgaagaactctggccagttgttgcttttctgaagaatgacatgatatatgcttgtgttccactagttgaacaaactctgtcccctcgtccgccactaattagtgtcagtggagtttcacaaggctttgaatttctttttgggatacaggattttctttattcaggtcaaaaaaatgactctgagctgaatacaaaattgagccagttgcctgacttgcttctgcaggcttgtccatttggtactttattagatgccaacttacagaattcattagataataccaattttgcatctgtgactcagccacagaaacagccagcttggaaaactgggacgtacaaaggaaaaccacaagtttctatttctatcactgaaaaggtaaaatccatgcaatatgataaacagggtatagcagatacatggcaagttgttggaacagtgacttgcaagtgtgatttggaaggaatcatgccaaatgttaccatcagcttgagtctccccaccaatggatctccacttcaggatattctagttcacccttgtgtaacttctcttgactctgcaattctgacttctagtagtattgatgcaatggatgactctgcatttagtgggccttacaaatttccattcactccacctttagagtcattcaacttatgcttctacacttcccaggtccctgtcccaccaattttgggtttttatcaaatgaaggaggaagaagtacaactaagaataaccattaatttaaaacttcatgaaagtgtgaaaaataattttgaattctgtgaagcccatatacctttttacaatagaggtccaattacacatttggaatacaaaactagttttggccagcttgaagtatttcgagagaaaagcttattgatctggattattggccagaagttcccaaaatcaatggaaattagtctttctggaactgtaacttttggagccaagagccatgagaagcagccatttgacccaatttgtactggagaaacagcatatttaaagcttcattttaggatcttagattacacacttactggatgttatgcagatcagcattcagttcaagtttttgcatcaggaaaaccaaaaataagtgcacaccggaaactaatttcttctgattattacatctggaattctaaagcccctgctccagtaacatatggatcattattattgtaatagtctcatgtttaaatgggattatataatgataacagtttaaagaaaatcataatcttatatttttaatgtggatgcatataacctgtgagtgaaaaatcactgaatgatttaattgtaaaagtagtcttatgtggtgtttgtagtctgatagagcttgaaaggacattttaaaagctaatgtctccaattttgttaaccttcgattttatgccagtataattcagaacatagaaaagtaatgattcacttgggctcattttagactggtcctgggtcaccctgccacacttgtttcctagtgtttctgtggcagacattgctaatcaattacagcccttttctgtactgagccttggataaagggtcaggctcctttttagttcagagattcaggcagccactcccagtgggttgtagataatgtgcaagataaaaactattttctcttccaaatctaagtactaagctcctagtataaggtgttgttacagaataccagagaccatgttagagacaactacatctcttcaaaaaacagccaacagagacaaaggaaaagtgtttaaatagtaagctgttcttcttaatcagaactatcctattgactaataaataatctgcataattctacttaaggtgtgtaatctctgttctagagttagtttttaagtaagcttgttaatctgccactttgacattttgcttaggatgtcagtagccatattaagatgtgtagaataccttcagaagatgatcatagtgttttgtaatcatttaatgtctgcagccaaatttttaaaggtaatttagacctaatactgctcttgctgtgtcttattaagttaaaattaatgaatgaattctggtaaaaattcaaaaggcactctgtgagtagagagtatcatttaagcttattttagtcacatgtagtatatatctccttaaagctgtcactctcactttcttaccattctcttgatttcttcagaaaccatctagtcatcatctttatactctacctgcttctgcaattatatatcatattatgttttcagagcagttcattgtcaagttggactttaagtgaccattcaagaaaagatgaaatctcacgaacctcaaaacttcattcatgtctttttacaaatgagaaaaaaaaatgcattaaagattaatactcaatttgattata

SEQ ID NO: 18670 - DNA, 16737 bp, Homo sapiens
  source 1..16737: mol_type = unassigned DNA
atgctggtgatctggattctgacgctggctctccggctctgcgcgtccgttactacagtgacaccagagggctctgctgttcacaaagccatttcccagcagggcacattgtggactggtgaggttttggagaagcagacagtcgagcaagggaagagcactctgagaaggcagaaaaatcatttccacaggtctgcaggggagctacggtgcaggaatgccctgaaagatgagggggcatctgctggatggagcgtgatgtttgctggggagagtgtggtggtgctggtgcatttgtggatgacaggagcacgagtgaagaacctgggcttggtggagtttgctagcccaggggacgacggggatggcagagccgagggctttagcctggggctcccacttagtgagcaggcaagggctgcaggagccagagagaaggagcgtcaggagacagtcataaatcatagcactttctctggtttctctcaaatcacaggctcaacagtaaacaccagtattggaggtaatacaacttctgcatccacacccagttcaagcgacccttttaccacctttagtgactatggggtgtcagtcacatttatcacgggctcaactgcaacaaaacacttccttgacagctccacaaactcaggccacagtgaggaatcaacagtatcccacagcggcccaggtgcaactggaacaacactcttcccttcccactctgcaacctcagtttttgttggagaacctaaaacctcacccatcacttcagcctcaatggaaacaacagcgttacctggcagtaccacaacagcaggcctgagtgagaaatctaccaccttctacagtagccccagatcaccagacagaacactctcacctgcccgcacgacaagctcaggcgtcagtgaaaaatcaaccacctcccacagccgaccaggcccaacgcacacaatagcgttccctgacagtaccaccatgccaggcgtcagtcaggaatctacagcttcccacagcatccccggctccacagacacaacactgtcccctggcactaccacaccatcatcccttggtccagaatctactaccttccacagcagcccaggctacactaaaacaacacgcttacctgacaacaccacaacctcaggcctccttgaagcatctacgcccgtccacagcagcactggatcgccacacacaacactgtccccttccagctctacaacccatgagggagaacctaccaccttccagagctggccaagctcaaaggacacttcgcctgcaccttctggtaccacatcagcctttgttaaactatctacaacttatcacagcagcccgagctcaactccaacaacccacttttctgccagctccacaaccttgggccatagtgaggaatcgacaccagtccacagcagcccagttgcaactgcaacaacacccccacctgcccgctccgcgacctcaggccatgttgaagaatctacagcctaccacaggagcccgggctcaactcaaacaatgcacttccctgaaagctccacaacttcaggccatagtgaagaatcagcaactttccacggcagcacaacacacacaaaatcttcaactcctagcaccacagctgccctagcacatacaagctaccacagcagcctgggctcaactgaaacaacacacttccgtgatagctccacaatctcaggccgtagtgaggaatcaaaagcatcccacagcagcccagatgcaatggcaacaacagtcttacctgccggctctacaccctcagttcttgttggagactcgacgccctcacccatcagttcaggctcaatggaaaccacagcgttacccggcagtaccacaaaaccaggcctcagtgagaaatctaccactttctacagtagccccagatcaccagacacaacacacttacctgccagcatgacaagctcaggcgtcagtgaagaatccaccacctcccacagccgaccaggctcaacacacacaacagcattccctggcagtaccaccatgccaggcctcagtcaggaatctacagcttcccacagcagcccaggccccacagacacaacattgtcccctggcagtaccacagcatcatcccttggtccagaatatactaccttccacagccgcccaggctccactgaaacaacactcttacctgacaacaccacagcctcaggactccttgaagcatctatgcccgtccacagcagcaccagatcgccacacacaacactgtcccctgccggctctacaacccgtcagggagaatctaccacattccatagctggccaagctcaaaggacactaggcctgcacctcctactaccacatcagcctttgttgagccatctacaacctcccacggcagcccgagctcaattccaacaacccacatttctgcccgctccacaacctcaggcctcgttgaagaatctacgacctaccacagcagcccgggctcaactcaaacaatgcacttccctgaaagcgacacaacttcaggccgtggtgaagaatcaacaacttcccacagcagcacaacacacacaatatcttcagctcctagcaccacatctgcccttgttgaagaacctaccagctaccacagcagcccgggctcaactgcaacaacacacttccctgacagctccacaacctcaggccgtagtgaggaatcaacagcatcgcacagcagccaagacgcaacgggaacaatagtcctacctgcccgctccacaacctcagttcttcttggagaatctacgacctcacccatcagttcaggctcaatggaaacgacagcgttacccggcagtaccacaacgccaggcctcagtgagagatctaccactttccatagtagccccagatcaccagccacaacactctcacctgccagcacgacaagctcaggcgtcagtgaagaatccaccacctcccgcagccgaccaggctcaacgcacacaacagcattccctgacagcaccaccacgccaggcctcagtcggcattctacaacttcccacagcagcccaggctcaacggatacaacactgttacctgccagcaccaccacctcaggccccagtcaggaatcaacaacttcccacagcagctcaggttcaactgacacagcactgtcccctggcagtaccacagccttatcctttggtcaagaatctacaaccttccacagcaacccaggctccactcacacaacactcttccctgacagcaccacaagctcaggcatcgttgaagcatctacacgcgtccacagcagcactggctcaccacgcacaacactgtcccctgccagctccacaagccctggacttcagggagaatctactgccttccagacccacccagcctcaactcacacaacgccttcacctcctagcaccgcaacagcccctgttgaagaatctacaacctaccaccgcagcccaggctcgactccaacaacacacttccctgccagctccacaacttcgggccacagtgagaaatcaacaatattccacagcagcccagatgcaagtggaacaacaccctcatctgcccactccacaacctcaggtcgtggagaatctacaacctcacgcatcagtccaggctcaactgaaataacaacgttacctggcagtaccacaacaccaggcctcagtgaggcatctaccaccttctacagcagccccagatcaccaaccacaacactctcacctgccagcatgacaagcctgggcgtcggtgaagaatccaccacctcccgtagccaaccaggttctactcactcaacagtgtcacctgccagcaccaccacgccaggcctcagtgaggaatctaccaccgtctacagcagcagccgaggctcaactgaaaccacagtgttccctcacagcaccacaacctcagttcatggtgaagagcctacaaccttccacagccggccagcctcaactcacacaacactgttcactgaggacagcaccacctcgggcctcactgaagaatctacagccttccccggcagcccagcctccacccaaacagggttacctgccacactcacaaccgcagacctcggtgaggaatcaactacctttcccagcagctcaggctcaactggaacaaaactctcacctgcccgctccaccacctctggcctcgttggagaatccacaccctcacgcctcagtccaagctcaaccgaaacaacaactttacctggcagtcccacaacaccaagcctcagtgagaaatcaaccaccttctacactagccccagatcaccagatgcaacactctcacctgcaaccacaacaagctcaggcgtcagcgaagaatccagcacatcccacagtcaaccaggctcaacgcacacaacagcattccctgacagcaccaccacctcagacctcagtcaggaacctacaacttcccacagcagccaaggctcaacagaggcaacactgtcccctggcagtaccacagcctcatcccttggtcaacaatctacaaccttccacagcagcccaggcgacactgaaaccacactcttacctgacgacaccataacctcaggcctcgtggaggcatctacacccacccacagcagcactggctcgctacacacaacactgacccctgccagctccacaagcgctggccttcaggaagaatctaccactttccagagctggccaagctcaagtgacacaacaccttcacctcccggcaccacagcagcccctgttgaagtatccacaacctaccacagccgcccgagctcaactccaacaacacacttttctgccagttccacaaccttgggccgtagtgaggaatcaacaacagtccacagcagcccaggtgcaactggaacagcactcttccctacccgctctgcaacctcagttcttgttggagaacctacaacgtcacccatcagttcaggctcaacggaaacaacagcgttacctggcagtaccacaacagcaggcctgagtgagaaatctaccaccttctacagtagccccagatcaccggacacaacactctcacctgccagcacgacaagctcaggcgtcagtgaagaatccaccacctcccacagccgaccaggctcaacgcacacaacagcattccctggcagtaccaccatgccaggcgtcagtcaggaatctacagcttcccacagcagcccaggctccacagacacaacattgtcccctggcagtaccacagcatcatcccttggtccagaatctactactttccacagcagcccaggctccactgaaacaacactcttacctgacaacaccacagcctcaggcctccttgaagcatctacgcccgtccacagcagcactggatcgccacacacaacactgtcccctgccggctctacaacacgtcagggagaatctaccaccttccagagctggccaagctcaaaggacactatgcctgcacctcctactaccacatcagcctttgttgagctatctacaacctcccacggcagcccgagctcaactccaacaacccacttttctgccagctccacaaccttgggccgtagtgaggaatcgacaacagtccacagcagcccagttgcaactgcaacaacaccctcgcctgcccgctccacaacctcaggcctcgttgaagaatctacggcgtaccacagcagcccgggctcaactcaaacaatgcacttccctgaaagctccacagcttcaggtcgtagtgaagaatcaagaacttcccacagcagcacaacacacacaatatcttcacctcctagcaccacatctgcccttgttgaagaacctaccagctaccacagcagcccgggctcaactgcaacaacacacttccctgacagctccacaacctcaggccgtagtgaggaatcaacagcatcccacagcagccaagacgcaacgggaacaatagtcctacctgcccgctccacaacctcagttcttcttggagaatctacgacctcacccatcagttcaggctcaatggaaacgacagcgttacccggcagtaccacaacgccaggcctcagtgagaaatctaccactttccacagtagccccagatcaccagccacaacactctcacctgccagcacgacaagctcaggcgtcagtgaagaatccaccacctcccacagccgaccaggctcaacgcacacaacagcattccctgacagcaccaccacgccaggcctcagtcggcattctacaacttcccacagcagcccaggctcaacggatacaacactgttacctgccagcaccaccacctcaggccccagtcaggaatcaacaacttcccacagcagcccaggttcaactgacacagcactgtcccctggcagtaccacagccttatcctttggtcaagaatctacaaccttccacagcagcccaggctccactcacacaacgctcttccctgacagcaccacaagctcaggcatcgttgaagcatctacacgcgtccacagcagcactggctcaccacgcacaacactgtcccctgccagctccacaagccctggacttcagggagaatctaccgccttccagacccacccagcctcaactcacacgacgccttcacctcctagcaccgcaacagcccctgttgaagaatctacaacctaccaccgcagcccaggctcgactccaacaacacacttccctgccagctccacaacttcgggccacagtgagaaatcaacaatattccacagcagcccagatgcaagtggaacaacaccctcatctgcccactccacaacctcaggtcgtggagaatctacaacctcacgcatcagtccaggctcaactgaaataacaacgttacctggcagtaccacaacaccaggcctcagtgaggcatctaccaccttctacagcagccccagatcaccaaccacaacactctcacctgccagtatgacaagcctaggcgtcggtgaagaatccaccacctcccgtagccaaccaggttctactcactcaacagtgtcacctgccagcaccaccacgccaggcctcagtgaggaatctaccaccgtctacagcagcagcccaggctcaactgaaaccacagtgttccctcgcacccccacaacctcagttcgtggtgaagagcctacaaccttccacagccggccagcctcaactcacacaacactgttcactgaggacagcaccacctcgggcctcactgaagaatctacagccttccccggcagcccagcctccacccaaacagggttacctgccacactcacaaccgcagacctcggtgaggaatcaactacctttcccagcagctcaggctcaactggaacaacactctcacctgcccgctccaccacctctggcctcgttggagaatccacaccctcacgcctcagtccaagctcaaccgaaacaacaactttacccggcagtcccacaacaccaagcctcagtgagaaatcaaccaccttctacactagccccagatcaccagatgcaacactctcacctgcaaccacaacaagctcaggcgtcagtgaagaatccagcacatcccacagtcaaccaggctcaacgcacacaacagcattccctgacagcaccaccacgccaggcctcagtcggcattctacaacttcccacagcagcccaggctcaacggatacaacactgttacctgccagcaccaccacctcaggccccagtcaggaatcaacaacttcccacagcagcccaggttcaactgacacagcactgtcccctggcagtaccacagccttatcctttggtcaagaatctacaaccttccacagcagcccaggctccactcacacaacactcttccctgacagcaccacaagctcaggcatcgttgaagcatctacacgcgtccacagcagcactggctcaccacgcacaacactgtcccctgccagctccacaagccctggacttcagggagaatctaccaccttccagacccacccagcctcaactcacacgacgccttcacctcctagcaccgcaacagcccctgttgaagaatctacaacctaccaccgcagcccaggctcgactccaacaacacacttccctgccagctccacaacttcgggccacagtgagaaatcaacaatattccacagcagcccagatgcaagtggaacaacaccctcatctgcccactccacaacctcaggtcgtggagaatctacaacctcacgcatcagtccaggctcaactgaaataacaacgttacctggcagtaccacaacaccaggcctcagtgaggcatctaccaccttctacagcagccccagatcaccaaccacaacactctcacctgccagtatgacaagcctaggcgtcggtgaagaatccaccacctcccgtagccaaccaggttctactcactcaacagtgtcacctgccagcaccaccacgccaggcctcagtgaggaatctaccaccgtctacagcagcagcccaggctcaactgaaaccacagtgttccctcgcagcaccacaacctcagttcgtggtgaagagcctacaaccttccacagccggccagcctcaactcacacaacactgttcactgaggacagcaccacctcgggcctcactgaagaatctacagccttccccggcagcccagcctccacccaaacagggttacctgccacactcacaaccgcagacctcggtgaggaatcaactacctttcccagcagctcaggctcaactggaacaacactctcacctgcccgctccaccacctctggcctcgttggagaatccacaccctcacgcctcagtccaagctcaaccgaaacaacaactttacccggcagtcccacaacaccaagcctcagtgagaaatcaaccaccttctacactagccccagatcaccagatgcaacactctcacctgcaaccacaacaagctcaggcgtcagtgaagaatccagcacatcccacagtcaaccaggctcaacgcacacaacagcgttccctgacagcaccaccacctcaggcctcagtcaggaacctacagcttcccacagcagccaaggctcaacagaggcaacactgtcccctggcagtaccacagcctcatcccttggtcaacaatctacaaccttccacagcagcccaggcgacactgaaaccacactcttacctgacgacaccataacctcaggcctcgtggaggcatctacacccacccacagcagcactggctcgctacacacaacactgacccctgccagctccacaagcgctggccttcaggaagaatctaccactttccagagctggccaagctcaagtgacacaacaccttcacctcccggcaccacagcagcccctgttgaagtatccacaacctaccacagccgcccgagctcaactccaacaacacacttttctgccagttccacaaccttgggccgtagtgaggaatcaacaacagtccacagcagcccaggtgcaactggaacagcactcttccctacccgctctgcaacctcagttcttgttggagaacctacaacgtcacccatcagttcaggctcaacggaaacaacagcgttacctggcagtaccacaacagcaggcctgagtgagaaatctaccaccttctacagtagccccagatcaccggacacaacactctcacctgccagcacgacaagctcaggcgtcagtgaagaatccaccacctcccacagccgaccaggctcaacgcacacaacagcattccctggcagtaccaccatgccaggcgtcagtcaggaatctacagcttcccacagcagcccaggctccacagacacaacactgtcccctggcagtaccacagcatcatcccttggtccagaatctactaccttccacagcggcccaggctccactgaaacaacactcttacctgacaacaccacagcctcaggcctccttgaagcatctacgcccgtccacagcagcactggatcgccacacacaacactgtcccctgccggctctacaacccgtcagggagaatctaccaccttccagagctggcctaactcgaaggacactacccctgcacctcctactaccacatcagcctttgttgagctatctacaacctcccacggcagcccgagctcaactccaacaacccacttttctgccagctccacaaccttgggccgtagtgaggaatcgacaacagtccacagcagcccagttgcaactgcaacaacaccctcgcctgcccgctccacaacctcaggcctcgttgaagaatctacgacctaccacagcagcccgggctcaactcaaacaatgcacttccctgaaagcgacacaacttcaggccgtggtgaagaatcaacaacttcccacagcagcacaacacacacaatatcttcagctcctagcaccacatctgcccttgttgaagaacctaccagctaccacagcagcccgggctcaactgcaacaacacacttccctgacagctccacaacctcaggccgtagtgaggaatcaacagcatcccacagcagccaagacgcaacgggaacaatagtcctacctgcccgctccacaacctcagttcttcttggagaatctacgacctcacccatcagttcaggctcaatggaaacgacagcgttacccggcagtaccacaacgccaggcctcagtgagaaatctaccactttccacagtagccccagatcaccagccacaacactctcacctgccagcacgacaagctcaggcgtcagtgaagaatccaccacctcccacagccgaccaggctcaacgcacacaacagcattccctgacagcaccaccacgccaggcctcagtcggcattctacaacttcccacagcagcccaggctcaacggatacaacactgttacctgccagcaccaccacctcaggctccagtcaggaatcaacaacttcccacagcagctcaggttcaactgacacagcactgtcccctggcagtaccacagccttatcctttggtcaagaatctacaaccttccacagcagcccaggctccactcacacaacactcttccctgacagcaccacaagctcaggcatcgttgaagcatctacacgcgtccacagcagcactggctcaccacgcacaacactgtcccctgccagctccacaagccctggacttcagggagaatctaccgccttccagacccacccagcctcaactcacacgacgccttcacctcctagcaccgcaacagcccctgttgaagaatctacaacctaccaccgcagcccaggctcgactccaacaacacacttccctgccagctccacaacttcgggccacagtgagaaatcaacaatattccacagcagcccagatgcaagtggaacaacaccctcatctgcccactccacaacctcaggtcgtggagaatctacaacctcacgcatcagtccaggctcaactgaaataacaacgttacctggcagtaccacaacaccaggcctcagtgaggcatctaccaccttctacagcagccccagatcaccaaccacaacactctcacctgccagtatgacaagcctaggcgtcggtgaagaatccaccacctcccgtagccaaccaggttctactcactcaacagtgtcacctgccagcaccaccacgccaggcctcagtgaggaatctaccaccgtctacagcagcagcccaggctcaactgaaaccacagtgttccctcgcagcaccacaacctcagttcgtcgtgaagagcctacaaccttccacagccggccagcctcaactcacacaacactgttcactgaggacagcaccacctcgggcctcactgaagaatctacagccttccccggcagcccagcctccacccaaacagggttacctgccacactcacaaccgcagacctcggtgaggaatcaactacctttcccagcagctcaggctcaactggaacaaaactctcacctgcccgctccaccacctctggcctcgttggagaatccacaccctcacgcctcagtccaagctcaaccgaaacaacaactttacccggcagtcccacaacaccaagcctcagtgagaaatcaaccaccttctacactagccccagatcaccagatgcaacactctcacctgcaaccacaacaagctcaggcgtcagcgaagaatccagcacatcccacagtcaaccaggctcaacgcacacaacagcgttccctgacagcaccaccacctcaggcctcagtcaggaacctacaacttcccacagcagccaaggctcaacagaggcaacactgtcccctggcagtaccacagcctcatcccttggtcaacaatctacaaccttccacagcagcccaggcgacactgaaaccacactcttacctgacgacaccataacctcaggcctcgtggaggcatctacacccacccacagcagcactggctcgctacacacaacactgacccctgccagctccacaagcactggccttcaggaagaatctaccactttccagagctggccaagctcaagtgacacaacaccttcacctcccagcaccacagcagtccctgttgaagtatccacaacctaccacagccgcccgagctcaactccaacaacacacttttctgccagttccacaaccttgggccgtagtgaggaatcaacaacagtccacagcagcccaggtgcaactggaacagcactcttccctacccgctctgcaacctcagttcttgttggagaacctacaacgtcacccatcagttcaggctcaacggaaacaacagcgttacctggcagtaccacaacagcaggcctgagtgagaaatctaccaccttctacagtagccccagatcaccggacacaacactttcacctgccagcacgacaagctcaggcgtcagtgaagaatccaccacctcccacagccgaccaggctcaatgcacacaacagcattccctagcagtaccaccatgccaggcgtcagtcaggaatctacagcttcccacagcagcccaggctccacagacacaacactgtcccctggcagtaccacagcatcatcccttggtccagaatctactaccttccacagcagcccaggctccactgaaacaacactcttacctgacaacaccacagcctcaggcctccttgaagcatctacacccgtccacagcagcactggatcgccacacacaacactgtcccctgccggctctacaacccgtcagggagaatctaccaccttccagagctggccaaactcgaaggacactacccctgcacctcctactaccacatcagcctttgttgagctatctacaacctcccacggcagcccgagctcaactccaacaacccacttttctgccagctccacaacattgggccgtagtgaggaatcgacaacagtccacagcagcccagttgcaactgcaacaacaccctcgcctgcccgctccacaacctcaggcctcgttgaagaatctacgacctaccacagcagcccgggctcaactcaaacaatgcacttccctgaaagcaacacaacttcaggccgtggtgaagaatcaacaacttcccacagcagcacaacacacacaatatcttcagctcctagcaccacatctgcccttgttgaagaacctaccagctaccacagcagcccgggctcaactgcaacaacacacttccctgacagctccacaacctcaggccgtagtgaggaatcaacagcatcccacagcagccaagacgcaacgggaacaatagtcctacctgcccgctccacaacctcagttcttcttggagaatctacgacctcacccatcagttcaggctcaatggaaacgacagcgttacccggcagtaccacaacgccaggcctcagtgagaaatctaccactttccacagtagcccgagctcaactccaacaacccacttttctgccagctccacaaccttgggccgtagtgaggaatcgacaacagtccacagcagcccagttgcaactgcaacaacaccctcgcctgcccgctccacaacctcaggcctcgttgaagaatctacggcgtaccacagcagcccgggctcaactcaaacaatgcacttccctgaaagctccacagcttcaggtcgtagtgaagaatcaagaacttcccacagcagcacaacacacacaatatcttcacctcctagcaccacatctgcccttgttgaagaacctaccagctaccacagcagcccgggctcaattgcaacaacacactttcctgagagctccacaacctccggccgtagtgaggaatcaacagcatcccacagcagcccagatacaaatggaatcacacccttacctgcccattttactacctcaggccgcattgcagaatctaccaccttctatatctctccaggctcaatggaaacaacattagccagcactgccacaacaccaggcctcagtgcaaaatctaccatcctttacagtagctccagatcaccagaccaaacactctcacctgccagcatgacaagctccagcatcagtggagaacccaccagcttgtatagccaagcagagtcaacacacacaacagcgttccctgccagcaccaccacctcaggcctcagtcaggaatcaacaactttccacagtaagccaggctcaactgagacaacactgtcccctggcagcatcacaacttcatcttttgctcaagaatttaccacccctcatagccaaccaggctcagctctgtcaacagtgtcacctgccagcaccacagtgccaggccttagtgaggaatctaccaccttctacagcagcccaggctcaactgaaaccacagcgttttctcacagcaacacaatgtccattcatagtcaacaatctacacccttccctgacagcccaggcttcactcacacagtgttacctgccaccctcacaaccacagacattggtcaggaatcaacagccttccacagcagctcagacgcaactggaacaacacccttacctgcccgctccacagcctcagaccttgttggagaacctacaactttctacatcagcccatcccctacttacacaacactctttcctgcgagttccagcacatcaggcctcactgaggaatctaccaccttccacaccagtccaagcttcacttctacaattgtgtctactgaaagcctggaaaccttagcaccagggttgtgccaggaaggacaaatttggaatggaaaacaatgcgtctgtccccaaggctacgttggttaccagtgcttgtcccctctggaatccttccctgtagaaaccccggaaaaactcaacgccactttaggtatgacagtgaaagtgacttacagaaatttcacagaaaagatgaatgacgcatcctcccaggaataccagaacttcagtaccctcttcaagaatcggatggatgtcgttttgaagggcgacaatcttcctcagtatagaggggtgaacattcggagattgctcaacggtagcatcgtggtcaagaacgatgtcatcctggaggcagactacactttagagtatgaggaactgtttgaaaacctggcagagattgtaaaggccaagattatgaatgaaactagaacaactcttcttgatcctgattcctgcagaaaggccatactgtgctatagtgaagaggacactttcgtggattcatcggtgactccgggctttgacttccaggagcaatgcacccagaaggctgccgaaggatatacccagttctactatgtggatgtcttggatgggaagctggcctgtgtgaacaagtgcaccaaaggaacgaagtcgcaaatgaactgtaacctgggcacatgtcagctgcaacgcagtggcccccgctgcctgtgcccaaatacgaacacacactggtactggggagagacctgtgaattcaacatcgccaagagcctcgtgtatgggatcgtgggggctgtgatggcggtgctgctgctcgcattgatcatcctaatcatcttattcagcctatcccagagaaaacggcacagggaacagtatgatgtgcctcaagagtggcgaaaggaaggcacccctggcatcttccagaagacggccatctgggaagaccagaatctgagggagagcagattcggccttgagaacgcctacaacaacttccggcccaccctggagactgttgactctggcacagagctccacatccagaggccggagatggtagcatccactgtgtgagccaacgggggcctcccaccctcatctagctctgttcaggagagctgcaaacacagagcccaccacaagcctccggggcgggtcaagaggagaccgaagtcaggccctgaagccggtcctgctctgagctgacagacttggccagtcccctgcctgtgctcctgctggggaaggctgggggctgtaagcctctccatccgggagcttccagactcccagaagcctcggcacccctgtctcctcctgggtggctccccactctggaatttccctaccaataaaagcaaatctgaaagctca

SEQ ID NO: 18671 - DNA, 16321 bp, Homo sapiens
  source 1..16321: mol_type = unassigned DNA
atgctggtgatctggattctgacgctggctctccggctctgcgcgtccgttactacagtgacaccaggctcaacagtaaacaccagtattggaggtaatacaacttctgcatccacacccagttcaagcgacccttttaccacctttagtgactatggggtgtcagtcacatttatcacgggctcaactgcaacaaaacacttccttgacagctccacaaactcaggccacagtgaggaatcaacagtatcccacagcggcccaggtgcaactggaacaacactcttcccttcccactctgcaacctcagtttttgttggagaacctaaaacctcacccatcacttcagcctcaatggaaacaacagcgttacctggcagtaccacaacagcaggcctgagtgagaaatctaccaccttctacagtagccccagatcaccagacagaacactctcacctgcccgcacgacaagctcaggcgtcagtgaaaaatcaaccacctcccacagccgaccaggcccaacgcacacaatagcgttccctgacagtaccaccatgccaggcgtcagtcaggaatctacagcttcccacagcatccccggctccacagacacaacactgtcccctggcactaccacaccatcatcccttggtccagaatctactaccttccacagcagcccaggctacactaaaacaacacgcttacctgacaacaccacaacctcaggcctccttgaagcatctacgcccgtccacagcagcactggatcgccacacacaacactgtccccttccagctctacaacccatgagggagaacctaccaccttccagagctggccaagctcaaaggacacttcgcctgcaccttctggtaccacatcagcctttgttaaactatctacaacttatcacagcagcccgagctcaactccaacaacccacttttctgccagctccacaaccttgggccatagtgaggaatcgacaccagtccacagcagcccagttgcaactgcaacaacacccccacctgcccgctccgcgacctcaggccatgttgaagaatctacagcctaccacaggagcccgggctcaactcaaacaatgcacttccctgaaagctccacaacttcaggccatagtgaagaatcagcaactttccacggcagcacaacacacacaaaatcttcaactcctagcaccacagctgccctagcacatacaagctaccacagcagcctgggctcaactgaaacaacacacttccgtgatagctccacaatctcaggccgtagtgaggaatcaaaagcatcccacagcagcccagatgcaatggcaacaacagtcttacctgccggctctacaccctcagttcttgttggagactcgacgccctcacccatcagttcaggctcaatggaaaccacagcgttacccggcagtaccacaaaaccaggcctcagtgagaaatctaccactttctacagtagccccagatcaccagacacaacacacttacctgccagcatgacaagctcaggcgtcagtgaagaatccaccacctcccacagccgaccaggctcaacacacacaacagcattccctggcagtaccaccatgccaggcctcagtcaggaatctacagcttcccacagcagcccaggccccacagacacaacattgtcccctggcagtaccacagcatcatcccttggtccagaatatactaccttccacagccgcccaggctccactgaaacaacactcttacctgacaacaccacagcctcaggactccttgaagcatctatgcccgtccacagcagcaccagatcgccacacacaacactgtcccctgccggctctacaacccgtcagggagaatctaccacattccatagctggccaagctcaaaggacactaggcctgcacctcctactaccacatcagcctttgttgagccatctacaacctcccacggcagcccgagctcaattccaacaacccacatttctgcccgctccacaacctcaggcctcgttgaagaatctacgacctaccacagcagcccgggctcaactcaaacaatgcacttccctgaaagcgacacaacttcaggccgtggtgaagaatcaacaacttcccacagcagcacaacacacacaatatcttcagctcctagcaccacatctgcccttgttgaagaacctaccagctaccacagcagcccgggctcaactgcaacaacacacttccctgacagctccacaacctcaggccgtagtgaggaatcaacagcatcgcacagcagccaagacgcaacgggaacaatagtcctacctgcccgctccacaacctcagttcttcttggagaatctacgacctcacccatcagttcaggctcaatggaaacgacagcgttacccggcagtaccacaacgccaggcctcagtgagagatctaccactttccatagtagccccagatcaccagccacaacactctcacctgccagcacgacaagctcaggcgtcagtgaagaatccaccacctcccgcagccgaccaggctcaacgcacacaacagcattccctgacagcaccaccacgccaggcctcagtcggcattctacaacttcccacagcagcccaggctcaacggatacaacactgttacctgccagcaccaccacctcaggccccagtcaggaatcaacaacttcccacagcagctcaggttcaactgacacagcactgtcccctggcagtaccacagccttatcctttggtcaagaatctacaaccttccacagcaacccaggctccactcacacaacactcttccctgacagcaccacaagctcaggcatcgttgaagcatctacacgcgtccacagcagcactggctcaccacgcacaacactgtcccctgccagctccacaagccctggacttcagggagaatctactgccttccagacccacccagcctcaactcacacaacgccttcacctcctagcaccgcaacagcccctgttgaagaatctacaacctaccaccgcagcccaggctcgactccaacaacacacttccctgccagctccacaacttcgggccacagtgagaaatcaacaatattccacagcagcccagatgcaagtggaacaacaccctcatctgcccactccacaacctcaggtcgtggagaatctacaacctcacgcatcagtccaggctcaactgaaataacaacgttacctggcagtaccacaacaccaggcctcagtgaggcatctaccaccttctacagcagccccagatcaccaaccacaacactctcacctgccagcatgacaagcctgggcgtcggtgaagaatccaccacctcccgtagccaaccaggttctactcactcaacagtgtcacctgccagcaccaccacgccaggcctcagtgaggaatctaccaccgtctacagcagcagccgaggctcaactgaaaccacagtgttccctcacagcaccacaacctcagttcatggtgaagagcctacaaccttccacagccggccagcctcaactcacacaacactgttcactgaggacagcaccacctcgggcctcactgaagaatctacagccttccccggcagcccagcctccacccaaacagggttacctgccacactcacaaccgcagacctcggtgaggaatcaactacctttcccagcagctcaggctcaactggaacaaaactctcacctgcccgctccaccacctctggcctcgttggagaatccacaccctcacgcctcagtccaagctcaaccgaaacaacaactttacctggcagtcccacaacaccaagcctcagtgagaaatcaaccaccttctacactagccccagatcaccagatgcaacactctcacctgcaaccacaacaagctcaggcgtcagcgaagaatccagcacatcccacagtcaaccaggctcaacgcacacaacagcattccctgacagcaccaccacctcagacctcagtcaggaacctacaacttcccacagcagccaaggctcaacagaggcaacactgtcccctggcagtaccacagcctcatcccttggtcaacaatctacaaccttccacagcagcccaggcgacactgaaaccacactcttacctgacgacaccataacctcaggcctcgtggaggcatctacacccacccacagcagcactggctcgctacacacaacactgacccctgccagctccacaagcgctggccttcaggaagaatctaccactttccagagctggccaagctcaagtgacacaacaccttcacctcccggcaccacagcagcccctgttgaagtatccacaacctaccacagccgcccgagctcaactccaacaacacacttttctgccagttccacaaccttgggccgtagtgaggaatcaacaacagtccacagcagcccaggtgcaactggaacagcactcttccctacccgctctgcaacctcagttcttgttggagaacctacaacgtcacccatcagttcaggctcaacggaaacaacagcgttacctggcagtaccacaacagcaggcctgagtgagaaatctaccaccttctacagtagccccagatcaccggacacaacactctcacctgccagcacgacaagctcaggcgtcagtgaagaatccaccacctcccacagccgaccaggctcaacgcacacaacagcattccctggcagtaccaccatgccaggcgtcagtcaggaatctacagcttcccacagcagcccaggctccacagacacaacattgtcccctggcagtaccacagcatcatcccttggtccagaatctactactttccacagcagcccaggctccactgaaacaacactcttacctgacaacaccacagcctcaggcctccttgaagcatctacgcccgtccacagcagcactggatcgccacacacaacactgtcccctgccggctctacaacacgtcagggagaatctaccaccttccagagctggccaagctcaaaggacactatgcctgcacctcctactaccacatcagcctttgttgagctatctacaacctcccacggcagcccgagctcaactccaacaacccacttttctgccagctccacaaccttgggccgtagtgaggaatcgacaacagtccacagcagcccagttgcaactgcaacaacaccctcgcctgcccgctccacaacctcaggcctcgttgaagaatctacggcgtaccacagcagcccgggctcaactcaaacaatgcacttccctgaaagctccacagcttcaggtcgtagtgaagaatcaagaacttcccacagcagcacaacacacacaatatcttcacctcctagcaccacatctgcccttgttgaagaacctaccagctaccacagcagcccgggctcaactgcaacaacacacttccctgacagctccacaacctcaggccgtagtgaggaatcaacagcatcccacagcagccaagacgcaacgggaacaatagtcctacctgcccgctccacaacctcagttcttcttggagaatctacgacctcacccatcagttcaggctcaatggaaacgacagcgttacccggcagtaccacaacgccaggcctcagtgagaaatctaccactttccacagtagccccagatcaccagccacaacactctcacctgccagcacgacaagctcaggcgtcagtgaagaatccaccacctcccacagccgaccaggctcaacgcacacaacagcattccctgacagcaccaccacgccaggcctcagtcggcattctacaacttcccacagcagcccaggctcaacggatacaacactgttacctgccagcaccaccacctcaggccccagtcaggaatcaacaacttcccacagcagcccaggttcaactgacacagcactgtcccctggcagtaccacagccttatcctttggtcaagaatctacaaccttccacagcagcccaggctccactcacacaacgctcttccctgacagcaccacaagctcaggcatcgttgaagcatctacacgcgtccacagcagcactggctcaccacgcacaacactgtcccctgccagctccacaagccctggacttcagggagaatctaccgccttccagacccacccagcctcaactcacacgacgccttcacctcctagcaccgcaacagcccctgttgaagaatctacaacctaccaccgcagcccaggctcgactccaacaacacacttccctgccagctccacaacttcgggccacagtgagaaatcaacaatattccacagcagcccagatgcaagtggaacaacaccctcatctgcccactccacaacctcaggtcgtggagaatctacaacctcacgcatcagtccaggctcaactgaaataacaacgttacctggcagtaccacaacaccaggcctcagtgaggcatctaccaccttctacagcagccccagatcaccaaccacaacactctcacctgccagtatgacaagcctaggcgtcggtgaagaatccaccacctcccgtagccaaccaggttctactcactcaacagtgtcacctgccagcaccaccacgccaggcctcagtgaggaatctaccaccgtctacagcagcagcccaggctcaactgaaaccacagtgttccctcgcacccccacaacctcagttcgtggtgaagagcctacaaccttccacagccggccagcctcaactcacacaacactgttcactgaggacagcaccacctcgggcctcactgaagaatctacagccttccccggcagcccagcctccacccaaacagggttacctgccacactcacaaccgcagacctcggtgaggaatcaactacctttcccagcagctcaggctcaactggaacaacactctcacctgcccgctccaccacctctggcctcgttggagaatccacaccctcacgcctcagtccaagctcaaccgaaacaacaactttacccggcagtcccacaacaccaagcctcagtgagaaatcaaccaccttctacactagccccagatcaccagatgcaacactctcacctgcaaccacaacaagctcaggcgtcagtgaagaatccagcacatcccacagtcaaccaggctcaacgcacacaacagcattccctgacagcaccaccacgccaggcctcagtcggcattctacaacttcccacagcagcccaggctcaacggatacaacactgttacctgccagcaccaccacctcaggccccagtcaggaatcaacaacttcccacagcagcccaggttcaactgacacagcactgtcccctggcagtaccacagccttatcctttggtcaagaatctacaaccttccacagcagcccaggctccactcacacaacactcttccctgacagcaccacaagctcaggcatcgttgaagcatctacacgcgtccacagcagcactggctcaccacgcacaacactgtcccctgccagctccacaagccctggacttcagggagaatctaccaccttccagacccacccagcctcaactcacacgacgccttcacctcctagcaccgcaacagcccctgttgaagaatctacaacctaccaccgcagcccaggctcgactccaacaacacacttccctgccagctccacaacttcgggccacagtgagaaatcaacaatattccacagcagcccagatgcaagtggaacaacaccctcatctgcccactccacaacctcaggtcgtggagaatctacaacctcacgcatcagtccaggctcaactgaaataacaacgttacctggcagtaccacaacaccaggcctcagtgaggcatctaccaccttctacagcagccccagatcaccaaccacaacactctcacctgccagtatgacaagcctaggcgtcggtgaagaatccaccacctcccgtagccaaccaggttctactcactcaacagtgtcacctgccagcaccaccacgccaggcctcagtgaggaatctaccaccgtctacagcagcagcccaggctcaactgaaaccacagtgttccctcgcagcaccacaacctcagttcgtggtgaagagcctacaaccttccacagccggccagcctcaactcacacaacactgttcactgaggacagcaccacctcgggcctcactgaagaatctacagccttccccggcagcccagcctccacccaaacagggttacctgccacactcacaaccgcagacctcggtgaggaatcaactacctttcccagcagctcaggctcaactggaacaacactctcacctgcccgctccaccacctctggcctcgttggagaatccacaccctcacgcctcagtccaagctcaaccgaaacaacaactttacccggcagtcccacaacaccaagcctcagtgagaaatcaaccaccttctacactagccccagatcaccagatgcaacactctcacctgcaaccacaacaagctcaggcgtcagtgaagaatccagcacatcccacagtcaaccaggctcaacgcacacaacagcgttccctgacagcaccaccacctcaggcctcagtcaggaacctacagcttcccacagcagccaaggctcaacagaggcaacactgtcccctggcagtaccacagcctcatcccttggtcaacaatctacaaccttccacagcagcccaggcgacactgaaaccacactcttacctgacgacaccataacctcaggcctcgtggaggcatctacacccacccacagcagcactggctcgctacacacaacactgacccctgccagctccacaagcgctggccttcaggaagaatctaccactttccagagctggccaagctcaagtgacacaacaccttcacctcccggcaccacagcagcccctgttgaagtatccacaacctaccacagccgcccgagctcaactccaacaacacacttttctgccagttccacaaccttgggccgtagtgaggaatcaacaacagtccacagcagcccaggtgcaactggaacagcactcttccctacccgctctgcaacctcagttcttgttggagaacctacaacgtcacccatcagttcaggctcaacggaaacaacagcgttacctggcagtaccacaacagcaggcctgagtgagaaatctaccaccttctacagtagccccagatcaccggacacaacactctcacctgccagcacgacaagctcaggcgtcagtgaagaatccaccacctcccacagccgaccaggctcaacgcacacaacagcattccctggcagtaccaccatgccaggcgtcagtcaggaatctacagcttcccacagcagcccaggctccacagacacaacactgtcccctggcagtaccacagcatcatcccttggtccagaatctactaccttccacagcggcccaggctccactgaaacaacactcttacctgacaacaccacagcctcaggcctccttgaagcatctacgcccgtccacagcagcactggatcgccacacacaacactgtcccctgccggctctacaacccgtcagggagaatctaccaccttccagagctggcctaactcgaaggacactacccctgcacctcctactaccacatcagcctttgttgagctatctacaacctcccacggcagcccgagctcaactccaacaacccacttttctgccagctccacaaccttgggccgtagtgaggaatcgacaacagtccacagcagcccagttgcaactgcaacaacaccctcgcctgcccgctccacaacctcaggcctcgttgaagaatctacgacctaccacagcagcccgggctcaactcaaacaatgcacttccctgaaagcgacacaacttcaggccgtggtgaagaatcaacaacttcccacagcagcacaacacacacaatatcttcagctcctagcaccacatctgcccttgttgaagaacctaccagctaccacagcagcccgggctcaactgcaacaacacacttccctgacagctccacaacctcaggccgtagtgaggaatcaacagcatcccacagcagccaagacgcaacgggaacaatagtcctacctgcccgctccacaacctcagttcttcttggagaatctacgacctcacccatcagttcaggctcaatggaaacgacagcgttacccggcagtaccacaacgccaggcctcagtgagaaatctaccactttccacagtagccccagatcaccagccacaacactctcacctgccagcacgacaagctcaggcgtcagtgaagaatccaccacctcccacagccgaccaggctcaacgcacacaacagcattccctgacagcaccaccacgccaggcctcagtcggcattctacaacttcccacagcagcccaggctcaacggatacaacactgttacctgccagcaccaccacctcaggctccagtcaggaatcaacaacttcccacagcagctcaggttcaactgacacagcactgtcccctggcagtaccacagccttatcctttggtcaagaatctacaaccttccacagcagcccaggctccactcacacaacactcttccctgacagcaccacaagctcaggcatcgttgaagcatctacacgcgtccacagcagcactggctcaccacgcacaacactgtcccctgccagctccacaagccctggacttcagggagaatctaccgccttccagacccacccagcctcaactcacacgacgccttcacctcctagcaccgcaacagcccctgttgaagaatctacaacctaccaccgcagcccaggctcgactccaacaacacacttccctgccagctccacaacttcgggccacagtgagaaatcaacaatattccacagcagcccagatgcaagtggaacaacaccctcatctgcccactccacaacctcaggtcgtggagaatctacaacctcacgcatcagtccaggctcaactgaaataacaacgttacctggcagtaccacaacaccaggcctcagtgaggcatctaccaccttctacagcagccccagatcaccaaccacaacactctcacctgccagtatgacaagcctaggcgtcggtgaagaatccaccacctcccgtagccaaccaggttctactcactcaacagtgtcacctgccagcaccaccacgccaggcctcagtgaggaatctaccaccgtctacagcagcagcccaggctcaactgaaaccacagtgttccctcgcagcaccacaacctcagttcgtcgtgaagagcctacaaccttccacagccggccagcctcaactcacacaacactgttcactgaggacagcaccacctcgggcctcactgaagaatctacagccttccccggcagcccagcctccacccaaacagggttacctgccacactcacaaccgcagacctcggtgaggaatcaactacctttcccagcagctcaggctcaactggaacaaaactctcacctgcccgctccaccacctctggcctcgttggagaatccacaccctcacgcctcagtccaagctcaaccgaaacaacaactttacccggcagtcccacaacaccaagcctcagtgagaaatcaaccaccttctacactagccccagatcaccagatgcaacactctcacctgcaaccacaacaagctcaggcgtcagcgaagaatccagcacatcccacagtcaaccaggctcaacgcacacaacagcgttccctgacagcaccaccacctcaggcctcagtcaggaacctacaacttcccacagcagccaaggctcaacagaggcaacactgtcccctggcagtaccacagcctcatcccttggtcaacaatctacaaccttccacagcagcccaggcgacactgaaaccacactcttacctgacgacaccataacctcaggcctcgtggaggcatctacacccacccacagcagcactggctcgctacacacaacactgacccctgccagctccacaagcactggccttcaggaagaatctaccactttccagagctggccaagctcaagtgacacaacaccttcacctcccagcaccacagcagtccctgttgaagtatccacaacctaccacagccgcccgagctcaactccaacaacacacttttctgccagttccacaaccttgggccgtagtgaggaatcaacaacagtccacagcagcccaggtgcaactggaacagcactcttccctacccgctctgcaacctcagttcttgttggagaacctacaacgtcacccatcagttcaggctcaacggaaacaacagcgttacctggcagtaccacaacagcaggcctgagtgagaaatctaccaccttctacagtagccccagatcaccggacacaacactttcacctgccagcacgacaagctcaggcgtcagtgaagaatccaccacctcccacagccgaccaggctcaatgcacacaacagcattccctagcagtaccaccatgccaggcgtcagtcaggaatctacagcttcccacagcagcccaggctccacagacacaacactgtcccctggcagtaccacagcatcatcccttggtccagaatctactaccttccacagcagcccaggctccactgaaacaacactcttacctgacaacaccacagcctcaggcctccttgaagcatctacacccgtccacagcagcactggatcgccacacacaacactgtcccctgccggctctacaacccgtcagggagaatctaccaccttccagagctggccaaactcgaaggacactacccctgcacctcctactaccacatcagcctttgttgagctatctacaacctcccacggcagcccgagctcaactccaacaacccacttttctgccagctccacaacattgggccgtagtgaggaatcgacaacagtccacagcagcccagttgcaactgcaacaacaccctcgcctgcccgctccacaacctcaggcctcgttgaagaatctacgacctaccacagcagcccgggctcaactcaaacaatgcacttccctgaaagcaacacaacttcaggccgtggtgaagaatcaacaacttcccacagcagcacaacacacacaatatcttcagctcctagcaccacatctgcccttgttgaagaacctaccagctaccacagcagcccgggctcaactgcaacaacacacttccctgacagctccacaacctcaggccgtagtgaggaatcaacagcatcccacagcagccaagacgcaacgggaacaatagtcctacctgcccgctccacaacctcagttcttcttggagaatctacgacctcacccatcagttcaggctcaatggaaacgacagcgttacccggcagtaccacaacgccaggcctcagtgagaaatctaccactttccacagtagcccgagctcaactccaacaacccacttttctgccagctccacaaccttgggccgtagtgaggaatcgacaacagtccacagcagcccagttgcaactgcaacaacaccctcgcctgcccgctccacaacctcaggcctcgttgaagaatctacggcgtaccacagcagcccgggctcaactcaaacaatgcacttccctgaaagctccacagcttcaggtcgtagtgaagaatcaagaacttcccacagcagcacaacacacacaatatcttcacctcctagcaccacatctgcccttgttgaagaacctaccagctaccacagcagcccgggctcaattgcaacaacacactttcctgagagctccacaacctccggccgtagtgaggaatcaacagcatcccacagcagcccagatacaaatggaatcacacccttacctgcccattttactacctcaggccgcattgcagaatctaccaccttctatatctctccaggctcaatggaaacaacattagccagcactgccacaacaccaggcctcagtgcaaaatctaccatcctttacagtagctccagatcaccagaccaaacactctcacctgccagcatgacaagctccagcatcagtggagaacccaccagcttgtatagccaagcagagtcaacacacacaacagcgttccctgccagcaccaccacctcaggcctcagtcaggaatcaacaactttccacagtaagccaggctcaactgagacaacactgtcccctggcagcatcacaacttcatcttttgctcaagaatttaccacccctcatagccaaccaggctcagctctgtcaacagtgtcacctgccagcaccacagtgccaggccttagtgaggaatctaccaccttctacagcagcccaggctcaactgaaaccacagcgttttctcacagcaacacaatgtccattcatagtcaacaatctacacccttccctgacagcccaggcttcactcacacagtgttacctgccaccctcacaaccacagacattggtcaggaatcaacagccttccacagcagctcagacgcaactggaacaacacccttacctgcccgctccacagcctcagaccttgttggagaacctacaactttctacatcagcccatcccctacttacacaacactctttcctgcgagttccagcacatcaggcctcactgaggaatctaccaccttccacaccagtccaagcttcacttctacaattgtgtctactgaaagcctggaaaccttagcaccagggttgtgccaggaaggacaaatttggaatggaaaacaatgcgtctgtccccaaggctacgttggttaccagtgcttgtcccctctggaatccttccctgtagaaaccccggaaaaactcaacgccactttaggtatgacagtgaaagtgacttacagaaatttcacagaaaagatgaatgacgcatcctcccaggaataccagaacttcagtaccctcttcaagaatcggatggatgtcgttttgaagggcgacaatcttcctcagtatagaggggtgaacattcggagattgctcaacggtagcatcgtggtcaagaacgatgtcatcctggaggcagactacactttagagtatgaggaactgtttgaaaacctggcagagattgtaaaggccaagattatgaatgaaactagaacaactcttcttgatcctgattcctgcagaaaggccatactgtgctatagtgaagaggacactttcgtggattcatcggtgactccgggctttgacttccaggagcaatgcacccagaaggctgccgaaggatatacccagttctactatgtggatgtcttggatgggaagctggcctgtgtgaacaagtgcaccaaaggaacgaagtcgcaaatgaactgtaacctgggcacatgtcagctgcaacgcagtggcccccgctgcctgtgcccaaatacgaacacacactggtactggggagagacctgtgaattcaacatcgccaagagcctcgtgtatgggatcgtgggggctgtgatggcggtgctgctgctcgcattgatcatcctaatcatcttattcagcctatcccagagaaaacggcacagggaacagtatgatgtgcctcaagagtggcgaaaggaaggcacccctggcatcttccagaagacggccatctgggaagaccagaatctgagggagagcagattcggccttgagaacgcctacaacaacttccggcccaccctggagactgttgactctggcacagagctccacatccagaggccggagatggtagcatccactgtgtgagccaacgggggcctcccaccctcatctagctctgttcaggagagctgcaaacacagagcccaccacaagcctccggggcgggtcaagaggagaccgaagtcaggccctgaagccggtcctgctctgagctgacagacttggccagtcccctgcctgtgctcctgctggggaaggctgggggctgtaagcctctccatccgggagcttccagactcccagaagcctcggcacccctgtctcctcctgggtggctccccactctggaatttccctaccaataaaagcaaatctgaaagctcagaatgagaagtga

SEQ ID NO: 18672 - DNA, 2876 bp, Homo sapiens
  source 1..2876: mol_type = unassigned DNA
atcatttcctcctcagattaccaagcaagaacagctaaaatgaaagccatcattcatcttactcttcttgctctcctttctgtaaacacagccaccaaccaaggcaactcagctgatgctgtaacaaccacagaaactgcgactagtggtcctacagtagctgcagctgataccactgaaactaatttccctgaaactgctagcaccacagcaaatacacctttcccaacagctacttcacctgctccccccataattagtacacatagttcctccacaattcctacacctgctccccccataattagtacacatagttcctccacaattcctatacctactgctgcagacagtgagtcaaccacaaatgtaaattcattagctacctctgacataatcaccgcttcatctccaaatgatggattaatcacaatggttccttctgaaacacaaagtaacaatgaaatgtcccccaccacagaagacaatcaatcatcagggcctcccactggcaccgctttattggagaccagcaccctaaacagcacaggtcccagcaatccttgccaagatgatccctgtgcagataattcgttatgtgttaagctgcataatacaagtttttgcctgtgtttagaagggtattactacaactcttctacatgtaagaaaggaaaggtattccctgggaagatttcagtgacagtatcagaaacatttgacccagaagagaaacattccatggcctatcaagacttgcatagtgaaattactagcttgtttaaagatgtatttggcacatctgtttatggacagactgtaattcttactgtaagcacatctctgtcaccaagatctgaaatgcgtgctgatgacaagtttgttaatgtaacaatagtaacaattttggcagaaaccacaagtgacaatgagaagactgtgactgagaaaattaataaagcaattagaagtagctcaagcaactttctaaactatgatttgacccttcggtgtgattattatggctgtaaccagactgcggatgactgcctcaatggtttagcatgcgattgcaaatctgacctgcaaaggcctaacccacagagccctttctgcgttgcttccagtctcaagtgtcctgatgcctgcaacgcacagcacaagcaatgcttaataaagaagagtggtggggcccctgagtgtgcgtgcgtgcccggctaccaggaagatgctaatgggaactgccaaaagtgtgcatttggctacagtggactcgactgtaaggacaaatttcagctgatcctcactattgtgggcaccatcgctggcattgtcattctcagcatgataattgcattgattgtcacagcaagatcaaataacaaaacgaagcatattgaagaagagaacttgattgacgaagactttcaaaatctaaaactgcggtcgacaggcttcaccaatcttggagcagaagggagcgtctttcctaaggtcaggataacggcctccagagacagccagatgcaaaatccctattcaagacacagcagcatgccccgccctgactattagaatcataagaatgtggaacccgccatggcccccaaccaatgtacaagctattatttagagtgtttagaaagactgatggagaagtgagcaccagtaaagatctggcctccggggtttttcttccatctgacatctgccagcctctctgaatggaagttgtgaatgtttgcaacgaatccagctcacttgctaaataagaatctatgacattaaatgtagtagatgctattagcgcttgtcagagaggtggttttcttcaatcagtacaaagtactgagacaatggttagggttgttttcttaattcttttcctggtagggcaacaagaaccatttccaatctagaggaaagctccccagcattgcttgctcctgggcaaacattgctcttgagttaagtgacctaattcccctgggagacatacgcatcaactgtggaggtccgaggggatgagaagggatacccaccatctttcaagggtcacaagctcactctctgacaagtcagaatagggacactgcttctatccctccaatggagagattctggcaacctttgaacagcccagagcttgcaacctagcctcacccaagaagactggaaagagacatatctctcagctttttcaggaggcgtgcctgggaatccaggaactttttgatgctaattagaaggcctggactaaaaatgtccactatggggtgcactctacagtttttgaaatgctaggaggcagaaggggcagagagtaaaaaacatgacctggtagaaggaagagaggcaaaggaaactgggtggggaggatcaattagagaggaggcacctgggatccaccttcttccttaggtcccctcctccatcagcaaaggagcacttctctaatcatgccctcccgaagactggctgggagaaggtttaaaaacaaaaaatccaggagtaagagccttaggtcagtttgaaattggagacaaactgtctggcaaagggtgcgagagggagcttgtgctcaggagtccagccgtccagcctcggggtgtaggtttctgaggtgtgccattggggcctcagccttctctggtgacagaggctcagctgtggccaccaacacacaaccacacacacacaaccacacacacaaatgggggcaaccacatccagtacaagcttttacaaatgttattagtgtccttttttatttctaatgccttgtcctcttaaaagttattttatttgttattattatttgttcttgactgttaattgtgaatggtaatgcaataaagtgcctttgttagatggtg

SEQ ID NO: 18673 - DNA, 14241 bp, Homo sapiens
  source 1..14241: mol_type = unassigned DNA
tctgaggctcatttcgccagctcctctgggggtgacaggcaagtgagacgtgctcagagctccgatgccaaggccagggaccatggcgctgtgtctgctgaccttggtcctctcgctcttgcccccacaagctgctgcagaacaggacctcagtgtgaacagggctgtgtgggatggaggagggtgcatctcccaaggggacgtcttgaaccgtcagtgccagcagctgtctcagcacgttaggacaggttctgcggcaaacaccgccacaggtacaacatctacaaatgtcgtggagccaagaatgtatttgagttgcagcaccaaccctgagatgacctcgattgagtccagtgtgacttcagacactcctggtgtctccagtaccaggatgacaccaacagaatccagaacaacttcagaatctaccagtgacagcaccacacttttccccagttctactgaagacacttcatctcctacaactcctgaaggcaccgacgtgcccatgtcaacaccaagtgaagaaagcatttcatcaacaatggcttttgtcagcactgcacctcttcccagttttgaggcctacacatctttaacatataaggttgatatgagcacacctctgaccacttctactcaggcaagttcatctcctactactcctgaaagcaccaccatacccaaatcaactaacagtgaaggaagcactccattaacaagtatgcctgccagcaccatgaaggtggccagttcagaggctatcacccttttgacaactcctgttgaaatcagcacacctgtgaccatttctgctcaagccagttcatctcctacaactgctgaaggtcccagcctgtcaaactcagctcctagtggaggaagcactccattaacaagaatgcctctcagcgtgatgctggtggtcagttctgaggctagcaccctttcaacaactcctgctgccaccaacattcctgtgatcacttctactgaagccagttcatctcctacaacggctgaaggcaccagcataccaacctcaacttatactgaaggaagcactccattaacaagtacgcctgccagcaccatgccggttgccacttctgaaatgagcacactttcaataactcctgttgacaccagcacacttgtgaccacttctactgaacccagttcacttcctacaactgctgaagctaccagcatgctaacctcaactcttagtgaaggaagcactccattaacaaatatgcctgtcagcaccatattggtggccagttctgaggctagcaccacttcaacaattcctgttgactccaaaacttttgtgaccactgctagtgaagccagctcatctcccacaactgctgaagataccagcattgcaacctcaactcctagtgaaggaagcactccattaacaagtatgcctgtcagcaccactccagtggccagttctgaggctagcaacctttcaacaactcctgttgactccaaaactcaggtgaccacttctactgaagccagttcatctcctccaactgctgaagttaacagcatgccaacctcaactcctagtgaaggaagcactccattaacaagtatgtctgtcagcaccatgccggtggccagttctgaggctagcaccctttcaacaactcctgttgacaccagcacacctgtgaccacttctagtgaagccagttcatcttctacaactcctgaaggtaccagcataccaacctcaactcctagtgaaggaagcactccattaacaaacatgcctgtcagcaccaggctggtggtcagttctgaggctagcaccacttcaacaactcctgctgactccaacacttttgtgaccacttctagtgaagctagttcatcttctacaactgctgaaggtaccagcatgccaacctcaacttacagtgaaagaggcactacaataacaagtatgtctgtcagcaccacactggtggccagttctgaggctagcaccctttcaacaactcctgttgactccaacactcctgtgaccacttcaactgaagccacttcatcttctacaactgcggaaggtaccagcatgccaacctcaacttatactgaaggaagcactccattaacaagtatgcctgtcaacaccacactggtggccagttctgaggctagcaccctttcaacaactcctgttgacaccagcacacctgtgaccacttcaactgaagccagttcctctcctacaactgctgatggtgccagtatgccaacctcaactcctagtgaaggaagcactccattaacaagtatgcctgtcagcaaaacgctgttgaccagttctgaggctagcaccctttcaacaactcctcttgacacaagcacacatatcaccacttctactgaagccagttgctctcctacaaccactgaaggtaccagcatgccaatctcaactcctagtgaaggaagtcctttattaacaagtatacctgtcagcatcacaccggtgaccagtcctgaggctagcaccctttcaacaactcctgttgactccaacagtcctgtgaccacttctactgaagtcagttcatctcctacacctgctgaaggtaccagcatgccaacctcaacttatagtgaaggaagaactcctttaacaagtatgcctgtcagcaccacactggtggccacttctgcaatcagcaccctttcaacaactcctgttgacaccagcacacctgtgaccaattctactgaagcccgttcgtctcctacaacttctgaaggtaccagcatgccaacctcaactcctggggaaggaagcactccattaacaagtatgcctgacagcaccacgccggtagtcagttctgaggctagaacactttcagcaactcctgttgacaccagcacacctgtgaccacttctactgaagccacttcatctcctacaactgctgaaggtaccagcataccaacctcgactcctagtgaaggaacgactccattaacaagcacacctgtcagccacacgctggtggccaattctgaggctagcaccctttcaacaactcctgttgactccaacactcctttgaccacttctactgaagccagttcacctcctcccactgctgaaggtaccagcatgccaacctcaactcctagtgaaggaagcactccattaacacgtatgcctgtcagcaccacaatggtggccagttctgaaacgagcacactttcaacaactcctgctgacaccagcacacctgtgaccacttattctcaagccagttcatcttctacaactgctgacggtaccagcatgccaacctcaacttatagtgaaggaagcactccactaacaagtgtgcctgtcagcaccaggctggtggtcagttctgaggctagcaccctttccacaactcctgtcgacaccagcatacctgtcaccacttctactgaagccagttcatctcctacaactgctgaaggtaccagcataccaacctcacctcccagtgaaggaaccactccgttagcaagtatgcctgtcagcaccacgctggtggtcagttctgaggctaacaccctttcaacaactcctgtggactccaaaactcaggtggccacttctactgaagccagttcacctcctccaactgctgaagttaccagcatgccaacctcaactcctggagaaagaagcactccattaacaagtatgcctgtcagacacacgccagtggccagttctgaggctagcaccctttcaacatctcccgttgacaccagcacacctgtgaccacttctgctgaaaccagttcctctcctacaaccgctgaaggtaccagcttgccaacctcaactactagtgaaggaagtactctattaacaagtatacctgtcagcaccacgctggtgaccagtcctgaggctagcacccttttaacaactcctgttgacactaaaggtcctgtggtcacttctaatgaagtcagttcatctcctacacctgctgaaggtaccagcatgccaacctcaacttatagtgaaggaagaactcctttaacaagtatacctgtcaacaccacactggtggccagttctgcaatcagcatcctttcaacaactcctgttgacaacagcacacctgtgaccacttctactgaagcctgttcatctcctacaacttctgaaggtaccagcatgccaaactcaaatcctagtgaaggaaccactccgttaacaagtatacctgtcagcaccacgccggtagtcagttctgaggctagcaccctttcagcaactcctgttgacaccagcacccctgggaccacttctgctgaagccacttcatctcctacaactgctgaaggtatcagcataccaacctcaactcctagtgaaggaaagactccattaaaaagtatacctgtcagcaacacgccggtggccaattctgaggctagcaccctttcaacaactcctgttgactctaacagtcctgtggtcacttctacagcagtcagttcatctcctacacctgctgaaggtaccagcatagcaatctcaacgcctagtgaaggaagcactgcattaacaagtatacctgtcagcaccacaacagtggccagttctgaaatcaacagcctttcaacaactcctgctgtcaccagcacacctgtgaccacttattctcaagccagttcatctcctacaactgctgacggtaccagcatgcaaacctcaacttatagtgaaggaagcactccactaacaagtttgcctgtcagcaccatgctggtggtcagttctgaggctaacaccctttcaacaacccctattgactccaaaactcaggtgaccgcttctactgaagccagttcatctacaaccgctgaaggtagcagcatgacaatctcaactcctagtgaaggaagtcctctattaacaagtatacctgtcagcaccacgccggtggccagtcctgaggctagcaccctttcaacaactcctgttgactccaacagtcctgtgatcacttctactgaagtcagttcatctcctacacctgctgaaggtaccagcatgccaacctcaacttatactgaaggaagaactcctttaacaagtataactgtcagaacaacaccggtggccagctctgcaatcagcaccctttcaacaactcccgttgacaacagcacacctgtgaccacttctactgaagcccgttcatctcctacaacttctgaaggtaccagcatgccaaactcaactcctagtgaaggaaccactccattaacaagtatacctgtcagcaccacgccggtactcagttctgaggctagcaccctttcagcaactcctattgacaccagcacccctgtgaccacttctactgaagccacttcgtctcctacaactgctgaaggtaccagcataccaacctcgactcttagtgaaggaatgactccattaacaagcacacctgtcagccacacgctggtggccaattctgaggctagcaccctttcaacaactcctgttgactctaacagtcctgtggtcacttctacagcagtcagttcatctcctacacctgctgaaggtaccagcatagcaacctcaacgcctagtgaaggaagcactgcattaacaagtatacctgtcagcaccacaacagtggccagttctgaaaccaacaccctttcaacaactcccgctgtcaccagcacacctgtgaccacttatgctcaagtcagttcatctcctacaactgctgacggtagcagcatgccaacctcaactcctagggaaggaaggcctccattaacaagtatacctgtcagcaccacaacagtggccagttctgaaatcaacaccctttcaacaactcttgctgacaccaggacacctgtgaccacttattctcaagccagttcatctcctacaactgctgatggtaccagcatgccaaccccagcttatagtgaaggaagcactccactaacaagtatgcctctcagcaccacgctggtggtcagttctgaggctagcactctttccacaactcctgttgacaccagcactcctgccaccacttctactgaaggcagttcatctcctacaactgcaggaggtaccagcatacaaacctcaactcctagtgaacggaccactccattagcaggtatgcctgtcagcactacgcttgtggtcagttctgagggtaacaccctttcaacaactcctgttgactccaaaactcaggtgaccaattctactgaagccagttcatctgcaaccgctgaaggtagcagcatgacaatctcagctcctagtgaaggaagtcctctactaacaagtatacctctcagcaccacgccggtggccagtcctgaggctagcaccctttcaacaactcctgttgactccaacagtcctgtgatcacttctactgaagtcagttcatctcctatacctactgaaggtaccagcatgcaaacctcaacttatagtgacagaagaactcctttaacaagtatgcctgtcagcaccacagtggtggccagttctgcaatcagcaccctttcaacaactcctgttgacaccagcacacctgtgaccaattctactgaagcccgttcatctcctacaacttctgaaggtaccagcatgccaacctcaactcctagtgaaggaagcactccattcacaagtatgcctgtcagcaccatgccggtagttacttctgaggctagcaccctttcagcaactcctgttgacaccagcacacctgtgaccacttctactgaagccacttcatctcctacaactgctgaaggtaccagcataccaacttcaactcttagtgaaggaacgactccattaacaagtatacctgtcagccacacgctggtggccaattctgaggttagcaccctttcaacaactcctgttgactccaacactcctttcactacttctactgaagccagttcacctcctcccactgctgaaggtaccagcatgccaacctcaacttctagtgaaggaaacactccattaacacgtatgcctgtcagcaccacaatggtggccagttttgaaacaagcacactttctacaactcctgctgacaccagcacacctgtgactacttattctcaagccggttcatctcctacaactgctgacgatactagcatgccaacctcaacttatagtgaaggaagcactccactaacaagtgtgcctgtcagcaccatgccggtggtcagttctgaggctagcacccattccacaactcctgttgacaccagcacacctgtcaccacttctactgaagccagttcatctcctacaactgctgaaggtaccagcataccaacctcacctcctagtgaaggaaccactccgttagcaagtatgcctgtcagcaccacgccggtggtcagttctgaggctggcaccctttccacaactcctgttgacaccagcacacctatgaccacttctactgaagccagttcatctcctacaactgctgaagatatcgtcgtgccaatctcaactgctagtgaaggaagtactctattaacaagtatacctgtcagcaccacgccagtggccagtcctgaggctagcaccctttcaacaactcctgttgactccaacagtcctgtggtcacttctactgaaatcagttcatctgctacatccgctgaaggtaccagcatgcctacctcaacttatagtgaaggaagcactccattaagaagtatgcctgtcagcaccaagccgttggccagttctgaggctagcactctttcaacaactcctgttgacaccagcatacctgtcaccacttctactgaaaccagttcatctcctacaactgcaaaagataccagcatgccaatctcaactcctagtgaagtaagtacttcattaacaagtatacttgtcagcaccatgccagtggccagttctgaggctagcaccctttcaacaactcctgttgacaccaggacacttgtgaccacttccactggaaccagttcatctcctacaactgctgaaggtagcagcatgccaacctcaactcctggtgaaagaagcactccattaacaaatatacttgtcagcaccacgctgttggccaattctgaggctagcaccctttcaacaactcctgttgacaccagcacacctgtcaccacttctgctgaagccagttcttctcctacaactgctgaaggtaccagcatgcgaatctcaactcctagtgatggaagtactccattaacaagtatacttgtcagcaccctgccagtggccagttctgaggctagcaccgtttcaacaactgctgttgacaccagcatacctgtcaccacttctactgaagccagttcctctcctacaactgctgaagttaccagcatgccaacctcaactcctagtgaaacaagtactccattaactagtatgcctgtcaaccacacgccagtggccagttctgaggctggcaccctttcaacaactcctgttgacaccagcacacctgtgaccacttctactaaagccagttcatctcctacaactgctgaaggtatcgtcgtgccaatctcaactgctagtgaaggaagtactctattaacaagtatacctgtcagcaccacgccggtggccagttctgaggctagcaccctttcaacaactcctgttgataccagcatacctgtcaccacttctactgaaggcagttcttctcctacaactgctgaaggtaccagcatgccaatctcaactcctagtgaagtaagtactccattaacaagtatacttgtcagcaccgtgccagtggccggttctgaggctagcaccctttcaacaactcctgttgacaccaggacacctgtcaccacttctgctgaagctagttcttctcctacaactgctgaaggtaccagcatgccaatctcaactcctggcgaaagaagaactccattaacaagtatgtctgtcagcaccatgccggtggccagttctgaggctagcaccctttcaagaactcctgctgacaccagcacacctgtgaccacttctactgaagccagttcctctcctacaactgctgaaggtaccggcataccaatctcaactcctagtgaaggaagtactccattaacaagtatacctgtcagcaccacgccagtggccattcctgaggctagcaccctttcaacaactcctgttgactccaacagtcctgtggtcacttctactgaagtcagttcatctcctacacctgctgaaggtaccagcatgccaatctcaacttatagtgaaggaagcactccattaacaggtgtgcctgtcagcaccacaccggtgaccagttctgcaatcagcaccctttcaacaactcctgttgacaccagcacacctgtgaccacttctactgaagcccattcatctcctacaacttctgaaggtaccagcatgccaacctcaactcctagtgaaggaagtactccattaacatatatgcctgtcagcaccatgctggtagtcagttctgaggatagcaccctttcagcaactcctgttgacaccagcacacctgtgaccacttctactgaagccacttcatctacaactgctgaaggtaccagcattccaacctcaactcctagtgaaggaatgactccattaactagtgtacctgtcagcaacacgccggtggccagttctgaggctagcatcctttcaacaactcctgttgactccaacactcctttgaccacttctactgaagccagttcatctcctcccactgctgaaggtaccagcatgccaacctcaactcctagtgaaggaagcactccattaacaagtatgcctgtcagcaccacaacggtggccagttctgaaacgagcaccctttcaacaactcctgctgacaccagcacacctgtgaccacttattctcaagccagttcatctcctccaattgctgacggtactagcatgccaacctcaacttatagtgaaggaagcactccactaacaaatatgtctttcagcaccacgccagtggtcagttctgaggctagcaccctttccacaactcctgttgacaccagcacacctgtcaccacttctactgaagccagtttatctcctacaactgctgaaggtaccagcataccaacctcaagtcctagtgaaggaaccactccattagcaagtatgcctgtcagcaccacgccggtggtcagttctgaggttaacaccctttcaacaactcctgtggactccaacactctggtgaccacttctactgaagccagttcatctcctacaatcgctgaaggtaccagcttgccaacctcaactactagtgaaggaagcactccattatcaattatgcctctcagtaccacgccggtggccagttctgaggctagcaccctttcaacaactcctgttgacaccagcacacctgtgaccacttcttctccaaccaattcatctcctacaactgctgaagttaccagcatgccaacatcaactgctggtgaaggaagcactccattaacaaatatgcctgtcagcaccacaccggtggccagttctgaggctagcaccctttcaacaactcctgttgactccaacacttttgttaccagttctagtcaagccagttcatctccagcaactcttcaggtcaccactatgcgtatgtctactccaagtgaaggaagctcttcattaacaactatgctcctcagcagcacatatgtgaccagttctgaggctagcacaccttccactccttctgttgacagaagcacacctgtgaccacttctactcagagcaattctactcctacacctcctgaagttatcaccctgccaatgtcaactcctagtgaagtaagcactccattaaccattatgcctgtcagcaccacatcggtgaccatttctgaggctggcacagcttcaacacttcctgttgacaccagcacacctgtgatcacttctacccaagtcagttcatctcctgtgactcctgaaggtaccaccatgccaatctggacgcctagtgaaggaagcactccattaacaactatgcctgtcagcaccacacgtgtgaccagctctgagggtagcaccctttcaacaccttctgttgtcaccagcacacctgtgaccacttctactgaagccatttcatcttctgcaactcttgacagcaccaccatgtctgtgtcaatgcccatggaaataagcacccttgggaccactattcttgtcagtaccacacctgttacgaggtttcctgagagtagcaccccttccataccatctgtttacaccagcatgtctatgaccactgcctctgaaggcagttcatctcctacaactcttgaaggcaccaccaccatgcctatgtcaactacgagtgaaagaagcactttattgacaactgtcctcatcagccctatatctgtgatgagtccttctgaggccagcacactttcaacacctcctggtgataccagcacacctttgctcacctctaccaaagccggttcattctccatacctgctgaagtcactaccatacgtatttcaattaccagtgaaagaagcactccattaacaactctccttgtcagcaccacacttccaactagctttcctggggccagcatagcttcgacacctcctcttgacacaagcacaacttttaccccttctactgacactgcctcaactcccacaattcctgtagccaccaccatatctgtatcagtgatcacagaaggaagcacacctgggacaaccatttttattcccagcactcctgtcaccagttctactgctgatgtctttcctgcaacaactggtgctgtatctacccctgtgataacttccactgaactaaacacaccatcaacctccagtagtagtaccaccacatctttttcaactactaaggaatttacaacacccgcaatgactactgcagctcccctcacatatgtgaccatgtctactgcccccagcacacccagaacaaccagcagaggctgcactacttctgcatcaacgctttctgcaaccagtacacctcacacctctacttctgtcaccacccgtcctgtgaccccttcatcagaatccagcaggccgtcaacaattacttctcacaccatcccacctacatttcctcctgctcactccagtacacctccaacaacctctgcctcctccacgactgtgaaccctgaggctgtcaccaccatgaccaccaggacaaaacccagcacacggaccacttccttccccacggtgaccaccaccgctgtccccacgaatactacaattaagagcaaccccacctcaactcctactgtgccaagaaccacaacatgctttggagatgggtgccagaatacggcctctcgctgcaagaatggaggcacctgggatgggctcaagtgccagtgtcccaacctctattatggggagttgtgtgaggaggtggtcagcagcattgacatagggccaccggagactatctctgcccaaatggaactgactgtgacagtgaccagtgtgaagttcaccgaagagctaaaaaaccactcttcccaggaattccaggagttcaaacagacattcacggaacagatgaatattgtgtattccgggatccctgagtatgtcggggtgaacatcacaaagctacgtcttggcagtgtggtggtggagcatgacgtcctcctaagaaccaagtacacaccagaatacaagacagtattggacaatgccaccgaagtagtgaaagagaaaatcacaaaagtgaccacacagcaaataatgattaatgatatttgctcagacatgatgtgtttcaacaccactggcacccaagtgcaaaacattacggtgacccagtacgaccctgaagaggactgccggaagatggccaaggaatatggagactacttcgtagtggagtaccgggaccagaagccatactgcatcagcccctgtgagcctggcttcagtgtctccaagaactgtaacctcggcaagtgccagatgtctctaagtggacctcagtgcctctgcgtgaccacggaaactcactggtacagtggggagacctgtaaccagggcacccagaagagtctggtgtacggcctcgtgggggcaggggtcgtgctgatgctgatcatcctggtagctctcctgatgctcgttttccgctccaagagagaggtgaaacggcaaaagtacagattgtctcagttatacaagtggcaagaagaggacagtggaccagctcctgggaccttccaaaacattggctttgacatctgccaagatgatgattccatccacctggagtccatctatagtaatttccagccctccttgagacacatagaccctgaaacaaagatccgaattcagaggcctcaggtaatgacgacatcattttaaggcatggagctgagaagtctgggagtgaggagatcccagtccggctaagcttggtggagcattttcccattgagagccttccatgggaactcaatgttcccattgtaagtacaggaaacaagccctgtacttaccaaggagaaagaggagagacagcagtgctgggagattctcaaatagaaacccgtggacgctccaatgggcttgtcatgatatcaggctaggctttcctgctcatttttcaaagacgctccagatttgagggtactctgactgcaacatctttcaccccattgatcgccaggattgatttggttgatctggctgagcaggcgggtgtccccgtcctccctcactgccccatatgtgtccctcctaaagctgcatgctcagttgaagaggacgagaggacgaccttctctgatagaggaggaccacgcttcagtcaaaggcatacaagtatctatctggacttccctgctagcacttccaaacaagctcagagatgttcctcccctcatctgcccgggttcagtaccatggacagcgccctcgacccgctgtttacaaccatgaccccttggacactggactgcatgcactttacatatcacaaaatgctctcataagaattattgcataccatcttcatgaaaaacacctgtatttaaatatagagcatttaccttttggta

SEQ ID NO: 18674 - DNA, 2446 bp, Homo sapiens
  source 1..2446: mol_type = unassigned DNA
aggcacctctggggtggcacctggcacaacagttgcccctggaagtttcagcacagcagctacaacttctcctggagcaagtggagtgactggcactggacccactgcagagaccacaactttcctaggaggaagtagcaccactggagcagaaataaaatcaggagccaccactggagcaccaggaagtaagacaggcacagctaaagtgctctctggtacgacagttgcctctgggagctccaactcagaggctacaactttctctggaatcactgaagcagtaacagtcccaagtaaaaatggatctatgaccactgcactggggagccaactctccagcagtcaaacagtgattccaggttccagtggcaccatctctcacacaactgttgcacctggaagttctgttacaggaaccaccactggtgcatcagatgatcaagtcactggaagtaaaacaggcactactggtgtggccttgagcacaactgttgcacctggaagttccagtacagaagccacaacttccacaggagtccatagaaccactgtagtgggacagaagacaggagctaccactagagggtcagcaaagcaaggaactagaagcacaatagaagctacgacgtcctttagaggcactgggaccacaggaagtggaatgaatacaggtactactggagtggtctctggcaacaccatctcacctagcagtttcaacacagaagctaccagtggcacatctgagaggccaaaccctggaagtgaaataggcaccactggcatagtctctggcacaacagttgcacctggaagttccaacacagaagccacaacttctttgggcaatggtggaaccactgaggctggaagtaaaatagttaccactgggataactactggcacgaccattgtacctgggagtttcaacacaaaggctaccacttctacagacgttggagttgccactggagttggaatggcaactgggatcaccaacataatttcagggagaagccaacctactggaagtaaaacaggctacactgtaacaggctctggaacaacagccttacctggaggtttcagaacagattctccatcttttccacttttcttgatttgctcttacagaggccacaacttttaaaggtgatgttggaaccactgaagcagaaatttcatcaggcaataccccaggatcaacgggagtcaccagcagccaagaaggaaccactgtggtatcaagtggaatcactggaatcccagaaacttccatctcaggtccttccaaggaagcatctgacaaaaccactgctcctggacctcctaccacagtcactgcttccacaggagtcaaagaaacttctgaaactggagtgcaaacaggctccaccttggttacagctggagtgccaacaagaccacaagtatcccagccagaaaccactgtcgtggcaaccagagaagtagaaaccgaaaataaaacagaatgtctagcctcacttccaccagctccaggtttgtcacggtccattgggagaagagaaatctcctggagacatatggactgccaattgccacagaggtacctgtactgatgcaaagactatagactgtaaacctgaggagtgcccttctccacccacatgcaaaaccggcgagaagcttgtgaagttccaatctaatgacacctgctgtgaaatcggatactgtgaaccaagaacatgtttatttaacaatactgactatgagattggtgcttcattcgatgaccccagcaacccctgtgtctcctactcctgcaaagacacgggctttgctgcagtagtccaggactgcccaaagcaaacctggtgtgcagaagcaagtcatcttaactaatgaacgccgagattcagttctcatattaaacaaaccctggccgggcgcggtggctcaggcctgtaatcccagcactgtgggaggccgaggcgggcggatcacctgaggtcagaggaagacagaatctatgattcaaaaaaatgttgctatacatgtaagaataattgcagatcttcccttgtaaatgtgactgttatctacagtggttgcaagaaaagagttcagatggcaaaatgcacaggggaatgtgaaaagactgccaagtacaattatgatatcttactcttggaacattcatgcctttgctgccgagaagaaaactatgaactcagagacattgtacttgactgtcctgatggcagtacaatcccttaccaatacaagcatatcacgacctgctcttgtttagacatatgccaactatatacgaccttcatgtacagttaatgctgacatcaccttcccagttttaacaggcctggtatttattttataagtgaggaaaaataatcatttaaaaagtgagaataaactaaacaatgtgagaataactcaaaac

SEQ ID NO: 18675 - DNA, 1243 bp, Homo sapiens
  source 1..1243: mol_type = unassigned DNA
cccaccggcacacagaccccaaccccgacacccatctccaccaccactacggtgaccccaaccccaacacccaccggcacacagaccccaaccacgacacccatcaccaccaccaccacggtgaccccaaccccgacacccaccggcacacagaccccaaccacggtactcatcaccaccaccactacgatgaccccaaccccaacacccaccagcacaaagagtacaaccgtgacacccatcaccaccacaactacggtgaccgcaaccccaacacccaccggcacacagaccccaaccatgatacccatcagcaccaccactacggtgaccccaaccccaacacccaccactggaagcacggggccccccacccacacaagcacagcacccattgctgagttgaccacatccaatcctccgcctgagtcctcaacccctcagacctctcggtccacctcttcccctctcacggagtcaaccacccttctgagtaccctaccacctgccattgagatgaccagcacggccccaccctccacacccacggcacccacgaccacgagcggaggccacacactgtctccaccgcccagcaccaccacgtcccctccaggcacccccactcgcggtaccacgaccgggtcatcttcagcccccacccccagcactgtgcagacgaccaccaccagtgcctggaccccaacgccgaccccactctccacacccagcatcatcaggaccacaggcctgaggccctacccttcctctgtgcttatctgctgtgtcctgaacgacacctactacgcaccaggtgaggaggtgtacaacggcacatacggagacacctgttatttcgtcaactgctcactgagctgtacgttggagttctataactggtcctgcccatccacgccctccccaacacccacgccctccaagtcgacgcccacgccttccaagccatcgtccacgccctccaagccgacgcccggcaccaagccccccgagtgcccagactttgatcctcccagacaggagaacgagacttggtggctgtgcgactgcttcatggccacgtgcaagtacaacaacacggtggagatcgtgaaggtggagtgtgagccgccgcccatgcccacctgctccaacggcctccaacccgtgcgcgtcgaggaccccgacggctgctgctggcactgggagtgcgactgctactgcacgggctggggcgacccgcact

SEQ ID NO: 18676 - DNA, 5340 bp, Homo sapiens
  source 1..5340: mol_type = unassigned DNA
atggggctgccactagcccgcctggcggctgtgtgcctggccctgtctttggcagggggctcggagctccagacagagggcagaacccgaaaccacggccacaacgtctgcagcacctggggcaacttccactacaagaccttcgacggggacgtcttccgcttccccggcctctgcgactacaacttcgcctccgactgccgaggctcctacaaggaatttgctgtgcacctgaagcggggtccgggccaggctgaggcccccgccggggtggagtccatcctgctgaccatcaaggatgacaccatctacctcacccgccacctggctgtgcttaacggggccgtggtcagcaccccgcactacagccccgggctgctcattgagaagagcgatgcctacaccaaagtctactcccgcgccggcctcaccctcatgtggaaccgggaggatgcactcatgctggagctggacactaagttccggaaccacacctgtggcctctgcggggactacaacggcctgcagagctattcagaattcctctctgacggcgtgctcttcagtcccctggagtttgggaacatgcagaagatcaaccagcccgatgtggtgtgtgaggatcccgaggaggaggtggcccccgcatcctgctccgagcaccgcgccgagtgtgagaggctgctgaccgccgaggccttcgcggactgtcaggacctggtgccgctggagccgtatctgcgcgcctgccagcaggaccgctgccggtgcccgggcggtgacacctgcgtctgcagcaccgtggccgagttctcccgccagtgctcccacgccggcggccggcccgggaactggaggaccgccacgctctgccccaagacctgccccgggaacctggtgtacctggagagcggctcgccctgcatggacacctgctcacacctggaggtgagcagcctgtgcgaggagcaccgcatggacggctgtttctgcccagaaggcaccgtatatgacgacatcggggacagtggctgcgttcctgtgagccagtgccactgcaggctgcacggacacctgtacacaccgggccaggagatcaccaatgactgcgagcagtgtgtctgtaacgctggccgctgggtgtgcaaagacctgccctgccccggcacctgtgccctggaaggcggctcccacatcaccaccttcgatgggaagacgtacaccttccacggggactgctactatgtcctggccaagggtgaccacaacgattcctacgctctcctgggcgagctggccccctgtggctccacagacaagcagacctgcctgaagacggtggtgctgctggctgacaagaagaagaatgtggtggtcttcaagtccgatggcagtgtactgctcaacgagctgcaggtgaacctgccccacgtgaccgcgagcttctctgtcttccgcccgtcttcctaccacatcatggtgagcatggccattggcgtccggctgcaggtgcagctggccccagtcatgcaactctttgtgacactggaccaggcctcccaggggcaggtgcagggcctctgcgggaacttcaacggcctggaaggtgacgacttcaagacggccagcgggctggtggaggccacgggggccggctttgccaacacctggaaggcacagtcaagctgccatgacaagctggactggttggacgatccctgctccctgaacatcgagagcgccaactacgccgagcactggtgctccctcctgaagaagacagagaccccctttggcaggtgccactcggctgtggaccctgctgagtattacaagaggtgcaaatatgacacgtgtaactgtcagaacaatgaggactgcctgtgcgccgccctgtcctcctacgcgcgcgcctgcaccgccaagggcgtcatgctgtggggctggcgggagcatgtctgcaacaaggatgtgggctcctgccccaactcgcaggtcttcctgtacaacctgaccacctgccagcagacctgccgctccctctccgaggccgacagccactgtctcgagggctttgcgcctgtggacggctgcggctgccctgaccacaccttcctggacgagaagggccgctgcgtacccctggccaagtgctcctgttaccaccgcggtctctacctggaggcgggggatgtggtcgtcaggcaggaagaacgatgtgtgtgccgggatgggcggctgcactgtaggcagatccggctgatcggccagagctgcacggccccaaagatccacatggactgcagcaacctgactgcactggccacctcgaagccccgagccctcagctgccagacgctggccgccggctattaccacacagagtgtgtcagtggctgtgtgtgccccgacgggctgatggatgacggccggggtggctgcgtggtggagaaggaatgcccttgcgtccataacaacgacctgtattcttccggcgccaagatcaaggtggactgcaatacctgcacctgcaagagaggacgctgggtgtgcacccaggctgtgtgccatggcacctgctccatttacgggagtggccactacatcacctttgatgggaagtactacgactttgacggacactgctcctacgtggctgttcaggactactgcggccagaactcctcactgggctcattcagcatcatcaccgagaacgtcccctgtggcactacgggcgtcacctgctccaaggccatcaagatcttcatggggaggacggagctgaagttggaagacaagcaccgtgtggtgatccagcgtgatgagggtcaccacgtggcctacaccacgcgggaggtgggccagtacctggtggtggagtccagcacgggcatcatcgtcatctgggacaagaggaccaccgtgttcatcaagctggctccctcctacaagggcaccgtgtgtggcctgtgtgggaactttgaccaccgctccaacaacgacttcaccacgcgggaccacatggtggtgagcagcgagctggacttcgggaacagctggaaggaggcccccacctgcccagatgtgagcaccaaccccgagccctgcagcctgaacccgcaccgccgctcctgggccgagaagcagtgcagcatcctcaaaagcagcgtgttcagcatctgccacagcaaggtggaccccaagcccttctacgaggcctgtgtgcacgactcgtgctcctgtgacacgggtggggactgtgagtgcttctgctctgccgtggcctcctacgcccaggagtgtaccaaagagggggcctgcgtgttctggaggacgccggacctgtgccccatattctgcgactactacaaccctccgcatgagtgtgagtggcactatgagccatgtgggaaccggagcttcgagacctgcaggaccatcaacggcatccactccaacatctccgtgtcctacctggagggctgctacccccggtgccccaaggacaggcccatctatgaggaggatctgaagaagtgtgtcactgcagacaagtgtggctgctatgtcgaggacacccactacccacctggagcatcggttcccaccgaggagacctgcaagtcctggtgcacatgcacacaaacgcacacagcataccacgtgcacacacacggaaagattcttaaccagacccaggatggcgccttctgctactgggagatctgtggccccaacgggacggtggagaagcacttcaacatctgttccattacgacacgcccgtccaccctgaccaccttcaccaccatcaccctccccaccacccccaccaccttcaccactaccaccaccaccaccaccccgacctccagcacagttttatcaacaactccgaagctgtgctgcctctggtctgactggatcaatgaggaccaccccagcagtggcagcgacgacggtgaccgagaaacatttgatggggtctgcggggcccctgaggacatcgagtgcaggtcggtcaaggatccccacctcagcttggagcagctaggccagaaggtgcagtgtgatgtctctgttgggttcatttgcaagaatgaagaccagtttggaaatggaccatttggactgtgttacgactacaagatacgtgtcaattgttgctggcccatggataagtgtatcaccactcccagccctccaactaccactcccagccctccaccaaccagcacgaccacccttccaccaaccaccacccccagccctccaaccaccaccacaaccacccctccaccaaccaccacccccagccctccaataaccaccacgaccacccctccaccaaccaccactcccagccctccaataagcaccacaaccacccctccaccaaccaccactcccagccctccaaccaccactcccagccctccaaccaccactcccagccctccaacaaccaccacaaccacccctccaccaaccaccactcccagccctccaacgactacgcccatcactccaccagccagcactaccacccttccaccaaccaccactcccagccctccaacaaccaccacaaccacccctccaccaaccaccactcccatcaccaccaccaccacggtgaccccaaccccaacacccaccggcacacagaccccaacaacgacacccatcaccaccaccaccacggtgaccccaaccccaacacccaccggcacacagaccccaacatcgacacccatcaccaccaccactacgaccccaaccccaacagccatcaccaccaccactacggtgaccccaaccccaacacccaccggcacacagaccccaaccacgacacccatcaccaccaccactacggtgacaccaaccccaacacccaccggcacacagtccccaaccccaacagccatcaccaccaccactacggtgaccccaaccccaacacccaccggcacacagaccccaacatcgacacccatcaccaccaccactacggtgaccccaaccccaacacccaccggcacacagaccccaaccccgacacccatctccaccaccactacggtgaccccaaccccaacacccaccggcacacagaccccaaccacgacacccatcaccaccaccaccacggtgaccccaaccccgacacccaccggcacacagaccccaaccacgaccccaacacccaccagcacaaagagtacaaccgtgacacccatcaccaccacaactacggtgaccgcaaccccaacacccaccggcacacagaccccaaccatgatacccatcagcaccaccactacggtgacccca

SEQ ID NO: 18677 - DNA, 1612 bp, Homo sapiens
  source 1..1612: mol_type = unassigned DNA
gacatcgagtgcaggtcggtcaaggatccccacctcagcttggagcagctaggccagaaggtgcagtgtgatgtctctgttgggttcatttgcaagaatgaagaccagtttggaaatggaccatttggactgtgttacgactacaagatacgtgtcaattgttgctgcacccccactcgcggtaccacgaccgggtcatcttcagcccccacccccagcactgtgcagacgaccaccaccagtgcctggaccccaacgccgaccccactctccacacccagcatcatcaggaccacaggcctgaggccctacccttcctctgtgcttatctgctgtgtcctgaacgacacctactacgcaccaggtgaggaggtgtacaacggcacatacggagacacctgttatttcgtcaactgctcactgagctgtacgttggagttctataactggtcctgcccatccacgccctccccaacacccacgccctccaagtcgacgcccacgccttccaagccatcgtccacgccctccaagccgacgcccggcaccaagccccccgagtgcccagactttgatcctcccagacaggagaacgagacttggtggctgtgcgactgcttcatggccacgtgcaagtacaacaacacggtggagatcgtgaaggtggagtgtgagccgccgcccatgcccacctgctccaacggcctccaacccgtgcgcgtcgaggaccccgacggctgctgctggcactgggagtgcgactgctactgcacgggctggggcgacccgcactatgtcaccttcgacggactctactacagctaccagggcaactgcacctacgtgctggtggaggagatcagcccctccgtggacaacttcggagtttacatcgacaactaccactgcgatcccaacgacaaggtgtcctgtccccgcaccctcatcgtgcgccacgagacccaggaggtgctgatcaagaccgtgcatatgatgcccatgcaggtgcaggtgcaggtgaacaggcaggcggtggcactgccctacaagaagtacgggctggaggtgtaccagtctggcatcaactacgtggtggacatccccgagctgggtgtcctcgtctcctacaatggcctgtccttctccgtcaggctgccctaccaccggtttggcaacaacaccaagggccagtgtggcacctgcaccaacaccacctccgacgactgcattctgcccagcggggagatcgtctccaactgtgaggctgcggctgaccagtggctggtgaacgacccctccaagccacactgcccccacagcagctccacgaccaagcgcccggccgtcactgtgcccgggggcggtaaaacgaccccacacaaggactgcaccccatctcccctctgccagctcatcaaggacagcctgtttgcccagtgccacgcactggtgcccccgcagcactactacgatgcctgcgtgttcgacagctgcttcatgccgggctcgagcctggagtgcgccagtctgcaggcctacgcagccctctgtgcccagcagaacatctgcctcgactggcggaaccacacgcatggggcctgctgtaagtgcc

SEQ ID NO: 18678 - DNA, 8637 bp, Homo sapiens
  source 1..8637: mol_type = unassigned DNA
caacccacaccgcccctgccagccaccatggggctgccactagcccgcctggcggctgtgtgcctggccctgtctttggcagggggctcggagctccagacagagggcagaacccgaaaccacggccacaacgtctgcagcacctggggcaacttccactacaagaccttcgacggggacgtcttccgcttccccggcctctgcgactacaacttcgcctccgactgccgaggctcctacaaggaatttgctgtgcacctgaagcggggtccgggccaggctgaggcccccgccggggtggagtccatcctgctgaccatcaaggatgacaccatctacctcacccgccacctggctgtgcttaacggggccgtggtcagcaccccgcactacagccccgggctgctcattgagaagagcgatgcctacaccaaagtctactcccgcgccggcctcaccctcatgtggaaccgggaggatgcactcatgctggagctggacactaagttccggaaccacacctgtggcctctgcggggactacaacggcctgcagagctattcagaattcctctctgacggcgtgctcttcagtcccctggagtttgggaacatgcagaagatcaaccagcccgatgtggtgtgtgaggatcccgaggaggaggtggcccccgcatcctgctccgagcaccgcgccgagtgtgagaggctgctgaccgccgaggccttcgcggactgtcaggacctggtgccgctggagccgtatctgcgcgcctgccagcaggaccgctgccggtgcccgggcggtgacacctgcgtctgcagcaccgtggccgagttctcccgccagtgctcccacgccggcggccggcccgggaactggaggaccgccacgctctgccccaagacctgccccgggaacctggtgtacctggagagcggctcgccctgcatggacacctgctcacacctggaggtgagcagcctgtgcgaggagcaccgcatggacggctgtttctgcccagaaggcaccgtatatgacgacatcggggacagtggctgcgttcctgtgagccagtgccactgcaggctgcacggacacctgtacacaccgggccaggagatcaccaatgactgcgagcagtgtgtctgtaacgctggccgctgggtgtgcaaagacctgccctgccccggcacctgtgccctggaaggcggctcccacatcaccaccttcgatgggaagacgtacaccttccacggggactgctactatgtcctggccaagggtgaccacaacgattcctacgctctcctgggcgagctggccccctgtggctccacagacaagcagacctgcctgaagacggtggtgctgctggctgacaagaagaagaatgtggtggtcttcaagtccgatggcagtgtactgctcaacgagctgcaggtgaacctgccccacgtgaccgcgagcttctctgtcttccgcccgtcttcctaccacatcatggtgagcatggccattggcgtccggctgcaggtgcagctggccccagtcatgcaactctttgtgacactggaccaggcctcccaggggcaggtgcagggcctctgcgggaacttcaacggcctggaaggtgacgacttcaagacggccagcgggctggtggaggccacgggggccggctttgccaacacctggaaggcacagtcaagctgccatgacaagctggactggttggacgatccctgctccctgaacatcgagagcgccaactacgccgagcactggtgctccctcctgaagaagacagagaccccctttggcaggtgccactcggctgtggaccctgctgagtattacaagaggtgcaaatatgacacgtgtaactgtcagaacaatgaggactgcctgtgcgccgccctgtcctcctacgcgcgcgcctgcaccgccaagggcgtcatgctgtggggctggcgggagcatgtctgcaacaaggatgtgggctcctgccccaactcgcaggtcttcctgtacaacctgaccacctgccagcagacctgccgctccctctccgaggccgacagccactgtctcgagggctttgcgcctgtggacggctgcggctgccctgaccacaccttcctggacgagaagggccgctgcgtacccctggccaagtgctcctgttaccaccgcggtctctacctggaggcgggggatgtggtcgtcaggcaggaagaacgatgtgtgtgccgggatgggcggctgcactgtaggcagatccggctgatcggccagagctgcacggccccaaagatccacatggactgcagcaacctgactgcactggccacctcgaagccccgagccctcagctgccagacgctggccgccggctattaccacacagagtgtgtcagtggctgtgtgtgccccgacgggctgatggatgacggccggggtggctgcgtggtggagaaggaatgcccttgcgtccataacaacgacctgtattcttccggcgccaagatcaaggtggactgcaatacctgcacctgcaagagaggacgctgggtgtgcacccaggctgtgtgccatggcacctgctccatttacgggagtggccactacatcacctttgatgggaagtactacgactttgacggacactgctcctacgtggctgttcaggactactgcggccagaactcctcactgggctcattcagcatcatcaccgagaacgtcccctgtggcactacgggcgtcacctgctccaaggccatcaagatcttcatggggaggacggagctgaagttggaagacaagcaccgtgtggtgatccagcgtgatgagggtcaccacgtggcctacaccacgcgggaggtgggccagtacctggtggtggagtccagcacgggcatcatcgtcatctgggacaagaggaccaccgtgttcatcaagctggctccctcctacaagggcaccgtgtgtggcctgtgtgggaactttgaccaccgctccaacaacgacttcaccacgcgggaccacatggtggtgagcagcgagctggacttcgggaacagctggaaggaggcccccacctgcccagatgtgagcaccaaccccgagccctgcagcctgaacccgcaccgccgctcctgggccgagaagcagtgcagcatcctcaaaagcagcgtgttcagcatctgccacagcaaggtggaccccaagcccttctacgaggcctgtgtgcacgactcgtgctcctgtgacacgggtggggactgtgagtgcttctgctctgccgtggcctcctacgcccaggagtgtaccaaagagggggcctgcgtgttctggaggacgccggacctgtgccccatattctgcgactactacaaccctccgcatgagtgtgagtggcactatgagccatgtgggaaccggagcttcgagacctgcaggaccatcaacggcatccactccaacatctccgtgtcctacctggagggctgctacccccggtgccccaaggacaggcccatctatgaggaggatctgaagaagtgtgtcactgcagacaagtgtggctgctatgtcgaggacacccactacccacctggagcatcggttcccaccgaggagacctgcaagtcctgcgtgtgtaccaactcctcccaagtcgtctgcaggccggaggaaggaaagattcttaaccagacccaggatggcgccttctgctactgggagatctgtggccccaacgggacggtggagaagcacttcaacatctgttccattacgacacgcccgtccaccctgaccaccttcaccaccatcaccctccccaccacccccaccaccttcaccactaccaccaccaccaccaccccgacctccagcacagttttatcaacaactccgaagctgtgctgcctctggtctgactggatcaatgaggaccaccccagcagtggcagcgacgacggtgaccgagaaacatttgatggggtctgcggggcccctgaggacatcgagtgcaggtcggtcaaggatccccacctcagcttggagcagctaggccagaaggtgcagtgtgatgtctctgttgggttcatttgcaagaatgaagaccagtttggaaatggaccatttggactgtgttacgactacaagatacgtgtcaattgttgctggcccatggataagtgtatcaccactcccagccctccaactaccactcccagccctccaccaaccagcacgaccacccttccaccaaccaccacccccagccctccaaccaccaccacaaccacccctccaccaaccaccacccccagccctccaataaccaccacgaccacccctccaccaaccaccactcccagccctccaataagcaccacaaccacccctccaccaaccaccactcccagccctccaaccaccactcccagccctccaaccaccactcccagccctccaacaaccaccacaaccacccctccaccaaccaccactcccagccctccaacgactacgcccatcactccaccagccagcactaccacccttccaccaaccaccactcccagccctccaacaaccaccacaaccacccctccaccaaccaccactcccatcaccaccaccaccacggtgaccccaaccccaacacccaccggcacacagaccccaacaacgacacccatcaccaccaccaccacggtgaccccaaccccaacacccaccggcacacagaccccaacatcgacacccatcaccaccaccactacggtgaccccaaccccaacacccaccggcacacagaccccaaccacgacacccatcaccaccaccactacggtgaccccaaccccaacacccactggcacacagaccccaaccccaacagccatcaccaccaccactacggtgaccccaaccccaacacccaccggcacacagaccccaaccacgacacccatcaccaccaccactacggtgacaccaaccccaacacccaccggcacacagtccccaaccccaacagccatcaccaccaccactacggtgaccccaaccccaacacccaccggcacacagaccccaacatcgacacccatcaccaccaccactacggtgaccccaaccccaacacccaccggcacacagaccccaaccccgacacccatctccaccaccactacggtgaccccaaccccaacacccaccggcacacagaccccaaccacgacacccatcaccaccaccaccacggtgaccccaaccccgacacccaccggcacacagaccccaaccacggtactcatcaccaccaccactacgatgaccccaaccccaacacccaccagcacaaagagtacaaccgtgacacccatcaccaccacaactacggtgaccgcaaccccaacacccaccggcacacagaccccaaccatgatacccatcagcaccaccactacggtgaccccaaccccaacacccaccactggaagcacggggccccccacccacacaagcacagcacccattgctgagttgaccacatccaatcctccgcctgagtcctcaacccctcagacctctcggtccacctcttcccctctcacggagtcaaccacccttctgagtaccctaccacctgccattgagatgaccagcacggccccaccctccacacccacggcacccacgaccacgagcggaggccacacactgtctccaccgcccagcaccaccacgtcccctccaggcacccccactcgcggtaccacgaccgggtcatcttcagcccccacccccagcactgtgcagacgaccaccaccagtgcctggaccccaacgccgaccccactctccacacccagcatcatcaggaccacaggcctgaggccctacccttcctctgtgcttatctgctgtgtcctgaacgacacctactacgcaccaggtgaggaggtgtacaacggcacatacggagacacctgttatttcgtcaactgctcactgagctgtacgttggagttctataactggtcctgcccatccacgccctccccaacacccacgccctccaagtcgacgcccacgccttccaagccatcgtccacgccctccaagccgacgcccggcaccaagccccccgagtgcccagactttgatcctcccagacaggagaacgagacttggtggctgtgcgactgcttcatggccacgtgcaagtacaacaacacggtggagatcgtgaaggtggagtgtgagccgccgcccatgcccacctgctccaacggcctccaacccgtgcgcgtcgaggaccccgacggctgctgctggcactgggagtgcgactgctactgcacgggctggggcgacccgcactatgtcaccttcgacggactctactacagctaccagggcaactgcacctacgtgctggtggaggagatcagcccctccgtggacaacttcggagtttacatcgacaactaccactgcgatcccaacgacaaggtgtcctgtccccgcaccctcatcgtgcgccacgagacccaggaggtgctgatcaagaccgtgcatatgatgcccatgcaggtgcaggtgcaggtgaacaggcaggcggtggcactgccctacaagaagtacgggctggaggtgtaccagtctggcatcaactacgtggtggacatccccgagctgggtgtcctcgtctcctacaatggcctgtccttctccgtcaggctgccctaccaccggtttggcaacaacaccaagggccagtgtggcacctgcaccaacaccacctccgacgactgcattctgcccagcggggagatcgtctccaactgtgaggctgcggctgaccagtggctggtgaacgacccctccaagccacactgcccccacagcagctccacgaccaagcgcccggccgtcactgtgcccgggggcggtaaaacgaccccacacaaggactgcaccccatctcccctctgccagctcatcaaggacagcctgtttgcccagtgccacgcactggtgcccccgcagcactactacgatgcctgcgtgttcgacagctgcttcatgccgggctcgagcctggagtgcgccagtctgcaggcctacgcagccctctgtgcccagcagaacatctgcctcgactggcggaaccacacgcatggggcctgcttggtggagtgcccatctcacagggagtaccaggcctgtggccctgcagaagagcccacgtgcaaatccagctcctcccagcagaacaacacagtcctggtggaaggctgcttctgtcctgagggcaccatgaactacgctcctggctttgatgtctgcgtgaagacctgcggctgtgtgggacctgacaatgtgcccagagagtttggggagcacttcgagttcgactgcaagaactgtgtctgcctggagggtggaagtggcatcatctgccaacccaagaggtgcagccagaagcccgttacccactgcgtggaagacggcacctacctcgccacggaggtcaaccctgccgacacctgctgcaacattaccgtctgcaagtgcaacaccagcctgtgcaaagagaagccctccgtgtgcccgctgggattcgaagtgaagagcaagatggtgcctggaaggtgctgtcctttctactggtgtgagtccaagggggtgtgtgttcacgggaatgctgagtaccagcccggttctccagtttattcctccaagtgccaggactgcgtgtgcacggacaaggtggacaacaacaccctgctcaacgtcatcgcctgcacccacgtgccctgcaacacctcctgcagccctggcttcgaactcatggaggcccccggggagtgctgtaagaagtgtgaacagacgcactgtatcatcaaacggcccgacaaccagcacgtcatcctgaagcccggggacttcaagagcgacccgaagaacaactgcacattcttcagctgcgtgaagatccacaaccagctcatctcgtccgtctccaacatcacctgccccaactttgatgccagcatttgcatcccgggctccatcacattcatgcccaatggatgctgcaagacctgcacccctcgcaatgagaccagggtgccctgctccaccgtccccgtcaccacggaggtttcgtacgccggctgcaccaagaccgtcctcatgaatcattgctccgggtcctgcgggacatttgtcatgtactcggccaaggcccaggccctggaccacagctgctcctgctgcaaagaggagaaaaccagccagcgtgaggtggtcctgagctgccccaatggcggctcgctgacacacacctacacccacatcgagagctgccagtgccaggacaccgtctgcgggctccccaccggcacctcccgccgggcccggcgctcccctaggcatctggggagcgggtgagcggggtgggcacagcccccttcactgccctcgacagctttacctcccccggaccctctgagcctcctaagctcggcttcctctcttcagatatttattgtctgagtctttgttcagtccttgctttccaataataaactcagggggacatgctgt

SEQ ID NO: 18679 - DNA, 3338 bp, Homo sapiens
  source 1..3338: mol_type = unassigned DNA
atctactccacagtcagcacatccacaactgccatcacctcacattttactacctcagagactgcggtgactcccacacctgtaaccccatcttctctgagtacagacatcccgaccacaagcctacgaactctcaccccttcgtctgtgggcaccagcacttcattgactacaaccacagactttccctctatacccactgatatcagtaccttaccaactcgaacacacatcatttcatcttctccctccatccaaagtacagaaacctcatcccttgtgggcaccacctctcccaccatgtccactgtgagaatgaccctcagaattactgagaacaccccaatcagttcctttagcacaagtattgttgttatacctgaaaccccaacacagacccctcctgtactgacgtcagccactgggacccaaacatctcctgcacctactactgtcacctttggaagtacggattcctccacgtccactcttcatactcttactccatcaacagccttgagcacgatcgtgtcaacatcacaggttcctattcctagcacacattcctccacccttcaaacaactccttctactccctcattgcaaacttcactcacatctacaagtgagttcactacagaatctttcactaggggaagtacgtctacaaatgcaatcttgacttcttttagtaccatcatctggtcctcaacacccactattatcatgtcctcttctccatcttctgccagcataactccagtgttctccactaccattcattctgttccttcttcaccatacattttcagtacagaaaatgtgggctccgcttctatcacaggctttcctagtctctcttcctctgcaactaccagcacttcttcaaccagctcctctctgaccacagctctcactgaaataacccccttttcttatatttcccttccctccaccacaccctgtccaggaactataacaattaccatagtccctgcctctcccactgatccatgtgttgaaatggatcccagcactgaagctacttctcctcccaccaccccattaacagtctttccctttactaccgaaatggtcacctgtcctacctccatcagtatccaaactactcttactacatatatggacacttcttccatgatgccagaaagtgagtccagcatctcacccaatgcttccagttccactggcactgggactgtacccacaaacacagttttcacaagtactcgactgcccaccagtgagacctggctgagcaacagttctgtgatccccctacctcttcctggcgtctctaccatcccgctcaccatgaaaccaagcagtagcctcccgaccatcctgaggacttcaagcaagtcaacacacccctccccacccaccactaggacttcagagacaccagtggccactacccagactcctaccacccttacatcacgcaggacaactcgcatcacttctcagatgaccacacagtccacgttgaccaccactgcaggcacctgtgacaatggtggcacctgggaacagggacagtgtgcttgccttccggggttttctggggaccgctgtcagctccagaccagatgccagaatgggggtcagtgggatggcctcaaatgccagtgccccagcaccttctatggttccagttgtgagtttgctgtggaacaggtggatctagatgtagtggagaccgaggtgggcatggaagtgtctgtggatcagcagttctcgccggacctcaatgacaacacttcccaggcctacagggatttcaacaagaccttctggaatcagatgcagaagatttttgcagacatgcagggcttcaccttcaagggtgtggagatcctgtccctgaggaatggcagcatcgtggtggactacctggtcctgctggagatgcccttcagcccccagctggagagcgagtatgagcaggtgaagaccacgctgaaggaggggctccagaacgccagccaggatgcgaacagctgccaggactcccagaccctgtgttttaagcctgactccatcaaggtgaacaacaacagcaagacagagctgaccccggaagccatctgccgccgcgccgctcccacgggctatgaagagttctacttccctctggtggaggccacccggctccgctgtgtcaccaaatgcacgtcgggcgtggacaacgccatcgactgtcaccagggccagtgcgttctagagacgagcggtcccgcgtgtcgctgctactccaccgacacgcactggttctctggcccgcgctgcgaggtggccgtccactggagggcgctggtcgggggcctgacggccggcgccgcgctgctggtgctgctgctgctggcgctgggcgtccgggcggtgcgctccggatggtggggcggccagcgccgaggccggtcctgggaccaggacaggaaatggttcgagacctgggatgaggaagtcgtgggcactttttcaaactggggtttcgaggacgacggaacagacaaggatacaaatttccatgtggccttggagaacgtggacaccactatgaaggtgcacatcaagagacccgagatgacctcgtcctcagtgtgagccctgcggggccccttcaccaccccctccgccctgccccggacacaagggtctgcattgcgtccatttcaagaggtggccccaggacgcgggcagcccaggctcctgctgttcttgggcaagatgagactgttcccccaaatcccatccttctccttccaacttggctgaaacccacctggagacgcagttcacgtccaggctcttccactgtggaatcttgggcaagtcagtaacgagcctcagtttcctcacctgcaaaacgggtacagcattcctgtatgatagctcacgccgtcgttgtgaaaaccacatagacttggtcaattctcggtcctactctgccctcccgtctcagccctcgtgttgccattgcctctctcggatcctccaatcctcacgtccttcacctggtctctggccctggttcttattttctctcaattccctactgcctgtttcttactttgaacctggaggcagcctgcagccccatcccatctcctgccctctcctgatctaactccctgctgcatctcttgctctcattccttagacgtcctccccttttgaccccgttccttcatccatcctgcaccccagtcccccagccctaaatcctccctcctctcctcacatcctggtccctagcaaggtatagatagcctctgtgtcttaggataccccgggtgctgttccctcggtca

SEQ ID NO: 18680 - DNA, 1073 bp, Homo sapiens
  source 1..1073: mol_type = unassigned DNA
tgtgacaatggtggcacctgggaacagggacagtgtgcttgccttccggggttttctggggaccgctgtcagctccagaccagatgccagaatgggggtcagtgggatggcctcaaatgccagtgccccagcaccttctatggttccagttgtgagtttgctgtggaacaggtggatctagatgtagtggagaccgaggtgggcatggaagtgtctgtggatcagcagttctcgccggacctcaatgacaacacttcccaggcctacagggatttcaacaagaccttctggaatcagatgcagaagatttttgcagacatgcagggcttcaccttcaagggtgtggagatcctgtccctgaggaatggcagcatcgtggtggactacctggtcctgctggagatgcccttcagcccccagctggagagcgagtatgagcaggtgaagaccacgctgaaggaggggctccagaacgccagccaggatgcgaacagctgccaggactcccagaccctgtgttttaagcctgactccatcaaggtgaacaacaacagcaagacagagctgaccccggaagccatctgccgccgcgccgctcccacgggctatgaagagttctacttccctctggtggaggccacccggctccgctgtgtcaccaaatgcacgtcgggcgtggacaacgccatcgactgtcaccagggccagtgcgttctagagacgagcggtcccgcgtgtcggtcctgggaccaggacaggaaatggttcgagacctgggatgaggaagtcgtgggcactttttcaaactggggtttcgaggacgacggaacagacaaggatacaaatttccatgtggccttggagaacgtggacaccactatgaaggtgcacatcaagagacccgagatgacctcgtcctcagtgtgagccctgcggggccccttcaccaccccctccgccctgccccggacacaagggtctgcattgcgtccatttcaagaggtggccccaggacgcgggcagcccaggctcctgctgttcttgggcaagatgagactgttcccccaaatccc

SEQ ID NO: 18681 - DNA, 3982 bp, Homo sapiens
  source 1..3982: mol_type = unassigned DNA
ggagcttccccagggagccagggggacttttgccgcagccatgaagggggcacgctggaggagggtcccctgggtgtccctgagctgcctgtgtctctgcctccttccgcatgtggtcccaggaatgacaacaccgtcactgaagacagacggtgggagacgcacagccacatcaccaccccccacaacctcccagaccatcatttccaccattcccagcactgccatgcacacccgctccacagctgcccccatccccatcctgcctgagagaggagtttccctcttcccctatggggcaggcgccggggacctggagttcgtcaggaggaccgtggacttcacctccccactcttcaagccggcgactggcttcccccttggctcctctctccgtgattccctctacttcacagacaatggccagatcatcttcccagagtcagactaccagattttctcctaccccaacccactcccaacaggcttcacaggccgggaccctgtggccctggtggctccgttctgggacgatgctgacttctccactggtcgggggaccacattttatcaggaatacgagacgttctatggtgaacacagcctgctagtccagcaggccgagtcttggattagaaagatgacaaacaacgggggctacaaggccaggtgggccctaaaggtcacgtgggtcaatgcccacgcctatcctgcccagtggaccctcgggagcaacacctaccaagccatcctctccacggacgggagcaggtcctatgccctgtttctctaccagagcggtgggatgcagtgggacgtggcccagcgctcaggcaacccggtgctcatgggcttctctagtggagatggctatttcgaaaacagcccactgatgtcccagccagtgtgggagaggtatcgccctgatagattcctgaattccaactcaggcctccaagggctgcagttctacaggctacaccgggaagaaaggcccaactaccgtctcgagtgcctgcagtggctgaagagccagcctcggtggcccagctggggctggaaccaggtctcctgcccttgttcctggcagcagggacgacgggacttacgattccaacccgtcagcataggtcgctggggcctcggcagtaggcagctgtgcagcttcacctcttggcgaggaggcgtgtgctgcagctacgggccctggggagagtttcgtgaaggctggcacgtgcagcgtccttggcagttggcccaggaactggagccacagagctggtgctgccgctggaatgacaagccctacctctgtgccctgtaccagcagaggcggccccacgtgggctgtgctacatacaggcccccacagcccgcctggatgttcggggacccccacatcaccaccttggatggtgtcagttacaccttcaatgggctgggggacttcctgctggtcggggcccaagacgggaactcctccttcctgcttcagggccgcaccgcccagactggctcagcccaggccaccaacttcatcgcctttgcggctcagtaccgctccagcagcctgggccccgtcacggtccaatggctccttgagcctcacgacgcaatccgtgtcctgctggataaccagactgtgacatttcagcctgaccatgaagacggcggaggccaggagacgttcaacgccaccggagtcctcctgagccgcaacggctctgaggtctcggccagcttcgacggctgggccaccgtctcggtgatcgcgctctccaacatcctccacgcctccgccagcctcccgcccgagtaccagaaccgcacggaggggctcctgggggtctggaataacaatccagaggacgacttcaggatgcccaatggctccaccattcccccagggagccctgaggagatgcttttccactttggaatgacctggcagatcaacgggacaggcctccttggcaagaggaatgaccagctgccttccaacttcacccctgttttctactcacaactgcaaaaaaacagctcctgggctgaacatttgatctccaactgtgacggagatagctcatgcatctatgacaccctggccctgcgcaacgcaagcatcggacttcacacgagggaagtcagtaaaaactacgagcaggcgaacgccaccctcaatcagtacccgccctccatcaatggtggtcgtgtgattgaagcctacaaggggcagaccacgctgattcagtacaccagcaatgctgaggatgccaacttcacgctcagagacagctgcaccgacttggagctctttgagaatgggacgttgctgtggacacccaagtcgctggagccattcactctggagattctagcaagaagtgccaagattggcttggcatctgcactccagcccaggactgtggtctgccattgcaatgcagagagccagtgtttgtacaatcagaccagcagggtgggcaactcctccctggaggtggctggctgcaagtgtgacgggggcaccttcggccgctactgcgagggctccgaggatgcctgtgaggagccgtgcttcccgagtgtccactgcgttcctgggaagggctgcgaggcctgccctccaaacctgactggggatgggcggcactgtgcggctctggggagctctttcctgtgtcagaaccagtcctgccctgtgaattactgctacaatcaaggccactgctacatctcccagactctgggctgtcagcccatgtgcacctgccccccagccttcactgacagccgctgcttcctggctgggaacaacttcagtccaactgtcaacctagaacttcccttaagagtcatccagctcttgctcagtgaagaggaaaatgcctccatggcagaagtcaacgcctcggtggcatacagactggggaccctggacatgcgggcctttctccgcaacagccaagtggaacgaatcgattctgcagcaccggcctcgggaagccccatccaacactggatggtcatctcggagttccagtaccgccctcggggcccggtcattgacttcctgaacaaccagctgctggccgcggtggtggaggcgttcttataccacgttccacggaggagtgaggagcccaggaacgacgtggtcttccagcccatctccggggaagacgtgcgcgatgtgacagccctgaacgtgagcacgctgaaggcttacttcagatgcgatggctacaagggctacgacctggtctacagcccccagagcggcttcacctgcgtgtccccgtgcagtaggggctactgtgaccatggaggccagtgccagcacctgcccagtgggccccgctgcagctgtgtgtccttctccatctacacggcctggggcgagcactgtgagcacctgagcatgaaactcgacgcgttcttcggcatcttctttggggccctgggcggcctcttgctgctgggggtcgggacgttcgtggtcctgcgcttctggggttgctccggggccaggttctcctatttcctgaactcagctgaggccttgccttgaaggggcagctgtggcctaggctacctcaagactcacctcatccttaccgcacatttaaggcgccattgcttttgggagactggaaaagggaaggtgactgaaggctgtcaggattcttcaaggagaatgaatactgggaatcaagacaagactataccttatccataggcgcaggtgcacagggggaggccataaagatcaaacatgcatggatgggtcctcacgcagacacacccacagaaggacactagcctgtgcacgcgcgcgtgcacacacacacacacacacacgagttcataatgtggtgatggccctaagttaagcaaaatgcttctgcacacaaaactctctggtttacttcaaattaactctatttaaataaagtctctctgactttttgtgtctccaaaa

SEQ ID NO: 18682 - DNA, 3829 bp, Homo sapiens
  source 1..3829: mol_type = unassigned DNA
ggagcttccccagggagccagggggacttttgccgcagccatgaagggggcacgctggaggagggtcccctgggtgtccctgagctgcctgtgtctctgcctccttccgcatgtggtcccaggagtttccctcttcccctatggggcaggcgccggggacctggagttcgtcaggaggaccgtggacttcacctccccactcttcaagccggcgactggcttcccccttggctcctctctccgtgattccctctacttcacagacaatggccagatcatcttcccagagtcagactaccagattttctcctaccccaacccactcccaacaggcttcacaggccgggaccctgtggccctggtggctccgttctgggacgatgctgacttctccactggtcgggggaccacattttatcaggaatacgagacgttctatggtgaacacagcctgctagtccagcaggccgagtcttggattagaaagatgacaaacaacgggggctacaaggccaggtgggccctaaaggtcacgtgggtcaatgcccacgcctatcctgcccagtggaccctcgggagcaacacctaccaagccatcctctccacggacgggagcaggtcctatgccctgtttctctaccagagcggtgggatgcagtgggacgtggcccagcgctcaggcaacccggtgctcatgggcttctctagtggagatggctatttcgaaaacagcccactgatgtcccagccagtgtgggagaggtatcgccctgatagattcctgaattccaactcaggcctccaagggctgcagttctacaggctacaccgggaagaaaggcccaactaccgtctcgagtgcctgcagtggctgaagagccagcctcggtggcccagctggggctggaaccaggtctcctgcccttgttcctggcagcagggacgacgggacttacgattccaacccgtcagcataggtcgctggggcctcggcagtaggcagctgtgcagcttcacctcttggcgaggaggcgtgtgctgcagctacgggccctggggagagtttcgtgaaggctggcacgtgcagcgtccttggcagttggcccaggaactggagccacagagctggtgctgccgctggaatgacaagccctacctctgtgccctgtaccagcagaggcggccccacgtgggctgtgctacatacaggcccccacagcccgcctggatgttcggggacccccacatcaccaccttggatggtgtcagttacaccttcaatgggctgggggacttcctgctggtcggggcccaagacgggaactcctccttcctgcttcagggccgcaccgcccagactggctcagcccaggccaccaacttcatcgcctttgcggctcagtaccgctccagcagcctgggccccgtcacggtccaatggctccttgagcctcacgacgcaatccgtgtcctgctggataaccagactgtgacatttcagcctgaccatgaagacggcggaggccaggagacgttcaacgccaccggagtcctcctgagccgcaacggctctgaggtctcggccagcttcgacggctgggccaccgtctcggtgatcgcgctctccaacatcctccacgcctccgccagcctcccgcccgagtaccagaaccgcacggaggggctcctgggggtctggaataacaatccagaggacgacttcaggatgcccaatggctccaccattcccccagggagccctgaggagatgcttttccactttggaatgacctggcagatcaacgggacaggcctccttggcaagaggaatgaccagctgccttccaacttcacccctgttttctactcacaactgcaaaaaaacagctcctgggctgaacatttgatctccaactgtgacggagatagctcatgcatctatgacaccctggccctgcgcaacgcaagcatcggacttcacacgagggaagtcagtaaaaactacgagcaggcgaacgccaccctcaatcagtacccgccctccatcaatggtggtcgtgtgattgaagcctacaaggggcagaccacgctgattcagtacaccagcaatgctgaggatgccaacttcacgctcagagacagctgcaccgacttggagctctttgagaatgggacgttgctgtggacacccaagtcgctggagccattcactctggagattctagcaagaagtgccaagattggcttggcatctgcactccagcccaggactgtggtctgccattgcaatgcagagagccagtgtttgtacaatcagaccagcagggtgggcaactcctccctggaggtggctggctgcaagtgtgacgggggcaccttcggccgctactgcgagggctccgaggatgcctgtgaggagccgtgcttcccgagtgtccactgcgttcctgggaagggctgcgaggcctgccctccaaacctgactggggatgggcggcactgtgcggctctggggagctctttcctgtgtcagaaccagtcctgccctgtgaattactgctacaatcaaggccactgctacatctcccagactctgggctgtcagcccatgtgcacctgccccccagccttcactgacagccgctgcttcctggctgggaacaacttcagtccaactgtcaacctagaacttcccttaagagtcatccagctcttgctcagtgaagaggaaaatgcctccatggcagaagtcaacgcctcggtggcatacagactggggaccctggacatgcgggcctttctccgcaacagccaagtggaacgaatcgattctgcagcaccggcctcgggaagccccatccaacactggatggtcatctcggagttccagtaccgccctcggggcccggtcattgacttcctgaacaaccagctgctggccgcggtggtggaggcgttcttataccacgttccacggaggagtgaggagcccaggaacgacgtggtcttccagcccatctccggggaagacgtgcgcgatgtgacagccctgaacgtgagcacgctgaaggcttacttcagatgcgatggctacaagggctacgacctggtctacagcccccagagcggcttcacctgcgtgtccccgtgcagtaggggctactgtgaccatggaggccagtgccagcacctgcccagtgggccccgctgcagctgtgtgtccttctccatctacacggcctggggcgagcactgtgagcacctgagcatgaaactcgacgcgttcttcggcatcttctttggggccctgggcggcctcttgctgctgggggtcgggacgttcgtggtcctgcgcttctggggttgctccggggccaggttctcctatttcctgaactcagctgaggccttgccttgaaggggcagctgtggcctaggctacctcaagactcacctcatccttaccgcacatttaaggcgccattgcttttgggagactggaaaagggaaggtgactgaaggctgtcaggattcttcaaggagaatgaatactgggaatcaagacaagactataccttatccataggcgcaggtgcacagggggaggccataaagatcaaacatgcatggatgggtcctcacgcagacacacccacagaaggacactagcctgtgcacgcgcgcgtgcacacacacacacacacacacgagttcataatgtggtgatggccctaagttaagcaaaatgcttctgcacacaaaactctctggtttacttcaaattaactctatttaaataaagtctctctgactttttgtgtctccaaaa

SEQ ID NO: 18683 - DNA, 5857 bp, Homo sapiens
  source 1..5857: mol_type = unassigned DNA
ccaggaaccacagaggacacattaataactggaagtaaaactgctgccccagtcacctcaacaggctcaacaacagcgacactagagggacaatcaactgcagcttcttcaaggacctctaatcaggacatatcagcttcatctcagaaccaccagactaagagcacggagaccaccagcaaagctcaaaccgacaccctcacgcagatgatgacatcaactcttttttcttccccaagtgtacacaatgtgatggagacagctcctccagatgaaatgaccacatcatttccctccagtgtcaccaacacactcatgatgacatcaaagactataacaatgacaacctccacagactccactcttggaaacacagaagagacatcaacagcaggaactgaaagttctaccccagtgacctcagcagtctcaataacagctggacaggaaggacaatcacgaacaacttcctggaggacctctatccaagacacatcagcttcttctcagaaccactggactcggagcacgcagaccaccagggaatctcaaaccagcaccctaacacacagaaccacttcaactccttctttctctccaagtgtacacaatgtgacagggactgtttctcagaagacatctccttcaggtgaaacagctacctcatccctctgtagtgtcacaaacacatccatgatgacatcagagaagataacagtgacaacctccacaggctccactcttggaaacccaggggagacatcatcagtacctgttactggaagtcttatgccagtcacctcagcagccttagtaacatttgatccagaaggacaatcaccagcaactttctcaaggacttctactcaggacacaacagctttttctaagaaccaccagactcagagcgtggagaccaccagagtatctcaaatcaacaccctcaacaccctcacaccggttacaacatcaactgttttatcctcaccaagtggattcaacccaagtggaacagtttctcaggagacattcccttctggtgaaacaaccacctcatccccttccagtgtcagcaatacattcctggtaacatcaaaggtgttcagaatgccaacctccagagactctactcttggaaacacagaggagacatcactatctgtaagtggaaccatttctgcaatcacttccaaagtttcaaccatatggtggtcagacactctgtcaacagcactctcccccagttctctacctccaaaaatatccacagctttccacacccagcagagtgaaggtgcagagaccacaggacggcctcatgagaggagctcattctctccaggtgtgtctcaagaaatatttactctacatgaaacaacaacatggccttcctcattctccagcaaaggccacacaacttggtcacaaacagaactgccctcaacatcaacaggtgctgccactaggcttgtcacaggaaatccatctacagggacagctggcactattccaagggtcccctctaaggtctcagcaataggggaaccaggagagcccaccacatactcctcccacagcacaactctcccaaaaacaacaggggcaggcgcccagacacaatggacacaagaaacggggaccactggagaggctcttctcagcagcccaagctacagtgtgactcagatgataaaaacggccacatccccatcttcttcacctatgctggatagacacacatcccaacaaattacaacggcaccatcaacaaatcattcaacaatacattccacaagcacctctcctcaggaatcaccagctgtttcccaaaggggtcacactcaagccccgcagaccacacaagaatcacaaaccacgaggtccgtctcccccatgactgacaccaagacagtcaccaccccaggttcttccttcacagccagtgggcactcgccctcagaaattgttcctcaggacgcacccaccataagtgcagcaacaacctttgccccagctcccaccggggatggtcacacaacccaggccccgaccacagcactgcaggcagcacccagcagccatgatgccaccctggggccctcaggaggcacgtcactttccaaaacaggtgcccttactctggccaactctgtagtgtcaacaccagggggcccagaaggacaatggacatcagcctctgccagcacctcacctgacacagcagcagccatgacccatacccaccaggctgagagcacagaggcctctggacaaacacagaccagcgaaccggcctcctcagggtcacgaaccacctcagcgggcacagctaccccttcctcatccggggcgagtggcacaacaccttcaggaagcgaaggaatatccacctcaggagagacgacaaggttttcatcaaacccctccagggacagtcacacaacccagtcaacaaccgaattgctgtccgcctcagccagtcatggtgccatcccagtaagcacaggaatggcgtcttcgatcgtccccggcacctttcatcccaccctctctgaggcctccactgcagggagaccgacaggacagtcaagcccaacttctcccagtgcctctcctcaggagacagccgccatttcccggatggcccagactcagaggacaagaaccagcagagggtctgacactatcagcctggcgtcccaggcaaccgacaccttctcaacagtcccacccacacctccatcgatcacatccactgggcttacatctccacaaaccgagacccacactctgtcaccttcagggtctggtaaaaccttcaccacggccctcatcagcaacgccacccctcttcctgtcacctacgcttcctcggcatccacaggtcacgccacccctcttgctgtcagcagtgctacctcagcttccacagtatcctcggactcccctctgaagatggaaacaccaggaatgacaacaccgtcactgaagacagacggtgggagacgcacagccacatcaccaccccccacaacctcccagaccatcatttccaccattcccagcactgccatgcacacccgctccacagctgcccccatccccatcctgcctgagagaggagtttccctcttcccctatggggcaggcgccggggacctggagttcgtcaggaggaccgtggacttcacctccccactcttcaagccggcgactggcttcccccttggctcctctctccgtgattccctctacttcacagacaatggccagatcatcttcccagagtcagactaccagattttctcctaccccaacccactcccaacaggcttcacaggccgggaccctgtggccctggtggctccgttctgggacgatgctgacttctccactggtcgggggaccacattttatcaggaatacgagacgttctatggtgaacacagcctgctagtccagcaggccgagtcttggattagaaagatgacaaacaacgggggctacaaggccaggtgggccctaaaggtcacgtgggtcaatgcccacgcctatcctgcccagtggaccctcgggagcaacacctaccaagccatcctctccacggacgggagcaggtcctatgccctgtttctctaccagagcggtgggatgcagtgggacgtggcccagcgctcaggcaacccggtgctcatgggcttctctagtggagatggctatttcgaaaacagcccactgatgtcccagccagtgtgggagaggtatcgccctgatagattcctgaattccaactcaggcctccaagggctgcagttctacaggctacaccgggaagaaaggcccaactaccgtctcgagtgcctgcagtggctgaagagccagcctcggtggcccagctggggctggaaccaggtctcctgcccttgttcctggcagcagggacgacgggacttacgattccaacccgccagcctcccgcccgagtaccagaaccgcacggaggggctcctgggggtctggaataacaatccagaggacgacttcaggatgcccaatggctccaccattcccccagggagccctgaggagatgcttttccactttggaatgacctggcagatcaacgggacaggcctccttggcaagaggaatgaccagctgccttccaacttcacccctgttttctactcacaactgcaaaaaaacagctcctgggctgaacatttgatctccaactgtgacggagatagctcatgcatctatgacaccctggccctgcgcaacgcaagcatcggacttcacacgagggaagtcagtaaaaactacgagcaggcgaacgccaccctcaatcagtacccgccctccatcaatggtggtcgtgtgattgaagcctacaaggggcagaccacgctgattcagtacaccagcaatgctgaggatgccaacttcacgctcagagacagctgcaccgacttggagctctttgagaatgggacgttgctgtggacacccaagtcgctggagccattcactctggagattctagcaagaagtgccaagattggcttggcatctgcactccagcccaggactgtggtctgccattgcaatgcagagagccagtgtttgtacaatcagaccagcagggtgggcaactcctccctggaggtggctggctgcaagtgtgacgggggcaccttcggccgctactgcgagggctccgaggatgcctgtgaggagccgtgcttcccgagtgtccactgcgttcctgggaagggctgcgaggcctgccctccaaacctgactggggatgggcggcactgtgcggctctggggagctctttcctgtgtcagaaccagtcctgccctgtgaattactgctacaatcaaggccactgctacatctcccagactctgggctgtcagcccatgtgcacctgccccccagccttcactgacagccgctgcttcctggctgggaacaacttcagtccaactgtcaacctagaacttcccttaagagtcatccagctcttgctcagtgaagaggaaaatgcctccatggcagaagtcaacgcctcggtggcatacagactggggaccctggacatgcgggcctttctccgcaacagccaagtggaacgaatcgattctgcagcaccggcctcgggaagccccatccaacactggatggtcatctcggagttccagtaccgccctcggggcccggtcattgacttcctgaacaaccagctgctggccgcggtggtggaggcgttcttataccacgttccacggaggagtgaggagcccaggaacgacgtggtcttccagcccatctccggggaagacgtgcgcgatgtgacagccctgaacgtgagcacgctgaaggcttacttcagatgcgatggctacaagggctacgacctggtctacagcccccagagcggcttcacctgcgtgtccccgtgcagtaggggctactgtgaccatggaggccagtgccagcacctgcccagtgggccccgctgcagctgtgtgtccttctccatctacacggcctggggcgagcactgtgagcacctgagcatgaaactcgacgcgttcttcggcatcttctttggggccctgggcggcctcttgctgctgggggtcgggacgttcgtggtcctgcgcttctggggttgctccggggccaggttctcctatttcctgaactcagctgaggccttgccttgaaggggcagctgtggcctaggctacctcaagactcacctcatccttaccgcacatttaaggcgccattgcttttgggagactggaaaagggaaggtgactgaaggctgtcaggattctt

SEQ ID NO: 18684 - DNA, 17110 bp, Homo sapiens
  source 1..17110: mol_type = unassigned DNA
tacagccccaaggtcgctccctctggggccctttcttccccattcttcccagcagcccaaagctctggtgggacaggggcagcccctggggagggaggagaggacccaggaacccggctaggagggtggcccacccatttccagtgtgacctgttcccattcccccatgtctcctcccatccctcccgccactcagctcaggctgatgagaagcagagcaacgggtgtatcggtgttttctttcctggtggggtagtggggtggggctgaggagagaaaagggtgattagcgtggggccccgccctcttttgtcctcttcccaggttccctggccccttcggagaaacgcacttggttcgggccagccgcctgaggggacgggctcacgtctgctcctcacactgcagctgctgggccgtggagcttccccagggagccagggggacttttgccgcagccatgaagggggcacgctggaggagggtcccctgggtgtccctgagctgcctgtgtctctgcctccttccgcatgtggtcccaggaaccacagaggacacattaataactggaagtaaaactgctgccccagtcacctcaacaggctcaacaacagcgacactagagggacaatcaactgcagcttcttcaaggacctctaatcaggacatatcagcttcatctcagaaccaccagactaagagcacggagaccaccagcaaagctcaaaccgacaccctcacgcagatgatgacatcaactcttttttcttccccaagtgtacacaatgtgatggagacagctcctccagatgaaatgaccacatcatttccctccagtgtcaccaacacactcatgatgacatcaaagactataacaatgacaacctccacagactccactcttggaaacacagaagagacatcaacagcaggaactgaaagttctaccccagtgacctcagcagtctcaataacagctggacaggaaggacaatcacgaacaacttcctggaggacctctatccaagacacatcagcttcttctcagaaccactggactcggagcacgcagaccaccagggaatctcaaaccagcaccctaacacacagaaccacttcaactccttctttctctccaagtgtacacaatgtgacagggactgtttctcagaagacatctccttcaggtgaaacagctacctcatccctctgtagtgtcacaaacacatccatgatgacatcagagaagataacagtgacaacctccacaggctccactcttggaaacccaggggagacatcatcagtacctgttactggaagtcttatgccagtcacctcagcagccttagtaacatttgatccagaaggacaatcaccagcaactttctcaaggacttctactcaggacacaacagctttttctaagaaccaccagactcagagcgtggagaccaccagagtatctcaaatcaacaccctcaacaccctcacaccggttacaacatcaactgttttatcctcaccaagtggattcaacccaagtggaacagtttctcaggagacattcccttctggtgaaacaaccacctcatccccttccagtgtcagcaatacattcctggtaacatcaaaggtgttcagaatgccaacctccagagactctactcttggaaacacagaggagacatcactatctgtaagtggaaccatttctgcaatcacttccaaagtttcaaccatatggtggtcagacactctgtcaacagcactctcccccagttctctacctccaaaaatatccacagctttccacacccagcagagtgaaggtgcagagaccacaggacggcctcatgagaggagctcattctctccaggtgtgtctcaagaaatatttactctacatgaaacaacaacatggccttcctcattctccagcaaaggccacacaacttggtcacaaacagaactgccctcaacatcaacaggtgctgccactaggcttgtcacaggaaatccatctacagggacagctggcactattccaagggtcccctctaaggtctcagcaataggggaaccaggagagcccaccacatactcctcccacagcacaactctcccaaaaacaacaggggcaggcgcccagacacaatggacacaagaaacggggaccactggagaggctcttctcagcagcccaagctacagtgtgactcagatgataaaaacggccacatccccatcttcttcacctatgctggatagacacacatcccaacaaattacaacggcaccatcaacaaatcattcaacaatacattccacaagcacctctcctcaggaatcaccagctgtttcccaaaggggtcacactcaagccccgcagaccacacaagaatcacaaaccacgaggtccgtctcccccatgactgacaccaagacagtcaccaccccaggttcttccttcacagccagtgggcactcgccctcagaaattgttcctcaggacgcacccaccataagtgcagcaacaacctttgccccagctcccaccggggatggtcacacaacccaggccccgaccacagcactgcaggcagcacccagcagccatgatgccaccctggggccctcaggaggcacgtcactttccaaaacaggtgcccttactctggccaactctgtagtgtcaacaccagggggcccagaaggacaatggacatcagcctctgccagcacctcacctgacacagcagcagccatgacccatacccaccaggctgagagcacagaggcctctggacaaacacagaccagcgaaccggcctcctcagggtcacgaaccacctcagcgggcacagctaccccttcctcatccggggcgagtggcacaacaccttcaggaagcgaaggaatatccacctcaggagagacgacaaggttttcatcaaacccctccagggacagtcacacaacccagtcaacaaccgaattgctgtccgcctcagccagtcatggtgccatcccagtaagcacaggaatggcgtcttcgatcgtccccggcacctttcatcccaccctctctgaggcctccactgcagggagaccgacaggacagtcaagcccaacttctcccagtgcctctcctcaggagacagccgccatttcccggatggcccagactcagaggacaagaaccagcagagggtctgacactatcagcctggcgtcccaggcaaccgacaccttctcaacagtcccacccacacctccatcgatcacatccactgggcttacatctccacaaaccgagacccacactctgtcaccttcagggtctggtaaaaccttcaccacggccctcatcagcaacgccacccctcttcctgtcacctacgcttcctcggcatccacaggtcacaccacccctcttcatgtcaccgatgcttcctcagtatccacaggtcacgccacccctcttcctgtcaccagcccttcctcagtatccacaggtcacaccacccctcttcctgtcaccgacacttcctcagaatccacaggtcacgtcacccctcttcctgtcaccagcttttcctcagcatccacaggtgacagcacccctcttcctgtcactgacacttcctcagcatccacaggtcacgtcacccctcttcctgtcaccagcctttcctcagcatccacaggtgacaccacccctcttcctgtcactgacacttcctcagcatccacaggtcacgccacctctcttcctgtcaccgacacttcctcagtatccacaggtcacaccacccctcttcctgtcaccgacacttcctcagcatccacaggtcacgccacctctcttcctgtcaccgacacttcctcagtatccacaggtcacaccacccctcttcatgtcactgatgcttcctcagcatccacaggtcaggccacccctcttcctgtcaccagcctttcctcagtatccacaggtgacaccacgcctcttcctgtcactagcccttcctcagcatccacaggtcacgccacccctcttcttgtcaccgacacttcctcagcatccacaggacacgccacccctcttcctgtcaccgacgcttcctcagtgtccacagatcacgccacctctcttcctgtaaccatcccttccgcagcatccacaggtcacaccacccctcttcctgtcaccgacacttcctcagcatccacaggtcaggccacctctcttcttgtcaccgacacttcctcagtatccacaggtgacaccacgcctcttcctgtcactagcacttcctcagcatccacaggtcacgtcactcctcttcatgtcaccagcccttcctcagcatccacaggtcacgccacccctcttcctgtcaccagcctttcctcagcatccacaggtgacaccatgcctcttcctgtcactagcccttcctcagcatccacaggtgacaccacccctcttcctgtcaccgacgcttcctcagtatccacaggtcacaccacccctcttcatgtcactgatgcttcctcagcatccacaggtcaggccacccctcttcctgtcaccagcctttcctcagtatccacaggtgacaccacgcctcttcctgtcactagcccttcctcagcatccacaggtcacgccacccctcttcttgtcaccgacacttcctcagcatccacaggacacgccacccctcttcctgtcaccgacgcttcctcagtgtccacagatcacgccacctctcttcctgtaaccatcccttccgcagcatccacaggtcacaccacccctcttcctgtcaccgacacttcctcagcatccacaggtcaggccacctctcttcttgtcaccgacacttcctcagtatccacaggtgacaccacgcctcttcctgtcactagcacttcctcagcatccacaggtcacgtcactcctcttcatgtcaccagcccttcctcagcatccacaggtcacgccacccctcttcctgtcaccagcctttcctcagcatccacaggtgacaccatgcctcttcctgtcactagcccttcctcagcatccacaggtgacaccacccctcttcctgtcaccgacgcttcctcagtatccacaggtcacaccacccctcttcctgtcaccagcccttcctcagcatctacaggtcacaccacccctcttcctgtcaccgacacttcctcagcatccaaaggtgacaccacccctcttcctgtcaccagcccttcctcagcatctacaggtcacaccacccctcttcctgtcaccgacacttcctcagcatccacaggtgacaccacccctcttcctgtcaccaatgcttcctcattatccacaggtcacgccacccctcttcatgtcaccagcccttcctcagcatccacaggtcacgccacccctcttcctgtcaccagcacttcctcagcatccaccggtcacgccacccctcttcctgtcaccggcctttcctcagctaccacagatgacaccacccgtcttcctgtcaccgacgtttcctcggcatccacaggtcaggccacccctcttcctgtcaccagcctttcctcagtatccacaggtgacaccacgcctcttcctgtcactagcccttcctcagcatccacaggtcacgccagccctcttcttgtcactgacgcttcctcagcatccacaggtcaggccacccctcttcctgtcaccgacacttcctcagtatccacagctcacgccaccccacttcctgtcaccggcctttcttcagcttccacagatgacaccacccgtcttcctgtcaccgacgtttcctcggcatccacaggtcaggccatccctcttcctgtcaccagcccttcctcagcatccacaggtgacaccacccctcttcctgtcaccgacgcttcctcagcatccacaggtgacaccacctctcttcctgtcaccatcccttcctcagcatcttcaggtcacaccacctctcttcctgtcaccgacgcttcctcagtgtccacaggtcacgccacctctcttcttgtcaccgacgcttcctcagtatccacaggtgacaccacccctcttcctgtcaccgacactaactcagcatccacaggtgacaccacccctcttcatgtcaccgacgcttcctcagtatccacaggtcacgccacctctcttcctgtcaccagcctttcctcagcatccacaggtgacaccacgcctcttcctgtcactagcccttcctcagcatcctcaggtcacaccacccctcttcctgtcaccgacgcttcctcagtacccacaggtcacgccacctctcttcctgtcaccgacgcttcctcagtgtccacaggtcacgccacccctcttcctgtcaccgacgcttcctcagtgtccacaggtcatgccacccctcttccggtcaccgacacttcctcagtatctacaggacaggccacccctcttcctgtcaccagcctttcctcagcatccactggtgacaccacgccgcttcctgtcaccgatacttcctcagcatccacaggtcaggacacccctcttcctgtcaccagcctttcctcagtatccacaggtgacaccacgcctcttcctgtcactaacccttcctcagcatccacaggtcacgccacccctcttcttgtcaccgacgcttcctcaatatccacaggtcacgccacctctcttcttgtcaccgacgcttcctcagtatccacaggtcacgccaccgctcttcatgacaccgatgcttcctcattatccacaggggacaccacccctcttcctgtcaccagcccttcctcaacatccacaggtgacaccacccctcttcctgtcaccgaaacttcctcagtatccacaggtcacgccacctctcttcctgtcaccgacacttcctcagcatccacaggtcacgccacctctcttcctgtcaccgacacttcctcagcatccacaggtcacgccacccctcttcctgtcaccgacacttcctcagcatccacaggtcaggccacccctcttcctgtcaccagcccttcctcagcatccacaggtcacgccatccctcttcttgtcaccgacacttcctcagcatccacaggacaggccacccctcttcctgtcaccagcctttcctcagcatccacaggtgacaccacccctcttcctgtcaccgacgcttcctcagtgtccacaggtcacgccacctctcttcctgtcaccagcctttcctcagtatccacaggtgacaccactcctcttcctgtcactagcccttcctcagcatccacaggtcacgccacccctcttcatgtcaccgacgcttcctcagcatccacaggtcacgccacccctcttcctgtcaccagcctttcctcagcatccacaggtgacaccacgcctcttcctgtcactagcccttcctcagcatccacaggtcacgccacccctcttcatgtcaccgacgcttcctcagtatccacaggtgacaccacccctcttcctgtcaccagctcttcctcagcatcctcaggtcacaccacccctcttcctgtcaccgacgcttcctcagcatccacaggtgacaccacccctcttcctgtcaccgacacttcctcagcatccacaggtcacgccacccatcttcctgtcaccggcctttcctcagcttccacaggtgacaccacccgtcttcctgtcaccaacgtttcctcggcatccacaggtcatgccacccctcttcctgtcaccagcacttcctcagcatccacaggtgacaccacccctcttcctggcaccgacacttcctcagtatccacaggtcacaccacccctcttcttgtcaccgacgcttcgtcagtatccacaggtgacaccacccgtcttcctgtcaccagcccttcctcagcatctacaggtcacaccacccctctacctgtcaccgacactccctcagcatccacaggtgacaccacccctcttcctgtcaccaatgcttcctcattatccacacgtcacgccacctctcttcatgtcaccagcccttcctcagcatccacaggtcacgccacctctcttcctgtcaccgacacttccgcagcatccacaggtcacgccacccctcttcctgtcaccagcacttcctcagcatccacaggtgacaccacccctcttcctgtcaccgacacttactcagcatccacaggtcaggccacccctcttcctgtcaccagcctttcctcagtatccacaggtgacaccacgcctcttcctgtcactagcccttcctcagcatccacaggtcacgccactcctcttcttgtcaccgacgcttcctcagcatccacaggtcaggccacccctcttcctgtcaccagcctttcctcagtatccacaggtgacaccacgcctcttcctgtcactagcccttcctcagcatccaccggtcatgccacctctcttcctgtcaccgacacttcctcagcatccacaggtgacaccacctctcttcctgtcaccgacacttcctcagcatacacaggtgacaccacctctcttcctgtcaccgacacttcctcatcatccacaggtgacaccacccctcttcttgtcaccgagacttcctcagtatccacaggtgacaccacccctcttcctgtcaccgacacttcctcagcatccacaggtcacgccacccctcttcctgtcaccaacacttcctcagtatccacaggtcacgccacccctcttcatgtcaccagcccttcctcagcatccacaggtcacaccacccctcttcctgtcaccgacgcttcgtcagtgtccacaggtcacgccacctctcttcctgtcaccgacgcttcctcagtgttcacaggtcatgccacctctcttcctgtcaccatcccttcctcagcatcctcaggtcacaccacccctcttcctgtcaccgacgcttcctcagtgtccacaggtcacgccacctctcttcctgtcaccgacgcttcctcagtgtccacaggtcatgccacccctcttcctgtcaccgacgcttcctcagtgtccacaggtcacgctacccctcttcctctcaccagcctttcctcagtatccacaggtgacaccacgcctcttcctgtcaccgacacttcctcagcatccacaggtcaggccacccctcttcctgtcaccagcctttcctcagtatccacaggtgacaccacccctcttcctgtcaccgacacttcctcagcatccacaggtcacgccacctctcttcctgtcaccgacacttcctcagcatccacaggtcacgccacccctcttcctgacaccgacacttcctcagcatccacaggtcacgccacccttcttcctgtcaccgacacttcctcagcatccataggtcacgccacctctcttcctgtcaccgacacttcctcaatatccacaggtcacgccacccctcttcatgtcaccagcccttcctcagcatccaccggtcacgccaccccgcttcctgtcaccgacacttcctcagcatccacaggtcacgccaaccctcttcatgtcaccagcccttcctcagcatccaccggtcacgccaccccgcttcctgtcaccgacacttcctcagcatccacaggtcacgccacccctcttcctgtcaccagcctttcctcagtatccacaggtgacaccacgcctcttcctgtcactagcccttcctcagcatccacaggtcacaccacccctcttcctgtcaccgacacttcctcagcatccacaggtcaggccaccgctcttcctgtcaccagcacttcctcagcatccacaggtgacaccacccctcttcctgtcaccgacacttcctcagcatccacaggtcaggccacccctcttcctgtcaccagcctttcctcagtatccacaggtgacaccacgcctcttcctgtcactagcccttcctcagcatccacaggtcacgccactcctcttcttgtcaccgacgcttcctcagcatccacaggtcaggccacccctcttcctgtcaccagcctttcctcagtatccacaggtgacaccacgcctcttcctgtcactagcccttcctcagcatccaccggtcatgccacctctcttcctgtcaccgacacttcctcagcatccacaggtgacaccacctctcttcctgtcaccgacacttcctcagcatacacaggtgacaccacctctcttcctgtcaccgacacttcctcatcatccacaggtgacaccacccctcttcttgtcaccgagacttcctcagtatccacaggtcacgccactcctcttcttgtcaccgacgcttcctcagcatccacaggtcacgccacccctcttcatgtcaccagcccttcctcagcatccacaggtgacaccacccctgtgcctgtcaccgacacttcctcagtatccacaggtcacgccacccctcttcctgtcaccggcctttcctcagcttccacaggtgacaccacccgtcttcctgtcaccgacatttcctcggcatccacaggtcaggccacccctcttcctgtcaccaacacttcctcagtatccacaggtgacaccatgcctcttcctgtcactagcccttcctcagcatccacaggtcacgccacccctcttcctgtcaccagcacttcctcagcatccaccggtcacgccacccctgttcctgtcaccagcacttcctcagcatctacaggtcacaccacccctcttcctgtcaccgacacttcctcagcatccacaggtgacaccacccctcttcctgtcaccagcccttcctcagcatctacaggtcacaccacccctcttcatgtcaccatcccttcctcagcatccacaggtgacaccagcactcttcctgtcaccggcgcttcctcagcatccaccggtcacgccacccctcttcctgtcaccgacacttcctcagtatccaccggtcacgccacgcctcttcctgtcaccagcctttcctcagtatccacaggtgacaccacccctcttcctgtcaccgacgcttcctcggcatccacaggtcaggccacccctcttcctgtcaccagcctttcctcagtatccacaggtgacaccacccctcttcttgtcaccgacgcttcctcagtatccacaggtcacgccacccctcttcctgtcaccgacacttcctcagcatccacaggtgacaccacccgtcttcctgtcacggacacttcctcagcatccacaggtcaggccacccctcttcctgtcaccagcctttcctcagtatccacaggtgacaccacccctcttcttgtcaccgacgcttcctcagtatccacaggtcacgccacccctcttcctgtcaccgacacttcctcagcatccacaggtgacaccacccgtcttcctgtcacggacacttcctcagcatccacaggtcaggccacccctcttcctgtcaccatcccttcctcatcatcctcaggtcacaccacccctcttcctgtcaccagcacttcctcagtatctacaggtcacgtcacccctcttcatgtcaccagcccttcctcagcatccacaggtcacgtcacccctcttcctgtcaccagcacttcctcagcatccacaggtcacgccacccctcttcttgtcaccgacgcttcctcagtgtccacaggtcacgccacgcctcttcctgtcaccgacgcttcctcagcatccacaggtgacaccacccctcttcctgtcaccgacacttcctcagcatccacaggtcaggccacccctcttcctgtcaccagcctttcctcagtatccacaggtgacaccacccctcttcctgtcaccgacgcttcctcagcatccacaggtcacgccacccctcttcctgtcaccatcccttcctcagtatccacaggtgacaccatgcctcttcctgtcactagcccttcctcagcatccacaggtcacgccacccctcttcctgttaccggcctttcctcagcttccacaggtgacaccacccctcttcctgtcaccgacacttcctcagcatccacacgtcacgccacccctcttcctgtcaccgacacttcctcagcttccacagatgacaccacccgtcttcctgtcaccgacgtttcctcggcatccacaggacatgccacccctcttcctgtcaccagcacttcctcagcatccacaggtgacaccacccctcttcctgtcaccgacacttcctcagtatccacaggtcacgccacctctcttcctgtcaccagccgttcctcagcatccacaggtcacgccaccccccttcctgtcaccgacacttcctcagtatccacaggtcacgccacccctcttcctgtcaccagcacttcctcagtatctacaggtcacgccacccctcttcctgtcaccagcccttcctcagcatccacaggtcacgccacccctgttcctgtcaccagcacttcctcagcatccacaggtgacaccacccctcttcctgtcaccaatgcttcctcattatccacaggtcacgccacccctcttcatgtcaccagcccttcctcagcatccagaggtgacaccagcactcttcctgtcaccgatgcttcctcagcatccaccggtcacgccacccctcttcctctcaccagcctttcctcagtatccacaggtgacaccacgcctcttcctgtcaccgacacttcctctgcatccacaggtcaggccacccctcttcctgtcaccagcctttcctcagtatccacaggtgacaccacgcctcttcctgtcaccatcccttcctcagcatcctcaggtcacaccacctctcttcctgtcaccgacgcttcctcagtgtccacaggtcacggcacccctcttcctgtcaccagcacttcctcagcatccacaggtgacaccacccctcttcctgtcaccgacacttcctcagcatccacaggtcacgccacccctcttcctgtcaccgacacttcctcagcatccacaggtcacgccacccctcttcctgtcaccagcctttcctcagtatccacaggtcacgccacccctcttgctgtcagcagtgctacctcagcttccacagtatcctcggactcccctctgaagatggaaacaccaggaatgacaacaccgtcactgaagacagacggtgggagacgcacagccacatcaccaccccccacaacctcccagaccatcatttccaccattcccagcactgccatgcacacccgctccacagctgcccccatccccatcctgcctgagagaggagtttccctcttcccctatggggcaggcgccggggacctggagttcgtcaggaggaccgtggacttcacctccccactcttcaagccggcgactggcttcccccttggctcctctctccgtgattccctctacttcacagacaatggccagatcatcttcccagagtcagactaccagattttctcctaccccaacccactcccaacaggcttcacaggccgggaccctgtggccctggtggctccgttctgggacgatgctgacttctccactggtcgggggaccacattttatcaggaatacgagacgttctatggtgaacacagcctgctagtccagcaggccgagtcttggattagaaagatgacaaacaacgggggctacaaggccaggtgggccctaaaggtcacgtgggtcaatgcccacgcctatcctgcccagtggaccctcgggagcaacacctaccaagccatcctctccacggacgggagcaggtcctatgccctgtttctctaccagagcggtgggatgcagtgggacgtggcccagcgctcaggcaacccggtgctcatgggcttctctagtggagatggctatttcgaaaacagcccactgatgtcccagccagtgtgggagaggtatcgccctgatagattcctgaattccaactcaggcctccaagggctgcagttctacaggctacaccgggaagaaaggcccaactaccgtctcgagtgcctgcagtggctgaagagccagcctcggtggcccagctggggctggaaccaggtctcctgcccttgttcctggcagcagggacgacgggacttacgattccaacccgtcagcataggtcgctggggcctcggcagtaggcagctgtgcagcttcacctcttggcgaggaggcgtgtgctgcagctacgggccctggggagagtttcgtgaaggctggcacgtgcagcgtccttggcagttggcccaggaactggagccacagagctggtgctgccgctggaatgacaagccctacctctgtgccctgtaccagcagaggcggccccacgtgggctgtgctacatacaggcccccacagcccgcctggatgttcggggacccccacatcaccaccttggatggtgtcagttacaccttcaatgggctgggggacttcctgctggtcggggcccaagacgggaactcctccttcctgcttcagggccgcaccgcccagactggctcagcccaggccaccaacttcatcgcctttgcggctcagtaccgctccagcagcctgggccccgtcacggtccaatggctccttgagcctcacgacgcaatccgtgtcctgctggataaccagactgtgacatttcagcctgaccatgaagacggcggaggccaggagacgttcaacgccaccggagtcctcctgagccgcaacggctctgaggtctcggccagcttcgacggctgggccaccgtctcggtgatcgcgctctccaacatcctccacgcctccgccagcctcccgcccgagtaccagaaccgcacggaggggctcctgggggtctggaataacaatccagaggacgacttcaggatgcccaatggctccaccattcccccagggagccctgaggagatgcttttccactttggaatgacctggcagatcaacgggacaggcctccttggcaagaggaatgaccagctgccttccaacttcacccctgttttctactcacaactgcaaaaaaacagctcctgggctgaacatttgatctccaactgtgacggagatagctcatgcatctatgacaccctggccctgcgcaacgcaagcatcggacttcacacgagggaagtcagtaaaaactacgagcaggcgaacgccaccctcaatcagtacccgccctccatcaatggtggtcgtgtgattgaagcctacaaggggcagaccacgctgattcagtacaccagcaatgctgaggatgccaacttcacgctcagagacagctgcaccgacttggagctctttgagaatgggacgttgctgtggacacccaagtcgctggagccattcactctggagattctagcaagaagtgccaagattggcttggcatctgcactccagcccaggactgtggtctgccattgcaatgcagagagccagtgtttgtacaatcagaccagcagggtgggcaactcctccctggaggtggctggctgcaagtgtgacgggggcaccttcggccgctactgcgagggctccgaggatgcctgtgaggagccgtgcttcccgagtgtccactgcgttcctgggaagggctgcgaggcctgccctccaaacctgactggggatgggcggcactgtgcggctctggggagctctttcctgtgtcagaaccagtcctgccctgtgaattactgctacaatcaaggccactgctacatctcccagactctgggctgtcagcccatgtgcacctgccccccagccttcactgacagccgctgcttcctggctgggaacaacttcagtccaactgtcaacctagaacttcccttaagagtcatccagctcttgctcagtgaagaggaaaatgcctccatggcagaagtcaacgcctcggtggcatacagactggggaccctggacatgcgggcctttctccgcaacagccaagtggaacgaatcgattctgcagcaccggcctcgggaagccccatccaacactggatggtcatctcggagttccagtaccgccctcggggcccggtcattgacttcctgaacaaccagctgctggccgcggtggtggaggcgttcttataccacgttccacggaggagtgaggagcccaggaacgacgtggtcttccagcccatctccggggaagacgtgcgcgatgtgacagccctgaacgtgagcacgctgaaggcttacttcagatgcgatggctacaagggctacgacctggtctacagcccccagagcggcttcacctgcgtgtccccgtgcagtaggggctactgtgaccatggaggccagtgccagcacctgcccagtgggccccgctgcagctgtgtgtccttctccatctacacggcctggggcgagcactgtgagcacctgagcatgaaactcgacgcgttcttcggcatcttctttggggccctgggcggcctcttgctgctgggggtcgggacgttcgtggtcctgcgcttctggggttgctccggggccaggttctcctatttcctgaactcagctgaggccttgccttgaaggggcagctgtggcctaggctacctcaagactcacctcatccttaccgcacatttaaggcgccattgcttttgggagactggaaaagggaaggtgactgaaggctgtcaggattcttcaaggagaatgaatactgggaatcaagacaagactataccttatccataggcgcaggtgcacagggggaggccataaagatcaaacatgcatggatgggtcctcacgcagacacacccacagaaggacactagcctgtgcacgcgcgcgtgcacacacacacacacacacacgagttcataatgtggtgatggccctaagttaagcaaaatgcttctgcacacaaaactctctggtttacttcaaattaactctatttaaataaagtctctctgactttttgtgtctccaaaa

SEQ ID NO: 18685 - DNA, 16273 bp, Homo sapiens
  source 1..16273: mol_type = unassigned DNA
gtctgctcctcacactgcagctgctgggccgtggagcttccccagggagccagggggacttttgccgcagccatgaagggggcacgctggaggagggtcccctgggtgtccctgagctgcctgtgtctctgcctccttccgcatgtggtcccaggaaccacagaggacacattaataactggaagtaaaactgctgccccagtcacctcaacaggctcaacaacagcgacactagagggacaatcaactgcagcttcttcaaggacctctaatcaggacatatcagcttcatctcagaaccaccagactaagagcacggagaccaccagcaaagctcaaaccgacaccctcacgcagatgatgacatcaactcttttttcttccccaagtgtacacaatgtgatggagacagctcctccagatgaaatgaccacatcatttccctccagtgtcaccaacacactcatgatgacatcaaagactataacaatgacaacctccacagactccactcttggaaacacagaagagacatcaacagcaggaactgaaagttctaccccagtgacctcagcagtctcaataacagctggacaggaaggacaatcacgaacaacttcctggaggacctctatccaagacacatcagcttcttctcagaaccactggactcggagcacgcagaccaccagggaatctcaaaccagcaccctaacacacagaaccacttcaactccttctttctctccaagtgtacacaatgtgacagggactgtttctcagaagacatctccttcaggtgaaacagctacctcatccctctgtagtgtcacaaacacatccatgatgacatcagagaagataacagtgacaacctccacaggctccactcttggaaacccaggggagacatcatcagtacctgttactggaagtcttatgccagtcacctcagcagccttagtaacatttgatccagaaggacaatcaccagcaactttctcaaggacttctactcaggacacaacagctttttctaagaaccaccagactcagagcgtggagaccaccagagtatctcaaatcaacaccctcaacaccctcacaccggttacaacatcaactgttttatcctcaccaagtggattcaacccaagtggaacagtttctcaggagacattcccttctggtgaaacaaccacctcatccccttccagtgtcagcaatacattcctggtaacatcaaaggtgttcagaatgccaacctccagagactctactcttggaaacacagaggagacatcactatctgtaagtggaaccatttctgcaatcacttccaaagtttcaaccatatggtggtcagacactctgtcaacagcactctcccccagttctctacctccaaaaatatccacagctttccacacccagcagagtgaaggtgcagagaccacaggacggcctcatgagaggagctcattctctccaggtgtgtctcaagaaatatttactctacatgaaacaacaacatggccttcctcattctccagcaaaggccacacaacttggtcacaaacagaactgccctcaacatcaacaggtgctgccactaggcttgtcacaggaaatccatctacagggacagctggcactattccaagggtcccctctaaggtctcagcaataggggaaccaggagagcccaccacatactcctcccacagcacaactctcccaaaaacaacaggggcaggcgcccagacacaatggacacaagaaacggggaccactggagaggctcttctcagcagcccaagctacagtgtgactcagatgataaaaacggccacatccccatcttcttcacctatgctggatagacacacatcccaacaaattacaacggcaccatcaacaaatcattcaacaatacattccacaagcacctctcctcaggaatcaccagctgtttcccaaaggggtcacactcaagccccgcagaccacacaagaatcacaaaccacgaggtccgtctcccccatgactgacaccaagacagtcaccaccccaggttcttccttcacagccagtgggcactcgccctcagaaattgttcctcaggacgcacccaccataagtgcagcaacaacctttgccccagctcccaccggggatggtcacacaacccaggccccgaccacagcactgcaggcagcacccagcagccatgatgccaccctggggccctcaggaggcacgtcactttccaaaacaggtgcccttactctggccaactctgtagtgtcaacaccagggggcccagaaggacaatggacatcagcctctgccagcacctcacctgacacagcagcagccatgacccatacccaccaggctgagagcacagaggcctctggacaaacacagaccagcgaaccggcctcctcagggtcacgaaccacctcagcgggcacagctaccccttcctcatccggggcgagtggcacaacaccttcaggaagcgaaggaatatccacctcaggagagacgacaaggttttcatcaaacccctccagggacagtcacacaacccagtcaacaaccgaattgctgtccgcctcagccagtcatggtgccatcccagtaagcacaggaatggcgtcttcgatcgtccccggcacctttcatcccaccctctctgaggcctccactgcagggagaccgacaggacagtcaagcccaacttctcccagtgcctctcctcaggagacagccgccatttcccggatggcccagactcagaggacaagaaccagcagagggtctgacactatcagcctggcgtcccaggcaaccgacaccttctcaacagtcccacccacacctccatcgatcacatccactgggcttacatctccacaaaccgagacccacactctgtcaccttcagggtctggtaaaaccttcaccacggccctcatcagcaacgccacccctcttcctgtcacctacgcttcctcggcatccacaggtcacaccacccctcttcatgtcaccgatgcttcctcagtatccacaggtcacgccacccctcttcctgtcaccagcccttcctcagtatccacaggtcacaccacccctcttcctgtcaccgacacttcctcagaatccacaggtcacgtcacccctcttcctgtcaccagcttttcctcagcatccacaggtgacagcacccctcttcctgtcactgacacttcctcagcatccacaggtcacgtcacccctcttcctgtcaccagcctttcctcagcatccacaggtgacaccacccctcttcctgtcactgacacttcctcagcatccacaggtcacgccacctctcttcctgtcaccgacacttcctcagtatccacaggtcacaccacccctcttcctgtcaccgacacttcctcagcatccacaggtcacgccacctctcttcctgtcaccgacacttcctcagtatccacaggtcacaccacccctcttcatgtcactgatgcttcctcagcatccacaggtcaggccacccctcttcctgtcaccagcctttcctcagtatccacaggtgacaccacgcctcttcctgtcactagcccttcctcagcatccacaggtcacgccacccctcttcttgtcaccgacacttcctcagcatccacaggacacgccacccctcttcctgtcaccgacgcttcctcagtgtccacagatcacgccacctctcttcctgtaaccatcccttccgcagcatccacaggtcacaccacccctcttcctgtcaccgacacttcctcagcatccacaggtcaggccacctctcttcttgtcaccgacacttcctcagtatccacaggtgacaccacgcctcttcctgtcactagcacttcctcagcatccacaggtcacgtcactcctcttcatgtcaccagcccttcctcagcatccacaggtcacgccacccctcttcctgtcaccagcctttcctcagcatccacaggtgacaccatgcctcttcctgtcactagcccttcctcagcatccacaggtgacaccacccctcttcctgtcaccgacgcttcctcagtatccacaggtcacaccacccctcttcatgtcactgatgcttcctcagcatccacaggtcaggccacccctcttcctgtcaccagcctttcctcagtatccacaggtgacaccacgcctcttcctgtcactagcccttcctcagcatccacaggtcacgccacccctcttcttgtcaccgacacttcctcagcatccacaggacacgccacccctcttcctgtcaccgacgcttcctcagtgtccacagatcacgccacctctcttcctgtaaccatcccttccgcagcatccacaggtcacaccacccctcttcctgtcaccgacacttcctcagcatccacaggtcaggccacctctcttcttgtcaccgacacttcctcagtatccacaggtgacaccacgcctcttcctgtcactagcacttcctcagcatccacaggtcacgtcactcctcttcatgtcaccagcccttcctcagcatccacaggtcacgccacccctcttcctgtcaccagcctttcctcagcatccacaggtgacaccatgcctcttcctgtcactagcccttcctcagcatccacaggtgacaccacccctcttcctgtcaccgacgcttcctcagtatccacaggtcacaccacccctcttcctgtcaccagcccttcctcagcatctacaggtcacaccacccctcttcctgtcaccgacacttcctcagcatccaaaggtgacaccacccctcttcctgtcaccagcccttcctcagcatctacaggtcacaccacccctcttcctgtcaccgacacttcctcagcatccacaggtgacaccacccctcttcctgtcaccaatgcttcctcattatccacaggtcacgccacccctcttcatgtcaccagcccttcctcagcatccacaggtcacgccacccctcttcctgtcaccagcacttcctcagcatccaccggtcacgccacccctcttcctgtcaccggcctttcctcagctaccacagatgacaccacccgtcttcctgtcaccgacgtttcctcggcatccacaggtcaggccacccctcttcctgtcaccagcctttcctcagtatccacaggtgacaccacgcctcttcctgtcactagcccttcctcagcatccacaggtcacgccagccctcttcttgtcactgacgcttcctcagcatccacaggtcaggccacccctcttcctgtcaccgacacttcctcagtatccacagctcacgccaccccacttcctgtcaccggcctttcttcagcttccacagatgacaccacccgtcttcctgtcaccgacgtttcctcggcatccacaggtcaggccatccctcttcctgtcaccagcccttcctcagcatccacaggtgacaccacccctcttcctgtcaccgacgcttcctcagcatccacaggtgacaccacctctcttcctgtcaccatcccttcctcagcatcttcaggtcacaccacctctcttcctgtcaccgacgcttcctcagtgtccacaggtcacgccacctctcttcttgtcaccgacgcttcctcagtatccacaggtgacaccacccctcttcctgtcaccgacactaactcagcatccacaggtgacaccacccctcttcatgtcaccgacgcttcctcagtatccacaggtcacgccacctctcttcctgtcaccagcctttcctcagcatccacaggtgacaccacgcctcttcctgtcactagcccttcctcagcatcctcaggtcacaccacccctcttcctgtcaccgacgcttcctcagtacccacaggtcacgccacctctcttcctgtcaccgacgcttcctcagtgtccacaggtcacgccacccctcttcctgtcaccgacgcttcctcagtgtccacaggtcatgccacccctcttccggtcaccgacacttcctcagtatctacaggacaggccacccctcttcctgtcaccagcctttcctcagcatccactggtgacaccacgccgcttcctgtcaccgatacttcctcagcatccacaggtcaggacacccctcttcctgtcaccagcctttcctcagtatccacaggtgacaccacgcctcttcctgtcactaacccttcctcagcatccacaggtcacgccacccctcttcttgtcaccgacgcttcctcaatatccacaggtcacgccacctctcttcttgtcaccgacgcttcctcagtatccacaggtcacgccaccgctcttcatgacaccgatgcttcctcattatccacaggggacaccacccctcttcctgtcaccagcccttcctcaacatccacaggtgacaccacccctcttcctgtcaccgaaacttcctcagtatccacaggtcacgccacctctcttcctgtcaccgacacttcctcagcatccacaggtcacgccacctctcttcctgtcaccgacacttcctcagcatccacaggtcacgccacccctcttcctgtcaccgacacttcctcagcatccacaggtcaggccacccctcttcctgtcaccagcccttcctcagcatccacaggtcacgccatccctcttcttgtcaccgacacttcctcagcatccacaggacaggccacccctcttcctgtcaccagcctttcctcagcatccacaggtgacaccacccctcttcctgtcaccgacgcttcctcagtgtccacaggtcacgccacctctcttcctgtcaccagcctttcctcagtatccacaggtgacaccactcctcttcctgtcactagcccttcctcagcatccacaggtcacgccacccctcttcatgtcaccgacgcttcctcagcatccacaggtcacgccacccctcttcctgtcaccagcctttcctcagcatccacaggtgacaccacgcctcttcctgtcactagcccttcctcagcatccacaggtcacgccacccctcttcatgtcaccgacgcttcctcagtatccacaggtgacaccacccctcttcctgtcaccagctcttcctcagcatcctcaggtcacaccacccctcttcctgtcaccgacgcttcctcagcatccacaggtgacaccacccctcttcctgtcaccgacacttcctcagcatccacaggtcacgccacccatcttcctgtcaccggcctttcctcagcttccacaggtgacaccacccgtcttcctgtcaccaacgtttcctcggcatccacaggtcatgccacccctcttcctgtcaccagcacttcctcagcatccacaggtgacaccacccctcttcctggcaccgacacttcctcagtatccacaggtcacaccacccctcttcttgtcaccgacgcttcgtcagtatccacaggtgacaccacccgtcttcctgtcaccagcccttcctcagcatctacaggtcacaccacccctctacctgtcaccgacactccctcagcatccacaggtgacaccacccctcttcctgtcaccaatgcttcctcattatccacacgtcacgccacctctcttcatgtcaccagcccttcctcagcatccacaggtcacgccacctctcttcctgtcaccgacacttccgcagcatccacaggtcacgccacccctcttcctgtcaccagcacttcctcagcatccacaggtgacaccacccctcttcctgtcaccgacacttactcagcatccacaggtcaggccacccctcttcctgtcaccagcctttcctcagtatccacaggtgacaccacgcctcttcctgtcactagcccttcctcagcatccacaggtcacgccactcctcttcttgtcaccgacgcttcctcagcatccacaggtcaggccacccctcttcctgtcaccagcctttcctcagtatccacaggtgacaccacgcctcttcctgtcactagcccttcctcagcatccaccggtcatgccacctctcttcctgtcaccgacacttcctcagcatccacaggtgacaccacctctcttcctgtcaccgacacttcctcagcatacacaggtgacaccacctctcttcctgtcaccgacacttcctcatcatccacaggtgacaccacccctcttcttgtcaccgagacttcctcagtatccacaggtgacaccacccctcttcctgtcaccgacacttcctcagcatccacaggtcacgccacccctcttcctgtcaccaacacttcctcagtatccacaggtcacgccacccctcttcatgtcaccagcccttcctcagcatccacaggtcacaccacccctcttcctgtcaccgacgcttcgtcagtgtccacaggtcacgccacctctcttcctgtcaccgacgcttcctcagtgttcacaggtcatgccacctctcttcctgtcaccatcccttcctcagcatcctcaggtcacaccacccctcttcctgtcaccgacgcttcctcagtgtccacaggtcacgccacctctcttcctgtcaccgacgcttcctcagtgtccacaggtcatgccacccctcttcctgtcaccgacgcttcctcagtgtccacaggtcacgctacccctcttcctctcaccagcctttcctcagtatccacaggtgacaccacgcctcttcctgtcaccgacacttcctcagcatccacaggtcaggccacccctcttcctgtcaccagcctttcctcagtatccacaggtgacaccacccctcttcctgtcaccgacacttcctcagcatccacaggtcacgccacctctcttcctgtcaccgacacttcctcagcatccacaggtcacgccacccctcttcctgacaccgacacttcctcagcatccacaggtcacgccacccttcttcctgtcaccgacacttcctcagcatccataggtcacgccacctctcttcctgtcaccgacacttcctcaatatccacaggtcacgccacccctcttcatgtcaccagcccttcctcagcatccaccggtcacgccaccccgcttcctgtcaccgacacttcctcagcatccacaggtcacgccaaccctcttcatgtcaccagcccttcctcagcatccaccggtcacgccaccccgcttcctgtcaccgacacttcctcagcatccacaggtcacgccacccctcttcctgtcaccagcctttcctcagtatccacaggtgacaccacgcctcttcctgtcactagcccttcctcagcatccacaggtcacaccacccctcttcctgtcaccgacacttcctcagcatccacaggtcaggccaccgctcttcctgtcaccagcacttcctcagcatccacaggtgacaccacccctcttcctgtcaccgacacttcctcagcatccacaggtcaggccacccctcttcctgtcaccagcctttcctcagtatccacaggtgacaccacgcctcttcctgtcactagcccttcctcagcatccacaggtcacgccactcctcttcttgtcaccgacgcttcctcagcatccacaggtcaggccacccctcttcctgtcaccagcctttcctcagtatccacaggtgacaccacgcctcttcctgtcactagcccttcctcagcatccaccggtcatgccacctctcttcctgtcaccgacacttcctcagcatccacaggtgacaccacctctcttcctgtcaccgacacttcctcagcatacacaggtgacaccacctctcttcctgtcaccgacacttcctcatcatccacaggtgacaccacccctcttcttgtcaccgagacttcctcagtatccacaggtcacgccactcctcttcttgtcaccgacgcttcctcagcatccacaggtcacgccacccctcttcatgtcaccagcccttcctcagcatccacaggtgacaccacccctgtgcctgtcaccgacacttcctcagtatccacaggtcacgccacccctcttcctgtcaccggcctttcctcagcttccacaggtgacaccacccgtcttcctgtcaccgacatttcctcggcatccacaggtcaggccacccctcttcctgtcaccaacacttcctcagtatccacaggtgacaccatgcctcttcctgtcactagcccttcctcagcatccacaggtcacgccacccctcttcctgtcaccagcacttcctcagcatccaccggtcacgccacccctgttcctgtcaccagcacttcctcagcatctacaggtcacaccacccctcttcctgtcaccgacacttcctcagcatccacaggtgacaccacccctcttcctgtcaccagcccttcctcagcatctacaggtcacaccacccctcttcatgtcaccatcccttcctcagcatccacaggtgacaccagcactcttcctgtcaccggcgcttcctcagcatccaccggtcacgccacccctcttcctgtcaccgacacttcctcagtatccaccggtcacgccacgcctcttcctgtcaccagcctttcctcagtatccacaggtgacaccacccctcttcctgtcaccgacgcttcctcggcatccacaggtcaggccacccctcttcctgtcaccagcctttcctcagtatccacaggtgacaccacccctcttcttgtcaccgacgcttcctcagtatccacaggtcacgccacccctcttcctgtcaccgacacttcctcagcatccacaggtgacaccacccgtcttcctgtcacggacacttcctcagcatccacaggtcaggccacccctcttcctgtcaccagcctttcctcagtatccacaggtgacaccacccctcttcttgtcaccgacgcttcctcagtatccacaggtcacgccacccctcttcctgtcaccgacacttcctcagcatccacaggtgacaccacccgtcttcctgtcacggacacttcctcagcatccacaggtcaggccacccctcttcctgtcaccatcccttcctcatcatcctcaggtcacaccacccctcttcctgtcaccagcacttcctcagtatctacaggtcacgtcacccctcttcatgtcaccagcccttcctcagcatccacaggtcacgtcacccctcttcctgtcaccagcacttcctcagcatccacaggtcacgccacccctcttcttgtcaccgacgcttcctcagtgtccacaggtcacgccacgcctcttcctgtcaccgacgcttcctcagcatccacaggtgacaccacccctcttcctgtcaccgacacttcctcagcatccacaggtcaggccacccctcttcctgtcaccagcctttcctcagtatccacaggtgacaccacccctcttcctgtcaccgacgcttcctcagcatccacaggtcacgccacccctcttcctgtcaccatcccttcctcagtatccacaggtgacaccatgcctcttcctgtcactagcccttcctcagcatccacaggtcacgccacccctcttcctgttaccggcctttcctcagcttccacaggtgacaccacccctcttcctgtcaccgacacttcctcagcatccacacgtcacgccacccctcttcctgtcaccgacacttcctcagcttccacagatgacaccacccgtcttcctgtcaccgacgtttcctcggcatccacaggacatgccacccctcttcctgtcaccagcacttcctcagcatccacaggtgacaccacccctcttcctgtcaccgacacttcctcagtatccacaggtcacgccacctctcttcctgtcaccagccgttcctcagcatccacaggtcacgccaccccccttcctgtcaccgacacttcctcagtatccacaggtcacgccacccctcttcctgtcaccagcacttcctcagtatctacaggtcacgccacccctcttcctgtcaccagcccttcctcagcatccacaggtcacgccacccctgttcctgtcaccagcacttcctcagcatccacaggtgacaccacccctcttcctgtcaccaatgcttcctcattatccacaggtcacgccacccctcttcatgtcaccagcccttcctcagcatccagaggtgacaccagcactcttcctgtcaccgatgcttcctcagcatccaccggtcacgccacccctcttcctctcaccagcctttcctcagtatccacaggtgacaccacgcctcttcctgtcaccgacacttcctctgcatccacaggtcaggccacccctcttcctgtcaccagcctttcctcagtatccacaggtgacaccacgcctcttcctgtcaccatcccttcctcagcatcctcaggtcacaccacctctcttcctgtcaccgacgcttcctcagtgtccacaggtcacggcacccctcttcctgtcaccagcacttcctcagcatccacaggtgacaccacccctcttcctgtcaccgacacttcctcagcatccacaggtcacgccacccctcttcctgtcaccgacacttcctcagcatccacaggtcacgccacccctcttcctgtcaccagcctttcctcagtatccacaggtcacgccacccctcttgctgtcagcagtgctacctcagcttccacagtatcctcggactcccctctgaagatggaaacaccaggaatgacaacaccgtcactgaagacagacggtgggagacgcacagccacatcaccaccccccacaacctcccagaccatcatttccaccattcccagcactgccatgcacacccgctccacagctgcccccatccccatcctgcctgagagaggagtttccctcttcccctatggggcaggcgccggggacctggagttcgtcaggaggaccgtggacttcacctccccactcttcaagccggcgactggcttcccccttggctcctctctccgtgattccctctacttcacagacaatggccagatcatcttcccagagtcagactaccagattttctcctaccccaacccactcccaacaggcttcacaggccgggaccctgtggccctggtggctccgttctgggacgatgctgacttctccactggtcgggggaccacattttatcagagcaacacctaccaagccatcctctccacggacgggagcaggtcctatgccctgtttctctaccagagcggtgggatgcagtgggacgtggcccagcgctcaggcaacccggtgctcatgggcttctctagtggagatggctatttcgaaaacagcccactgatgtcccagccagtgtgggagaggtatcgccctgatagattcctgaattccaactcaggcctccaagggctgcagttctacaggctacaccgggaagaaaggcccaactaccgtctcgagtgcctgcagtggctgaagagccagcctcggtggcccagctggggctggaaccaggtctcctgcccttgttcctggcagcagggacgacgggacttacgattccaacccgtcagcataggtcgctggggcctcggcagtaggcagctgtgcagcttcacctcttggcgaggaggcgtgtgctgcagctacgggccctggggagagtttcgtgaaggctggcacgtgcagcgtccttggcagttggcccaggaactggagccacagagctggtgctgccgctggaatgacaagccctacctctgtgccctgtaccagcagaggcggccccacgtgggctgtgctacatacaggcccccacagcccgcctggatgttcggggacccccacatcaccaccttggatggtgtcagttacaccttcaatgggctgggggacttcctgctggtcggggcccaagacgggaactcctccttcctgcttcagggccgcaccgcccagactggctcagcccaggccaccaacttcatcgcctttgcggctcagtaccgctccagcagcctgggccccgtcacggtccaatggctccttgagcctcacgacgcaatccgtgtcctgctggataaccagactgtgacatttcagcctgaccatgaagacggcggaggccaggagacgttcaacgccaccggagtcctcctgagccgcaacggctctgaggtctcggccagcttcgacggctgggccaccgtctcggtgatcgcgctctccaacatcctccacgcctccgccagcctcccgcccgagtaccagaaccgcacggaggggctcctgggggtctggaataacaatccagaggacgacttcaggatgcccaatggctccaccattcccccagggagccctgaggagatgcttttccactttggaatgacctggcagatcaacgggacaggcctccttggcaagaggaatgaccagctgccttccaacttcacccctgttttctactcacaactgcaaaaaaacagctcctgggctgaacatttgatctccaactgtgacggagatagctcatgcatctatgacaccctggccctgcgcaacgcaagcatcggacttcacacgagggaagtcagtaaaaactacgagcaggcgaacgccaccctcaatcagtacccgccctccatcaatggtggtcgtgtgattgaagcctacaaggggcagaccacgctgattcagtacaccagcaatgctgaggatgccaacttcacgctcagagacagctgcaccgacttggagctctttgagaatgggacgttgctgtggacacccaagtcgctggagccattcactctggagattctagcaagaagtgccaagattggcttggcatctgcactccagcccaggactgtggtctgccattgcaatgcagagagccagtgtttgtacaatcagaccagcagggtgggcaactcctccctggaggtggctggctgcaagtgtgacgggggcaccttcggccgctactgcgagggctccgaggatgcctgtgaggagccgtgcttcccgagtgtccactgcgttcctgggaagggctgcgaggcctgccctccaaacctgactggggatgggcggcactgtgcggctctggggagctctttcctgtgtcagaaccagtcctgccctgtgaattactgctacaatcaaggccactgctacatctcccagactctgggctgtcagcccatgtgcacctgccccccagccttcactgacagccgctgcttcctggctgggaacaacttcagtccaactgtcaacctagaacttcccttaagagtcatccagctcttgctcagtgaagaggaaaatgcctccatggcagaagtcaacgcctcggtggcatacagactggggaccctggacatgcgggcctttctccgcaacagccaagtggaacgaatcgattctgcagcaccggcctcgggaagccccatccaacactggatggtcatctcggagttccagtaccgccctcggggcccggtcattgacttcctgaacaaccagctgctggccgcggtggtggaggcgttcttataccacgttccacggaggagtgaggagcccaggaacgacgtggtcttccagcccatctccggggaagacgtgcgcgatgtgacagccctgaacgtgagcacgctgaaggcttacttcagatgcgatggctacaagggctacgacctggtctacagcccccagagcggcttcacctgcgtgtccccgtgcagtaggggctactgtgaccatggaggccagtgccagcacctgcccagtgggccccgctgcagctgtgtgtccttctccatctacacggcctggggcgagcactgtgagcacctgagcatgaaactcgacgcgttcttcggcatcttctttggggccctgggcggcctcttgctgctgggggtcgggacgttcgtggtcctgcgcttctggggttgctccggggccaggttctcctatttcctgaactcagctgaggccttgccttgaaggggcagctgtggcctaggctacctcaagactcacctcatccttaccgcacatttaaggcgccattgcttttgggagactggaaaagggaaggtgactgaaggctgtcaggattctt

SEQ ID NO: 18686 - DNA, 1860 bp, Homo sapiens
  source 1..1860: mol_type = unassigned DNA
atgagtgttggccggaggaagctggccctgctctgggccctggctctcgctctggcctgcacccggcacacaggccatgcccaggatggctcctccgaatccagctacaagcaccaccctgccctctctcctatcgcccgggggcccagcggggtcccgctccgtggggcgactgtcttcccatctctgaggaccatccctgtggtacgagcctccaacccggcgcacaacgggcgggtgtgcagcacctggggcagcttccactacaagaccttcgacggcgacgtcttccgcttccccggcctctgcaactacgtgttctccgagcactgcggtgccgcctacgaggattttaacccagctacgccgcagccaggagtcagcggcccccacgctgagcagggtcctcatgaaggtggatggcgtggtcatccagctgaccaagggctccgtcctggtcaacggccacccggtcctgctgcccttcagccagtctggggtcctcattcaagagcagcagctacaccaaggtggaggccaggctgggccttgtcctcatgtggaaccacgatgacagcctgctgctggctggacaccaaatacgccaacaagctgtgggctctgtggggacttcaacgggatgcccgtggtcagcgagctcctctcccacaacaccaagctgacacccatggaattcgggaacctgcaagatggacgaccccacggagcagtgtcaggaccctgtccctgaacccccgaggaactgctccactggctttgggcatctgtgaggagctcctgcacggccagctgttctctggctgcgtggccctggtggacgtcggcagctacctggaggcttgcaggcaagacctctgcttctgtgaagacaccgacctgctcagctgcgtctgccacacccttgccgagtactcccggcagtgcacccatgcaggggggttgccccaggactggcggggccctgacttctgcccccagaagtgccccaacaacatgcagtaccacgagtgccgctccccctgtgcagacacctgctccaaccaggagcactcccgggcctgtgaggaccactgtgtggccggctgcttctgccctgaggggacggtgcttgacgacatcggccagaccggctgtgtccctgtgtcaaagtgtgcctgcgtctacaacggggctgcctatgccccaggggccacctactccacagactgcaccaactgcacctgctccggaggccggtggagctgccaggaggttccatgcccgggtacctgctctgtgcttggaggtgcccacttctcaacgtttgacgggaagcaatacacggtgcacggcgactgcagctatgtgctgaccaagccctgtgacagcagtgccttcactgtactggctgagctgcgcaggtgcgggctgacggacagcgagacctgcctgaagagcgtgacactgagcctggatggggtgcagacggtggtggtgatcaaggccagtggggaagtgttcctgaaccagatctacacccagctgcccatctctgcagccaacgtcaccatcttcagaccctcaaccttcttcatcatcgcccagaccagcctgggcctgcagctgaacctgcagctggtgcccaccatgcagctgttcatgcagctggcgcccaagctccgtgggcagacctgcggtctctgtgggaacttcaacagcatccaggccgatgacttccggaccctcagtggggtggtggaggccaccgctgcggccttcttcaacaccttcaagacccaggccgcctgccccaacatcaggaacagcttcgaggacccctgctctctgagcgtggagaat

SEQ ID NO: 18687 - DNA, 1917 bp, Homo sapiens
  source 1..1917: mol_type = unassigned DNA
ctcagaggctgctgagggacagggcactcttccccgccgtccacacaatgagtgttggccggaggaagctggccctgctctgggccctggctctcgctctggcctgcacccggcacacaggccatgcccaggatggctcctccgaatccagctacaagcaccaccctgccctctctcctatcgcccgggggcccagcggggtcccgctccgtggggcgactgtcttcccatctctgaggaccatccctgtggtacgagcctccaacccggcgcacaacgggcgggtgtgcagcacctggggcagcttccactacaagaccttcgacggcgacgtcttccgcttccccggcctctgcaactacgtgttctccgagcactgcggtgccgcctacgaggattttaacatccagctacgccgcagccaggagtcagcggcccccacgctgagcagggtcctcatgaaggtggatggcgtggtcatccagctgaccaagggctccgtcctggtcaacggccacccggtcctgctgcccttcagccagtctggggtcctcattcagcagagcagcagctacaccaaggtggaggccaggctgggccttgtcctcatgtggaaccacgatgacagcctgctgctggagctggacaccaaatacgccaacaagacctgtgggctctgtggggacttcaacgggatgcccgtggtcagcgagctcctctcccacaacaccaagctgacacccatggaattcgggaacctgcagaagatggacgaccccacggagcagtgtcaggaccctgtccctgaacccccgaggaactgctccactggctttggcatctgtgaggagctcctgcacggccagctgttctctggctgcgtggccctggtggacgtcggcagctacctggaggcttgcaggcaagacctctgcttctgtgaagacaccgacctgctcagctgcgtctgccacacccttgccgagtactcccggcagtgcacccatgcaggggggttgccccaggactggcggggccctgacttctgcccccagaagtgccccaacaacatgcagtaccacgagtgccgctccccctgtgcagacacctgctccaaccaggagcactcccgggcctgtgaggaccactgtgtggccggctgcttctgccctgaggggacggtgcttgacgacatcggccagaccggctgtgtccctgtgtcaaagtgtgcctgcgtctacaacggggctgcctatgccccaggggccacctactccacagactgcaccaactgcacctgctccggaggccggtggagctgccaggaggttccatgcccgggtacctgctctgtgcttggaggtgcccacttctcaacgtttgacgggaagcaatacacggtgcacggcgactgcagctatgtgctgaccaagccctgtgacagcagtgccttcactgtactggctgagctgcgcaggtgcgggctgacggacagcgagacctgcctgaagagcgtgacactgagcctggatggggtgcagacggtggtggtgatcaaggccagtggggaagtgttcctgaaccagatctacacccagctgcccatctctgcagccaacgtcaccatcttcagaccctcaaccttcttcatcatcgcccagaccagcctgggcctgcagctgaacctgcagctggtgcccaccatgcagctgttcatgcagctggcgcccaagctccgtgggcagacctgcggtctctgtgggaacttcaacagcatccaggccgatgacttccggaccctcagtggggtggtggaggccaccgctgcggccttcttcaacaccttcaagacccaggccgcctgccccaacatcaggaacagcttcgaggacccctgctctctgagcgtggagaatg

SEQ ID NO: 18688 - DNA, 17747 bp, Homo sapiens
  source 1..17747: mol_type = unassigned DNA
acccggcccggctccctccctgcccgtccccgtccccccacccgtgccagcccccaggatgggtgccccgagcgcgtgccggacgctggtgttggctctggcggccatgctcgtggtgccgcaggcagagacccagggccctgtggagccgagctgggagaatgcagggcacaccatggatggcggtgccccgacgtcctcgcccacccggcgcgtgagctttgttccacccgtcactgtcttccccagcctgagccccctgaacccggcgcacaatgggcgggtgtgcagcacctggggtgacttccactacaagaccttcgacggcgacgtcttccgcttccctggcctttgcaactacgtgttctctgagcactgccgcgccgcctacgaggacttcaacgtccagctacgccgaggcctagtgggctccaggcctgtggtcacccgtgttgtcatcaaggcccaggggctggtgctggaggcgtccaacggctccgtcctcatcaatgggcagcgggaggagctgccttacagccgcactggcctcctggtggagcagagcggggactacatcaaggtcagcatccggctggtgctgacattcctgtggaacggagaggacagtgccctgctggagctggatcccaaatacgccaaccagacctgtggcctgtgtggggacttcaacggcctcccggccttcaacgagttctatgcccacaacgccaggctgaccccgctccagtttgggaacctgcagaagttggatgggcccacggagcagtgcccggacccgctgcccttgccggccggcaactgcacggacgaggagggcatctgccaccgcaccctgctggggccggcctttgcggagtgccacgcactggtggacagcactgcgtacctggccgcctgcgcccaggacctgtgccgctgccccacctgcccgtgtgccacctttgtggaatactcacgccagtgcgcccacgcggggggccagccgcggaactggaggtgccctgagctctgcccccggacctgccccctcaacatgcagcaccaggagtgtggctcaccctgcacggacacctgctccaacccccagcgcgcgcagctctgcgaggaccactgtgtggacggctgcttctgccccccaggcagcacggtgctggatgacatcacgcactctggctgcctgcccctcgggcagtgcccctgcacccacggcggccgcacctacagcccgggcacctccttcaacaccacctgcagctcctgcacctgctccggggggctatggcagtgccaggacctgccgtgccctggcacctgctctgtgcagggcggggcccacatctccacctatgatgagaaactctacgacctgcatggtgactgcagctacgttctgtccaagaaatgtgccgacagcagcttcaccgtgctggctgagctgcggaagtgcggcctgacggacaacgagaactgcctgaaagcggtgacgctcagcctggacggcggggacacggccatccgggtccaagcggacggcggcgtgttcctcaactccatctacacgcagctgcccctgtcggcagccaacatcaccctgttcacaccctcgagcttcttcatcgtggtgcagacaggcctggggctgcagctgctggtgcagctggtgccactcatgcaggtgtttgtcaggctggaccccgcccaccagggccagatgtgcggcctgtgtgggaacttcaaccagaaccaggctgacgacttcacggccctcagcggggtggtggaggccacgggcgcagccttcgccaacacctggaaggcccaggctgcctgtgccaatgccaggaacagctttgaggacccctgctccctcagtgtggagaatgagaactacgcccggcactggtgctcgcgcctgaccgatcccaacagtgccttctcgcgctgccactccatcatcaaccccaagcccttccactcgaactgcatgtttgacacctgcaactgtgagcggagcgaggactgcctgtgcgccgcgctgtcctcctatgtgcacgcctgtgccgccaagggcgtacagctcagcgactggagggacggcgtctgcaccaagtacatgcagaactgccccaagtcccagcgctacgcctacgtggtggatgcctgccagcccacttgccgcggcctgagtgaggccgacgtcacctgcagcgtttccttcgtgcctgtggacggctgcacctgccccgcgggcaccttcctcaatgacgcgggcgcctgtgtgcccgcccaggagtgcccctgctacgctcacggcaccgtgctggctcctggagaggtggtgcacgacgagggcgccgtgtgttcatgtacgggtgggaagctaagctgcctgggagcctctctgcagaaaagcacagggtgtgcagcccccatggtgtacctggactgcagcaacagctcggcgggcacccctggggccgagtgcctccggagctgccacacgctggacgtgggctgtttcagcacacactgcgtgtccggctgtgtctgtcccccggggctggtgtcggatgggagtgggggctgcattgccgaggaggactgcccctgtgtgcacaacgaggccacctacaagcctggagagaccatcagggtcgactgcaacacctgcacctgcaggaaccggaggtgggagtgcagccaccggctctgcctgggcacctgcgtggcctacggggatggccacttcatcacctttgatggcgatcgctacagctttgaaggcagctgcgagtacatcttggcccaggactactgtggggacaacaccacccacgggaccttccgcatcgtcaccgagaacatcccctgtgggaccaccggcaccacctgctccaaggccatcaagctcttcgtggagagctacgagctgatcctccaagaggggacctttaaggcggtggcgagagggccgggtggggacccaccctacaagatacgctacatggggatcttcctggtcatcgagacccacgggatggccgtgtcctgggaccggaagaccagcgtgttcatccgactgcaccaggactacaagggcagggtctgcggcctgtgcgggaacttcgacgacaatgccatcaatgactttgccacgcgtagccggtccgtggtgggggacgcactggagtttgggaacagctggaagctctccccctcctgcccggacgccctggcacccaaggacccctgcacggccaaccccttccgcaagtcctgggcccagaagcagtgcagcatcctccacggccccaccttcgccgcctgccgctcccaggttgactccaccaagtactacgaggcctgcgtgaacgacgcgtgtgcctgcgactcgggtggcgactgcgagtgtttctgcacggctgtggctgcctacgcccaggcctgccacgacgcgggcctgtgtgtgtcctggcggactccggacacctgccccttgttctgtgacttctacaacccacatgggggctgtgagtggcactaccagccctgcggggcaccctgcctaaaaacctgccggaaccccagtgggcactgcctggtggacctgcctggcctggaaggctgctacccgaagtgcccacccagccagcccttcttcaatgaggaccagatgaagtgcgtggcccagtgtggctgctacgacaaggacggaaactactatgacgtcggtgcaagggtccccacagcggagaactgccagagctgtaactgcacacccagtggcatccagtgcgctcacagccttgaggcctgcacctgcacctatgaggacaggacctacagctaccaggacgtcatctacaacaccaccgatgggcttggcgcctgcttgatcgccatctgcggaagcaacggcaccatcatcaggaaggctgtggcatgtcctggaactccagccacaacgccattcaccttcaccaccgcctgggtcccccactccacgacaagcccggccctcccggtctccaccgtgtgtgtccgcgaggtctgccgctggtccagctggtacaatgggcaccgcccagagcccggcctgggaggcggagactttgagacgtttgaaaacctgaggcagagagggtaccaggtatgccctgtgctggctgacatcgagtgccgggcggcgcagcttcccgacatgccgctggaggagctgggccagcaggtggactgtgaccgcatgcgggggctgatgtgcgccaacagccaacagagtcccccgctctgtcacgactacgagctgcgggttctctgctgcgaatacgtgccctgtggcccctccccggccccaggcaccagccctcagccctccctcagtgccagcacggagcctgctgtgcctaccccaacccagaccacagcaaccgaaaagaccaccctatgggtgaccccgagcatccggtcgacggcggccctcacctcgcagactgggtccagctcaggccccgtgacggtcaccccctcggccccaggtaccaccacctgccagccccggtgtcagtggacagagtggtttgatgaggactaccccaagtctgaacaacttggaggggacgttgagtcctacgataagatcagggccgctggagggcacttatgccagcagcctaaggacatagagtgccaggccgagagcttccccaactggaccctggcacaggtggggcagaaggtgcactgtgacgtccacttcggcctggtgtgcaggaactgggagcaggagggcgtcttcaagatgtgctacaactacaggatccgggtcctctgctgcagtgacgaccactgcaggggacgtgccacaaccccgccaccgaccacagagctggagacggccaccaccaccaccacccaggccctgttctcaacgccgcagcctacgagtagcccggggctgaccagggctcccccggccagcaccacagcagtccccaccctctcagaaggactgacatcccccagatacacaagcacccttggtacagccaccacgggaggccccacgacgcctgcaggctccacagaacccactgtcccaggggtggccacatccacccttccaacacgctcagcccttccagggacgacggggagcttgggcacatggcgcccctcacagccacccacgctggccccaacaacaatggcaacctccagagctcgcccgacaggcacagccagcaccgcttccaaagagccgctgaccacgagcctggcgccaacactcacgagcgagctgtccacctctcaggccgagaccagcacgcccaggacagagacgacaatgagccccttgactaacaccaccaccagccagggcacgacccgctgtcaaccgaagtgtgagtggacagagtggtttgacgtggacttcccaacctcaggggttgcaggcggggacatggaaacttttgaaaacatcagggctgctgggggcaagatgtgctgggcaccaaagagcatagagtgccgggcggagaactaccccgaggtaagcatcgaccaggtcgggcaggtgctgacctgcagcctggagacggggctgacctgcaagaacgaagaccagacaggcaggttcaacatgtgcttcaactacaacgtgcgtgtgctttgctgtgacgactacagccactgccccagtaccccagccaccagctccacggccacgccctcctcaactccggggacgacctggatcctcacaaagccgaccacaacagccactacgactgcgtccactggatccacggccaccccgacctccaccctgagaacagctccccctcccaaagtgctgaccaccacggccaccacacccacagtcaccagctccaaagccactccctcctccagtccagggactgcaaccgcccttccagcactgagaagcacagccaccacacccacagctaccagcgttacacccatcccctcttcctccctgggcaccacctggacccgcctatcacagaccaccacacccacggccaccatgtccacagccacaccctcctccactccagagactgcccacacctccacagtgcttaccgccacggccaccacaactggggccaccggctctgtggccaccccctcctccaccccaggaacagctcacactaccaaagtgccaactaccacaaccacgggcttcacagccaccccctcctccagcccagggacggcactcacgcctccagtgtggatcagcacaaccaccacacccacaaccagaggctccacggtgaccccctcctccatcccggggaccacccacaccgccacagtgctgaccaccaccaccacaactgtggccactggttctatggcaacaccctcctctagcacacagaccagtggtactcccccatcactgaccaccacggccactacgatcacggccaccggctccaccaccaacccctcctcaactcctgggacaactcccatccccccagtgctgaccaccaccgccaccacacctgcagccaccagcaacacagtgactccctcctctgccctagggaccacccacacacccccagtgccgaacaccatggccaccacacacgggcgatccctgccccccagcagtccccacacggtgcgcacagcctggacttcggccacctcgggcatcttgggcaccacccacatcacagagccttccacggtgacttcccacaccctagcagcaaccaccggtaccacccagcactcgactccagccctttccagccctcaccctagcagcagaaccaccgagtcacccccttctccagggacgaccaccccgggccacaccacggccacctccaggaccacagccacggccacacccagcaagacccgcacctcgaccctgctgcccagcagccccacatcggcccccataaccacggtggtgaccatgggctgtgagccccagtgtgcctggtcagagtggctggactacagctaccccatgccggggccctctggcggggactttgacacctactccaacatccgtgcggccggaggggccgtctgtgagcagcccctgggcctcgagtgccgtgcccaggcccagcctggtgtccccctgcgggagttgggccaggtcgtggaatgcagcctggactttggcctggtctgcaggaaccgtgagcaggtggggaagttcaagatgtgcttcaactatgaaatccgtgtgttctgctgcaactacggccactgccccagcaccccggccaccagctctacggccatgccctcctccactccggggacgacctggatcctcacagagctgaccacaacagccactacgactgagtccactggatccacggccaccccgtcctccaccccagcaactgctggcaccccacatgtgagcaccacggccacgacacccacagtcaccagctccaaagccactcccttctccagtccagggactgcaaccgcccttccagcactgagaagcacagccaccacacccacagctaccagctttacagccatcccctcctcctccctgggcaccacctggacccgcctatcacagaccaccacacccacggccaccatgtccacagccacaccctcctccactccagagactgtccacacctccacagtgcttaccaccacggccaccacaaccggggccaccggctctgtggccaccccctcctccaccccaggaacagctcacactaccaaagtgctgactaccacaaccacgggcttcacagccaccccctcctccagcccagggacggcacgcacgcttccagtgtggatcagcacaaccaccacacccacaaccagaggttccacggtgaccccctcctccatcccggggaccacccacacccccacagtgctgaccaccaccaccacaactgtggccactggttctatggcaacaccctcctctagcacacagaccagtggtactcccccatcactgaccaccacggccactacgatcacggccaccggctccaccaccaacccctcctcaactccagggacaacacctatccccccagtgctgaccaccaccgccaccacacctgcagccaccagcagcacagtgactccctcctctgccctagggaccacccacacacccccagtgccgaacaccacggccaccacacacgggcgatccctgtcccccagcagtccccacacggtgcgcacagcctggacttcggccacctcaggcaccttgggcaccacccacatcacagagccttccacggggacttcccacaccccagcagcaaccaccggtaccacccagcactcgactccagccctgtccagccctcaccctagcagcaggaccaccgagtcacccccttctccagggacgaccaccccgggccacaccagggccacctccaggaccacggccacggccacacccagcaagacccgcacctcgaccctgctgcccagcagccccacatcggccccaataaccacggtggtgaccatgggctgtgagccccagtgtgcctggtcagagtggctggactacagctaccccatgccggggccctctggcggggactttgacacctactccaacatccgtgcggccggaggggccgtctgtgagcagcccctgggcctcgagtgccgtgcccaggcccagcctggtgtccccctgcgggagttgggccaggtcgtggaatgcagcctggactttggcctggtctgcaggaaccgtgagcaggtggggaagttcaagatgtgcttcaactatgaaatccgtgtgttctgctgcaactacggccactgccccagcaccccggccaccagctctacggccacgccctcctccactccagggacgacctggatcctcacagagcagaccacagcagccactacgaccgcaaccactggatccacggccatcccgtcctccaccccgggaacagctccccctcccaaagtgctgaccagcacggccaccacacccacagccaccagttccaaagccacttcctcctccagtccaaggactgcaaccacccttccagtgctgacaagcacagccaccaaatccacagctaccagctttacacccatcccctccttcacccttgggaccaccgggaccctcccagaacagaccaccacacccatggccaccatgtccacaatccacccctcctccactccggagaccacccacacctccacagtgctgaccacgaaggccaccacgacaagggccaccagttccatgtccaccccctcctccactccggggacgacctggatcctcacagagctgaccacagcagccactacaactgcagccactggccccacggccaccccgtcctccaccccagggaccacctggatcctcacagagcccagcactacagccaccgtgacggtgcccaccggatccacggccaccgcctcctccacccgggcaactgctggcaccctcaaagtgctgaccagcacggccaccacacccacagtcatcagctccagagccactccctcctccagtccagggactgcaaccgcccttccagcactgagaagcacagccaccacacccacagctaccagcgttacagccatcccctcttcctccctgggcaccgcctggacccgcctatcacagaccaccacacccacggccaccatgtccacagccacaccctcctctactccagagactgtccacacctccacagtgcttaccaccacgaccaccacaaccagggccaccggctctgtggccaccccctcctccaccccaggaacagctcacactaccaaagtgccgactaccacaaccacgggcttcacagccaccccctcctccagcccagggacggcactcacgcctccagtgtggatcagcacaaccaccacacccacaaccagaggctccacggtgaccccctcctccatcccggggaccacccacaccgccacagtgctgaccaccaccaccacaactgtggccactggttctatggcaacaccctcctctagcacacagaccagtggtactcccccatcactgaccaccacggccactacgatcacagccaccggctccaccaccaacccctcctcaactccagggacaactcccatccccccagtgctgaccaccaccgccaccacacctgcagccaccagcagcacagtgactccctcctctgccctagggaccacccacacacccccagtgccgaacaccacggccaccacacacgggcggtccctgccccccagcagtccccacacggtgcgcacagcctggacttcggccacctcgggcatcttgggcaccacccacatcacagagccttccacggtgacttcccacaccccagcagcaaccaccagtaccacccagcactcgactccagccctgtccagccctcaccctagcagcaggaccaccgagtcacccccttctccagggacgaccaccccgggccacaccaggggcacctccaggaccacagccacagccacacccagcaagacccgcacctcgaccctgctgcccagcagccccacatcggcccccataaccacggtggtgaccacgggctgtgagccccagtgtgcctggtcagagtggctggactacagctaccccatgccggggccctctggcggggactttgacacctactccaacatccgtgcggccggaggggcagtctgtgagcagcccctgggcctcgagtgccgtgcccaggcccagcctggtgtccccctgcgggagttgggccaggtcgtggaatgcagcctggactttggcctggtctgcaggaaccgtgagcaggtggggaagttcaagatgtgcttcaactatgaaatccgtgtgttctgctgcaactacggccactgccccagcaccccggccaccagctctacggccacgccctcctcaactccggggacgacctggatcctcacaaagctgaccacaacagccactacgactgagtccactggatccacggccaccccgtcctccaccccaggggcaactgctggcaccccacatgtgagcaccacggccacgacacccacagtcaccagctccaaagccactcccttctccagtccagggactgcaaccgcccttccagcactgagaagcacagccaccacacccacagctaccagctttacagccatcccctcctcctccctgggcaccacctggacccgcctatcacagaccaccacacccacggccaccatgtccacagccacaccctcctccactccagagactgcccacacctccacagtgcttaccaccacggccaccacaaccagggccaccggctctgtggccaccccctcttccaccccaggaacagctcacactaccaaagtgccgactaccacaaccacgggcttcacagtcaccccctcctccagcccagggacggcacgcacgcctccagtgtggatcagcacaaccaccacacccacaaccagtggctccacggtgaccccctcctccgtcccggggaccacccacacccccacagtgctgaccaccaccaccacaactgtggccactggttctatggcaacaccctcctctagcacacagaccagtggtactcccccatcactgatcaccacggccactacgatcacggccaccggctccaccaccaacccctcctcaactccagggacaacacctatccccccagtgctgaccaccaccgccaccacacctgcagccaccagcagcacagtgactccctcctctgccctagggaccacccacacacccccagtgccgaacaccacggccaccacacacgggcgatccctgtcccccagcagtccccacacggtgcgcacagcctggacttcggccacctcaggcaccttgggcaccacccacatcacagagccttccacggggacttcccacaccccagcagcaaccaccggtaccacccagcactcgactccagccctgtccagccctcaccctagcagcaggaccaccgagtcacccccttccccagggacgaccaccccgggccacaccacggccacctccaggaccacggccacggccacacccagcaagacccgcacctcgaccctgctgcccagcagccccacatcggcccccataaccacggtggtgaccacgggctgtgagccccagtgtgcctggtcagagtggctggactacagctaccccatgccggggccctctggcggggactttgacacctactccaacatccgtgcggccggaggggccgtctgtgagcagcccctgggcctcgagtgccgtgcccaggcccagcctggtgtccccctgggggagttgggccaggtcgtggaatgcagcctggactttggcctggtctgcaggaaccgtgagcaggtggggaagttcaagatgtgcttcaactatgaaatccgtgtgttctgctgcaactacggccactgccccagcaccccggccaccagctctacggccatgccctcctccactccggggacgacctggatcctcacagagctgaccacaacagccactacgactgcatccactggatccacggccaccccgtcctccaccccgggaacagctccccctcccaaagtgctgaccagcccggccaccacacccacagccaccagttccaaagccacttcctcctccagtccaaggactgcaaccacccttccagtgctgacaagcacagccaccaaatccacagctaccagcgttacacccatcccctcctccacccttgggaccaccgggaccctcccagaacagaccaccacacccgtggccaccatgtccacaatccacccctcctccactccggagaccacccacacctccacagtgctgaccacgaaggccaccacgacaagggccaccagttccacgtccaccccctcctccactccggggacgacctggatcctcacagagctgaccacagcagccactacaactgcagccactggccccacggccaccccgtcctccaccccagggaccacctggatcctcacagagctgaccacaacagccactacgactgcgtccactggatccacggccaccccgtcctccaccccagggaccacctggatcctcacagagccgagcactacagccaccgtgacggtgcccaccggatccacggccaccgcctcctccacccaggcaactgctggcaccccacatgtgagcaccacggccacgacacccacagtcaccagctccaaagccactccctcctccagtccagggactgcaactgcccttccagcactgagaagcacagccaccacacccacagctaccagctttacagccatcccctcctcctccctgggcaccacctggacccgcctatcacagaccaccacacccacggccaccatgtccacagccacaccctcctccactccagagactgtccacacctccacagtgcttaccgccacggccaccacaaccggggccaccggctctgtggccaccccctcctccaccccaggaacagctcacactaccaaagtgccgactaccacaaccacgggcttcacagccaccccctcctccagcccagggacggcactcacgcctccagtgtggatcagcacaaccaccacacccacaaccaccacacccacaaccagtggctccacggtgaccccctcctccatcccggggaccacccacaccgccagagtgctgaccaccaccaccacaactgtggccactggttctatggcaacaccctcctctagcacacagaccagtggtactcccccatcactgaccaccacggccactacgatcacggccaccggctccaccaccaacccctcctcaactccagggacaacacccatcaccccagtgctgaccagcacggccaccacacccgcagccaccagctccaaagccacttcctcctccagtccaaggactgcaaccacccttccagtgctgacaagcacagccacaaaatccacagctaccagctttacacccatcccctcctccaccctgtggaccacgtggaccgtcccagcacagaccaccacacccatgtccaccatgtccacaatccacacctcctctactccagagaccacccacacctccacagtgctgaccaccacagccaccatgacaagggccaccaattccacggccacaccctcctccactctggggacgacccggatcctcactgagctgaccacaacagccactacaactgcagccactggatccacggccaccctgtcctccaccccagggaccacctggatcctcacagagccgagcactatagccaccgtgatggtgcccaccggttccacggccaccgcctcctccactctgggaacagctcacacccccaaagtggtgaccaccatggccactatgcccacagccactgcctccacggttcccagctcgtccaccgtggggaccacccgcacccctgcagtgctccccagcagcctgccaaccttcagcgtgtccactgtgtcctcctcagtcctcaccaccctgagacccactggcttccccagctcccacttctctactccctgcttctgcagggcatttggacagtttttctcgcccggggaagtcatctacaataagaccgaccgagccggctgccatttctacgcagtgtgcaatcagcactgtgacattgaccgcttccagggcgcctgtcccacctccccaccgccagtgtcctccgccccgctgtcctcgccctcccctgcccctggctgtgacaatgccatccctctccggcaggtgaatgagacctggaccctggagaactgcacggtggccaggtgcgtgggtgacaaccgtgtcgtcctgctggacccaaagcctgtggccaacgtcacctgcgtgaacaagcacctgcccatcaaagtgtcggacccgagccagccctgtgacttccactatgagtgcgagtgcatctgcagcatgtggggcggctcccactattccacctttgacggcacctcttacaccttccggggcaactgcacctatgtcctcatgagagagatccatgcacgctttgggaatctcagcctctacctggacaaccactactgcacggcctctgccactgccgctgccgcccgctgcccccgcgccctcagcatccactacaagtccatggatatcgtcctcactgtcaccatggtgcatgggaaggaggagggcctgatcctgtttgaccaaattccggtgagcagcggtttcagcaagaacggcgtgcttgtgtctgtgctggggaccaccaccatgcgtgtggacattcctgccctgggcgtgagcgtcaccttcaatggccaagtcttccaggcccggctgccctacagcctcttccacaacaacaccgagggccagtgcggcacctgcaccaacaaccagagggacgactgtctccagcgggacggaaccactgccgccagttgcaaggacatggccaagacgtggctggtccccgacagcagaaaggatggctgctgggccccgactggcacaccccccactgccagccccgcagccccggtgtctagcacacccacccccaccccatgcccaccacagccgctctgtgatctgatgctgagccaggtctttgctgagtgccacaaccttgtgcccccgggcccattcttcaacgcctgcatcagcgaccactgcaggggccgccttgaggtgccctgccagagcctggaggcttacgcagagctctgccgcgcccggggagtgtgcagtgactggcgaggtgcaaccggtggcctgtgcgacctcacctgcccacccaccaaagtgtacaagccatgcggccccatacagcctgccacctgcaactctaggaaccagagcccacagctggaggggatggcggagggctgcttctgccctgaggaccagatcctcttcaacgcacacatgggcatctgcgtgcaggcctgcccctgcgtgggacccgatgggtttcctaaatttcccggggagcggtgggtcagcaactgccagtcctgcgtgtgtgacgagggttcagtgtcggtgcagtgcaagcccctgccctgtgacgcccagggtcagcccccgccgtgcaaccgtcccggcttcgtaaccgtgaccaggccccgggccgagaacccctgctgccccgagacggtgtgcgtgtgcaacacaaccacctgcccccagagcctgcctgtgtgcccgccagggcaggagtccatctgcacccaggaggagggcgactgctgtcccaccttccgctgcagacctcagctgtgttcgtacaatggcaccttctacggggttggtgcaaccttcccaggcgcccttccctgccacatgtgtacctgcctctctggggacacccaggacccaacggtgcaatgtcaggaggatgcctgcaacaatactacctgtccccagggctttgagtacaagagagtggccgggcagtgctgtggggagtgcgtccagaccgcctgcctcacgcccgatggccagccagtccagctgaatgaaacctgggtcaacagccatgtggacaactgcaccgtgtacctctgtgaggctgagggtggagtccatttgctgaccccacagcctgcatcctgcccagatgtgtccagctgcagggggagcctcaggaaaaccggctgctgctactcctgtgaggaggactcctgtcaagtccgcatcaacacgaccatcctgtggcaccagggctgcgagaccgaggtcaacatcaccttctgcgagggctcctgccccggagcgtccaagtactcagcagaggcccaggccatgcagcaccagtgcacctgctgccaggagaggcgggtccacgaggagacggtgcccttgcactgtcctaacggctcagccatcctgcacacctacacccacgtggatgagtgtggctgcacgcccttctgtgtccctgcgcccatggctcccccacacacccgtggcttcccggcccaggaggccactgctgtctgagaacgttctgcctccatccccatgctctgtccacctggagccaggatgtgcattgtctgatcatgaaaaccttgggcctcctctgcggagccccccggcctgtgtgtggcaccccgcgctccgtgctcctgctgcccaccccgtgggtgaaaccggccccagaagggtgaggggccagcaggacccctttcgggagggcgccactcaggagtcctaccctgggagagcctgtggcccaccttggccttgcccctccctgatgtcactgggacgccctggaacaaactaagcatgtgcgggcctatgtgtccctgccacggccggagcgcccgcgcagcacggattccagctggccacgtccggccgctggggcagacaggctggtccaggcaaggccagctgctgccaggaagctgcgacaggcaaggcggccgcctgtccatgcctgctgcagggtaactcagggctgaggtcgcaacggccaggtcagagaggggtcagcatcccaaagccccctctgctcaacccagcccagttttgcaaataaaccctgagcattgagtacgtt

SEQ ID NO: 18689 - DNA, 16584 bp, Homo sapiens
  source 1..16584: mol_type = unassigned DNA
gcccccaggatgggtgccccgagcgcgtgccggacgctggtgttggctctggcggccatgctcgtggtgccgcaggcaggtaagagccccccactccgccccctctcgagaaactcaggggctggcttggatgggggtgccccgacgtcctcgcccacccggcgcgtgagctttgttccacccgtcactgtcttccccagcctgagccgtaagcagatgctgcccctgccagccgggaagggggtgtttgccagtcccaaaggtgggggcccagatctaggggtgcagctgccaccagccctgaacccggcgcacaatgggcgggtgtgcagcacctggggtgacttccactacaagaccttcgacggcgacgtcttccgcttccctggcctttgcaactacgtgttctctgagcactgccgcgccgcctacgaggacttcaacgtccagctacgccgaggcctagtgggctccaggcctgtggtcacccgtgttgtcatcaaggcccaggggctggtgctggaggcgtccaacggctccgtcctcatcaatgggcagcgggaggagctgccttacagccgcactggcctcctggtggagcagagcggggactacatcaaggtcagcatccggctggtgctgacattcctgtggaacggagaggacagtgccctgctggagctggatcccaaatacgccaaccagacctgtggcctgtgtggggacttcaacggcctcccggccttcaacgagttctatgcccacaacgccaggctgaccccgctccagtttgggaacctgcagaagttggatgggcccacggagcagtgcccggacccgctgcccttgccggccggcaactgcacggacgaggagggcatctgccaccgcaccctgctggggccggcctttgcggagtgccacgcactggtggacagcactgcgtacctggccgcctgcgcccaggacctgtgccgctgccccacctgcccgtgtgccacctttgtggaatactcacgccagtgcgcccacgcggggggccagccgcggaactggaggtgccctgagctctgcccccggacctgccccctcaacatgcagcaccaggagtgtggctcaccctgcacggacacctgctccaacccccagcgcgcgcagctctgcgaggaccactgtgtggacggctgcttctgccccccaggcaggtcttgcacggtgctggatgacatcacgcactctggctgcctgcccctcgggcagtgcccctgcacccacggcggccgcacctacagcccgggcacctccttcaacaccacctgcagctcctgcacctgctccggggggctatggcagtgccaggacctgccgtgccctggcacctgctctgtgcagggcggggcccacatctccacctatgatgagaaactctacgacctgcatggtgactgcagctacgttctgtccaagaaatgtgccgacagcagcttcaccgtgctggctgagctgcggaagtgcggcctgacggacaacgagaactgcctgaaagcggtgacgctcagcctggacggcggggacacggccatccgggtccaagcggacggcggcgtgttcctcaactccatctacacgcagctgcccctgtcggcagccaacatcaccctgttcacaccctcgagcttcttcatcgtggtgcagacaggcctggggctgcagctgctggtgcagctggtgccactcatgcaggtgtttgtcaggctggaccccgcccaccagggccagatgtgcggcctgtgtgggaacttcaaccagaaccaggctgacgacttcacggccctcagcggggtggtggaggccacgggcgcagccttcgccaacacctggaaggcccaggctgcctgtgccaatgccaggaacagctttgaggacccctgctccctcagtgtggagaatgagaactacgcccggcactggtgctcgcgcctgaccgatcccaacagtgccttctcgcgctgccactccatcatcaaccccaagcccttccactcgaactgcatgtttgacacctgcaactgtgagcggagcgaggactgcctgtgcgccgcgctgtcctcctatgtgcacgcctgtgccgccaagggcgtacagctcagcgactggagggacggcgtctgcaccaagtacatgcagaactgccccaagtcccagcgctacgcctacgtggtggatgcctgccagcccacttgccgcggcctgagtgaggccgacgtcacctgcagcgtttccttcgtgcctgtggacggctgcacctgccccgcgggcaccttcctcaatgacgcgggcgcctgtgtgcccgcccaggagtgcccctgctacgctcacggcaccgtgctggctcctggagaggtggtgcacgacgagggcgccgtgtgttcatgtacgggtgggaagctaagctgcctgggagcctctctgcagaaaagcacagggtgtgcagcccccatggtgtacctggactgcagcaacagctcggcgggcacccctggggccgagtgcctccggagctgccacacgctggacgtgggctgtttcagcacacactgcgtgtccggctgtgtctgtcccccggggctggtgtcggatgggagtgggggctgcattgccgaggaggactgcccctgtgtgcacaacgaggccacctacaagcctggagagaccatcagggtcgactgcaacacctgcacctgcaggaaccggaggtgggagtgcagccaccggctctgcctgggcacctgcgtggcctacggggatggccacttcatcacctttgatggcgatcgctacagctttgaaggcagctgcgagtacatcttggcccaggactactgtggggacaacaccacccacgggaccttccgcatcgtcaccgagaacatcccctgtgggaccaccggcaccacctgctccaaggccatcaagctcttcgtggaggtgagaacggccccagctgtgagcacccccgaccctgcagccaacgagccggcccccagggaagcttcggtcggcttccggcagcgtctgcctcccctgcagagctacgagctgatcctccaagaggggacctttaaggcggtggcgagagggccgggtggggacccaccctacaagatacgctacatggggatcttcctggtcatcgagacccacgggatggccgtgtcctgggaccggaagaccagcgtgttcatccgactgcaccaggactacaagggcagggtctgcggcctgtgcgggaacttcgacgacaatgccatcaatgactttgccacgcgtagccggtccgtggtgggggacgcactggagtttgggaacagctggaagctctccccctcctgcccggacgccctggcacccaaggacccctgcacggccaaccccttccgcaagtcctgggcccagaagcagtgcagcatcctccacggccccaccttcgccgcctgccgctcccaggttgactccaccaagtactacgaggcctgcgtgaacgacgcgtgtgcctgcgactcgggtggcgactgcgagtgtttctgcacggctgtggctgcctacgcccaggcctgccacgacgcgggcctgtgtgtgtcctggcggactccggacacctgccccttgttctgtgacttctacaacccacatgggggctgtgagtggcactaccagccctgcggggcaccctgcctaaaaacctgccggaaccccagtgggcactgcctggtggacctgcctggcctggaaggctgctacccgaagtgcccacccagccagcccttcttcaatgaggaccagatgaagtgcgtggcccagtgtggctgctacgacaaggacggaaactactatgacgtcggtgcaagggtccccacagcggagaactgccagagctgtaactgcacacccagtggcatccagtgcgctcacagccttgaggcctgcacctgcacctatgaggacaggacctacagctaccaggacgtcatctacaacaccaccgatgggcttggcgcctgcttgatcgccatctgcggaagcaacggcaccatcatcaggaaggctgtggcatgtcctggaactccagccacaacgccattcaccttcaccaccgcctgggtcccccactccacgacaagcccggccctcccggtctccaccgtgtgtgtccgcgaggtctgccgctggtccagctggtacaatgggcaccgcccagagcccggcctgggaggcggagactttgagacgtttgaaaacctgaggcagagagggtaccaggtatgccctgtgctggctgacatcgagtgccgggcggcgcagcttcccgacatgccgctggaggagctgggccagcaggtggactgtgaccgcatgcgggggctgatgtgcgccaacagccaacagagtcccccgctctgtcacgactacgagctgcgggttctctgctgcgaatacgtgccctgtggcccctccccggccccaggcaccagccctcagccctccctcagtgccagcacggagcctgctgtgcctaccccaacccagaccacagcaaccgaaaagaccaccctatgggtgaccccgagcatccggtcgacggcggccctcacctcgcagactgggtccagctcaggccccgtgacggtcaccccctcggccccaggtaccaccacctgccagccccggtgtcagtggacagagtggtttgatgaggactaccccaagtctgaacaacttggaggggacgttgagtcctacgataagatcagggccgctggagggcacttatgccagcagcctaaggacatagagtgccaggccgagagcttccccaactggaccctggcacaggtggggcagaaggtgcactgtgacgtccacttcggcctggtgtgcaggaactgggagcaggagggcgtcttcaagatgtgctacaactacaggatccgggtcctctgctgcagtgacgaccactgcaggggacgtgccacaaccccgccaccgaccacagagctggagacggccaccaccaccaccacccaggccctgttctcaacgccgcagcctacgagtagcccggggctgaccagggctcccccggccagcaccacagcagtccccaccctctcagaaggactgacatcccccagatacacaagcacccttggtacagccaccacgggaggccccacgacgcctgcaggctccacagaacccactgtcccaggggtggccacatccacccttccaacacgctcagcccttccagggacgacggggagcttgggcacatggcgcccctcacagccacccacgctggccccaacaacaatggcaacctccagagctcgcccgacaggcacagccagcaccgcttccaaagagccgctgaccacgagcctggcgccaacactcacgagcgagctgtccacctctcaggccgagaccagcacgcccaggacagagacgacaatgagccccttgactaacaccaccaccagccagggcacgacccgctgtcaaccgaagtgtgagtggacagagtggtttgacgtggacttcccaacctcaggggttgcaggcggggacatggaaacttttgaaaacatcagggctgctgggggcaagatgtgctgggcaccaaagagcatagagtgccgggcggagaactaccccgaggtaagcatcgaccaggtcgggcaggtgctgacctgcagcctggagacggggctgacctgcaagaacgaagaccagacaggcaggttcaacatgtgcttcaactacaacgtgcgtgtgctttgctgtgacgactacagccactgccccagtaccccagccaccagctccacggccacgccctcctcaactccggggacgacctggatcctcacaaagccgaccacaacagccactacgactgcgtccactggatccacggccaccccgacctccaccctgagaacagctccccctcccaaagtgctgaccaccacggccaccacacccacagtcaccagctccaaagccactccctcctccagtccagggactgcaaccgcccttccagcactgagaagcacagccaccacacccacagctaccagcgttacacccatcccctcttcctccctgggcaccacctggacccgcctatcacagaccaccacacccacggccaccatgtccacagccacaccctcctccactccagagactgcccacacctccacagtgcttaccgccacggccaccacaactggggccaccggctctgtggccaccccctcctccaccccaggaacagctcacactaccaaagtgccaactaccacaaccacgggcttcacagccaccccctcctccagcccagggacggcactcacgcctccagtgtggatcagcacaaccaccacacccacaaccagaggctccacggtgaccccctcctccatcccggggaccacccacaccgccacagtgctgaccaccaccaccacaactgtggccactggttctatggcaacaccctcctctagcacacagaccagtgggaccacccacacacccccagtgccgaacaccatggccaccacacacgggcgatccctgccccccagcagtccccacacggtgcgcacagcctggacttcggccacctcgggcatcttgggcaccacccacatcacagagccttccacggtgacttcccacaccctagcagcaaccaccggtaccacccagcactcgactccagccctttccagccctcaccctagcagcagaaccaccgagtcacccccttctccagggacgaccaccccgggccacaccacggccacctccaggaccacagccacggccacacccagcaagacccgcacctcgaccctgctgcccagcagccccacatcggcccccataaccacggtggtgaccatgggctgtgagccccagtgtgcctggtcagagtggctggactacagctaccccatgccggggccctctggcggggactttgacacctactccaacatccgtgcggccggaggggccgtctgtgagcagcccctgggcctcgagtgccgtgcccaggcccagcctggtgtccccctgcgggagttgggccaggtcgtggaatgcagcctggactttggcctggtctgcaggaaccgtgagcaggtggggaagttcaagatgtgcttcaactatgaaatccgtgtgttctgctgcaactacggccactgccccagcaccccggccaccagctctacggccatgccctcctccactccggggacgacctggatcctcacagagctgaccacaacagccactacgactgagtccactggatccacggccaccccgtcctccaccccagggaccacctggatcctcacagagccgagcactacagccaccgtgacggtgcccaccggatccacggccaccgcctcctccacccaggcaactgctggcaccccacatgtgagcaccacggccacgacacccacagtcaccagctccaaagccactcccttctccagtccagggactgcaaccgcccttccagcactgagaagcacagccaccacacccacagctaccagctttacagccatcccctcctcctccctgggcaccacctggacccgcctatcacagaccaccacacccacggccaccatgtccacagccacaccctcctccactccagagactgtccacacctccacagtgcttaccaccacggccaccacaaccggggccaccggctctgtggccaccccctcctccaccccaggaacagctcacactaccaaagtgctgactaccacaaccacgggcttcacagccaccccctcctccagcccagggacggcacgcacgcttccagtgtggatcagcacaaccaccacacccacaaccagaggttccacggtgaccccctcctccatcccggggaccacccacacccccacagtgctgaccaccaccaccacaactgtggccactggttctatggcaacaccctcctctagcacacagaccagtgggaccacccacacacccccagtgccgaacaccacggccaccacacacgggcgatccctgtcccccagcagtccccacacggtgcgcacagcctggacttcggccacctcaggcaccttgggcaccacccacatcacagagccttccacggggacttcccacaccccagcagcaaccaccggtaccacccagcactcgactccagccctgtccagccctcaccctagcagcaggaccaccgagtcacccccttctccagggacgaccaccccgggccacaccagggccacctccaggaccacggccacggccacacccagcaagacccgcacctcgaccctgctgcccagcagccccacatcggccccaataaccacggtggtgaccatgggctgtgagccccagtgtgcctggtcagagtggctggactacagctaccccatgccggggccctctggcggggactttgacacctactccaacatccgtgcggccggaggggccgtctgtgagcagcccctgggcctcgagtgccgtgcccaggcccagcctggtgtccccctgcgggagttgggccaggtcgtggaatgcagcctggactttggcctggtctgcaggaaccgtgagcaggtggggaagttcaagatgtgcttcaactatgaaatccgtgtgttctgctgcaactacggccactgccccagcaccccggccaccagctctacggccacgccctcctccactccagggacgacctggatcctcacagagcagaccacagcagccactacgaccgcaaccactggatccacggccatcccgtcctccaccccgggaacagctccccctcccaaagtgctgaccagcacggccaccacacccacagccaccagttccaaagccacttcctcctccagtccaaggactgcaaccacccttccagtgctgacaagcacagccaccaaatccacagctaccagctttacacccatcccctccttcacccttgggaccaccgggaccctcccagaacagaccaccacacccatggccaccatgtccacaatccacccctcctccactccggagaccacccacacctccacagtgctgaccacgaaggccaccacgacaagggccaccagttccatgtccaccccctcctccactccggggacgacctggatcctcacagagctgaccacagcagccactacaactgcagccactggccccacggccaccccgtcctccaccccagggaccacctggatcctcacagagcccagcactacagccaccgtgacggtgcccaccggatccacggccaccgcctcctccacccgggcaactgctggcaccctcaaagtgctgaccagcacggccaccacacccacagtcatcagctccagagccactccctcctccagtccagggactgcaaccgcccttccagcactgagaagcacagccaccacacccacagctaccagcgttacagccatcccctcttcctccctgggcaccgcctggacccgcctatcacagaccaccacacccacggccaccatgtccacagccacaccctcctctactccagagactgtccacacctccacagtgcttaccaccacgaccaccacaaccagggccaccggctctgtggccaccccctcctccaccccaggaacagctcacactaccaaagtgccgactaccacaaccacgggcttcacagccaccccctcctccagcccagggacggcactcacgcctccagtgtggatcagcacaaccaccacacccacaaccagaggctccacggtgaccccctcctccatcccggggaccacccacaccgccacagtgctgaccaccaccaccacaactgtggccactggttctatggcaacaccctcctctagcacacagaccagtgggaccacccacacacccccagtgccgaacaccacggccaccacacacgggcggtccctgccccccagcagtccccacacggtgcgcacagcctggacttcggccacctcgggcatcttgggcaccacccacatcacagagccttccacggtgacttcccacaccccagcagcaaccaccagtaccacccagcactcgactccagccctgtccagccctcaccctagcagcaggaccaccgagtcacccccttctccagggacgaccaccccgggccacaccaggggcacctccaggaccacagccacagccacacccagcaagacccgcacctcgaccctgctgcccagcagccccacatcggcccccataaccacggtggtgaccacgggctgtgagccccagtgtgcctggtcagagtggctggactacagctaccccatgccggggccctctggcggggactttgacacctactccaacatccgtgcggccggaggggcagtctgtgagcagcccctgggcctcgagtgccgtgcccaggcccagcctggtgtccccctgcgggagttgggccaggtcgtggaatgcagcctggactttggcctggtctgcaggaaccgtgagcaggtggggaagttcaagatgtgcttcaactatgaaatccgtgtgttctgctgcaactacggccactgccccagcaccccggccaccagctctacggccacgccctcctcaactccggggacgacctggatcctcacaaagctgaccacaacagccactacgactgagtccactggatccacggccaccccgtcctccaccccagggaccacctggatcctcacagagccgagcactacagccaccgtgacggtgcccaccggatccacggccaccgcctcctccacccaggcaactgctggcaccccacatgtgagcaccacggccacgacacccacagtcaccagctccaaagccactcccttctccagtccagggactgcaaccgcccttccagcactgagaagcacagccaccacacccacagctaccagctttacagccatcccctcctcctccctgggcaccacctggacccgcctatcacagaccaccacacccacggccaccatgtccacagccacaccctcctccactccagagactgcccacacctccacagtgcttaccaccacggccaccacaaccagggccaccggctctgtggccaccccctcttccaccccaggaacagctcacactaccaaagtgccgactaccacaaccacgggcttcacagtcaccccctcctccagcccagggacggcacgcacgcctccagtgtggatcagcacaaccaccacacccacaaccagtggctccacggtgaccccctcctccgtcccggggaccacccacacccccacagtgctgaccaccaccaccacaactgtggccactggttctatggcaacaccctcctctagcacacagaccagtgggaccacccacacacccccagtgccgaacaccacggccaccacacacgggcgatccctgtcccccagcagtccccacacggtgcgcacagcctggacttcggccacctcaggcaccttgggcaccacccacatcacagagccttccacggggacttcccacaccccagcagcaaccaccggtaccacccagcactcgactccagccctgtccagccctcaccctagcagcaggaccaccgagtcacccccttccccagggacgaccaccccgggccacaccacggccacctccaggaccacggccacggccacacccagcaagacccgcacctcgaccctgctgcccagcagccccacatcggcccccataaccacggtggtgaccacgggctgtgagccccagtgtgcctggtcagagtggctggactacagctaccccatgccggggccctctggcggggactttgacacctactccaacatccgtgcggccggaggggccgtctgtgagcagcccctgggcctcgagtgccgtgcccaggcccagcctggtgtccccctgggggagttgggccaggtcgtggaatgcagcctggactttggcctggtctgcaggaaccgtgagcaggtggggaagttcaagatgtgcttcaactatgaaatccgtgtgttctgctgcaactacggccactgccccagcaccccggccaccagctctacggccatgccctcctccactccggggacgacctggatcctcacagagctgaccacaacagccactacgactgcatccactggatccacggccaccccgtcctccaccccgggaacagctccccctcccaaagtgctgaccagcccggccaccacacccacagccaccagttccaaagccacttcctcctccagtccaaggactgcaaccacccttccagtgctgacaagcacagccaccaaatccacagctaccagcgttacacccatcccctcctccacccttgggaccaccgggaccctcccagaacagaccaccacacccgtggccaccatgtccacaatccacccctcctccactccggagaccacccacacctccacagtgctgaccacgaaggccaccacgacaagggccaccagttccacgtccaccccctcctccactccggggacgacctggatcctcacagagctgaccacagcagccactacaactgcagccactggccccacggccaccccgtcctccaccccagggaccacctggatcctcacagagctgaccacaacagccactacgactgcgtccactggatccacggccaccccgtcctccaccccagggaccacctggatcctcacagagccgagcactacagccaccgtgacggtgcccaccggatccacggccaccgcctcctccacccaggcaactgctggcaccccacatgtgagcaccacggccacgacacccacagtcaccagctccaaagccactccctcctccagtccagggactgcaactgcccttccagcactgagaagcacagccaccacacccacagctaccagctttacagccatcccctcctcctccctgggcaccacctggacccgcctatcacagaccaccacacccacggccaccatgtccacagccacaccctcctccactccagagactgtccacacctccacagtgcttaccgccacggccaccacaaccggggccaccggctctgtggccaccccctcctccaccccaggaacagctcacactaccaaagtgccgactaccacaaccacgggcttcacagccaccccctcctccagcccagggacggcactcacgcctccaaccaccacacccatgtccaccatgtccacaatccacacctcctctactccagagaccacccacacctccacagtgctgaccaccacagccaccatgacaagggccaccaattccacggccacaccctcctccactctggggacgacccggatcctcactgagctgaccacaacagccactacaactgcagccactggatccacggccaccctgtcctccaccccagggaccacctggatcctcacagagccgagcactatagccaccgtgatggtgcccaccggttccacggccaccgcctcctccactctgggaacagctcacacccccaaagtggtgaccaccatggccactatgcccacagccactgcctccacggttcccagctcgtccaccgtggggaccacccgcacccctgcagtgctccccagcagcctgccaaccttcagcgtgtccactgtgtcctcctcagtcctcaccaccctgagacccactggcttccccagctcccacttctctactccctgcttctgcagggcatttggacagtttttctcgcccggggaagtcatctacaataagaccgaccgagccggctgccatttctacgcagtgtgcaatcagcactgtgacattgaccgcttccagggcgcctgtcccacctccccaccgccagtgtcctccgccccgctgtcctcgccctcccctgcccctggctgtgacaatgccatccctctccggcaggtgaatgagacctggaccctggagaactgcacggtggccaggtgcgtgggtgacaaccgtgtcgtcctgctggacccaaagcctgtggccaacgtcacctgcgtgaacaagcacctgcccatcaaagtgtcggacccgagccagccctgtgacttccactatgagtgcgagtgtgagtgcgtcggtggccgcgggattaccccgggggcaggcatctgcagcatgtggggcggctcccactattccacctttgacggcacctcttacaccttccggggcaactgcacctatgtcctcatgagagagatccatgcacgctttgggaatctcagcctctacctggacaaccactactgcacggcctctgccactgccgctgccgcccgctgcccccgcgccctcagcatccactacaagtccatggatatcgtcctcactgtcaccatggtgcatgggaaggaggagggcctgatcctgtttgaccaaattccggtgagcagcggtttcagcaagaacggcgtgcttgtgtctgtgctggggaccaccaccatgcgtgtggacattcctgccctgggcgtgagcgtcaccttcaatggccaagtcttccaggcccggctgccctacagcctcttccacaacaacaccgagggccagtgcggcacctgcaccaacaaccagagggacgactgtctccagcgggacggaaccactgccgccagttgcaaggacatggccaagacgtggctggtccccgacagcagaaaggatggctgctgggccccgactggcacaccccccactgccagccccgcagccccggtgtctagcacacccacccccaccccatgcccaccacagccgctctgtgatctgatgctgagccaggtctttgctgagtgccacaaccttgtgcccccgggcccattcttcaacgcctgcatcagcgaccactgcaggggccgccttgaggtgccctgccagagcctggaggcttacgcagagctctgccgcgcccggggagtgtgcagtgactggcgaggtgcaaccggtggcctgtgcgacctcacctgcccacccaccaaagtgtacaagccatgcggccccatacagcctgccacctgcaactctaggaaccagagcccacagctggaggggatggcggagggctgcttctgccctgaggaccagatcctcttcaacgcacacatgggcatctgcgtgcaggcctgcccctgcgtgggacccgatgggtttcctaaatttcccggggagcggtgggtcagcaactgccagtcctgcgtgtgtgacgagggttcagtgtcggtgcagtgcaagcccctgccctgtgacgcccagggtcagcccccgccgtgcaaccgtcccggcttcgtaaccgtgaccaggccccgggccgagaacccctgctgccccgagacggtgtgcgtgtgcaacacaaccacctgcccccagagcctgcctgtgtgcccgccagggcaggagtccatctgcacccaggaggagggcgactgctgtcccaccttccgctgcagacctcagctgtgttcgtacaatggcaccttctacggggttggtgcaaccttcccaggcgcccttccctgccacatgtgtacctgcctctctggggacacccaggacccaacggtgcaatgtcaggaggatgcctgcaacaatactacctgtccccagggctttgagtacaagagagtggccgggcagtgctgtggggagtgcgtccagaccgcctgcctcacgcccgatggccagccagtccagctgaatgaaacctgggtcaacagccatgtggacaactgcaccgtgtacctctgtgaggctgagggtggagtccatttgctgaccccacagcctgcatcctgcccagatgtgtccagctgcagggggagcctcaggaaaaccggctgctgctactcctgtgaggaggactcctgtcaagtccgcatcaacacgaccatcctgtggcaccagggctgcgagaccgaggtcaacatcaccttctgcgagggctcctgccccggagcgtccaagtactcagcagaggcccaggccatgcagcaccagtgcacctgctgccaggagaggcgggtccacgaggagacggtgcccttgcactgtcctaacggctcagccatcctgcacacctacacccacgctgtccaggtcctctgtgggctgcttgcctggggcctgcaggctggaggacacatccggggggcagtccaggacccccagcagccactgaaggaccaggaagcctctgggaaggccaggcaggggggtggctacaggcagaccgtggcctggggagacaaaagcaatgctcgtgcctggctgcagaagcctgtggtgtgggtgcagagcggggccttccccacaccggggcctgcctctgccctgtgcccttgg

SEQ ID NO: 18690 - DNA, 17924 bp, Homo sapiens
  source 1..17924: mol_type = unassigned DNA
acccggcccggctccctccctgcccgtccccgtccccccacccgtgccagcccccaggatgggtgccccgagcgcgtgccggacgctggtgttggctctggcggccatgctcgtggtgccgcaggcagagacccagggccctgtggagccgagctgggagaatgcagggcacaccatggatggcggtgccccgacgtcctcgcccacccggcgcgtgagctttgttccacccgtcactgtcttccccagcctgagccccctgaacccggcgcacaatgggcgggtgtgcagcacctggggtgacttccactacaagaccttcgacggcgacgtcttccgcttccctggcctttgcaactacgtgttctctgagcactgccgcgccgcctacgaggacttcaacgtccagctacgccgaggcctagtgggctccaggcctgtggtcacccgtgttgtcatcaaggcccaggggctggtgctggaggcgtccaacggctccgtcctcatcaatgggcagcgggaggagctgccttacagccgcactggcctcctggtggagcagagcggggactacatcaaggtcagcatccggctggtgctgacattcctgtggaacggagaggacagtgccctgctggagctggatcccaaatacgccaaccagacctgtggcctgtgtggggacttcaacggcctcccggccttcaacgagttctatgcccacaacgccaggctgaccccgctccagtttgggaacctgcagaagttggatgggcccacggagcagtgcccggacccgctgcccttgccggccggcaactgcacggacgaggagggcatctgccaccgcaccctgctggggccggcctttgcggagtgccacgcactggtggacagcactgcgtacctggccgcctgcgcccaggacctgtgccgctgccccacctgcccgtgtgccacctttgtggaatactcacgccagtgcgcccacgcggggggccagccgcggaactggaggtgccctgagctctgcccccggacctgccccctcaacatgcagcaccaggagtgtggctcaccctgcacggacacctgctccaacccccagcgcgcgcagctctgcgaggaccactgtgtggacggctgcttctgccccccaggcaggtcttgcacggtgctggatgacatcacgcactctggctgcctgcccctcgggcagtgcccctgcacccacggcggccgcacctacagcccgggcacctccttcaacaccacctgcagctcctgcacctgctccggggggctatggcagtgccaggacctgccgtgccctggcacctgctctgtgcagggcggggcccacatctccacctatgatgagaaactctacgacctgcatggtgactgcagctacgttctgtccaagaaatgtgccgacagcagcttcaccgtgctggctgagctgcggaagtgcggcctgacggacaacgagaactgcctgaaagcggtgacgctcagcctggacggcggggacacggccatccgggtccaagcggacggcggcgtgttcctcaactccatctacacgcagctgcccctgtcggcagccaacatcaccctgttcacaccctcgagcttcttcatcgtggtgcagacaggcctggggctgcagctgctggtgcagctggtgccactcatgcaggtgtttgtcaggctggaccccgcccaccagggccagatgtgcggcctgtgtgggaacttcaaccagaaccaggctgacgacttcacggccctcagcggggtggtggaggccacgggcgcagccttcgccaacacctggaaggcccaggctgcctgtgccaatgccaggaacagctttgaggacccctgctccctcagtgtggagaatgagaactacgcccggcactggtgctcgcgcctgaccgatcccaacagtgccttctcgcgctgccactccatcatcaaccccaagcccttccactcgaactgcatgtttgacacctgcaactgtgagcggagcgaggactgcctgtgcgccgcgctgtcctcctatgtgcacgcctgtgccgccaagggcgtacagctcagcgactggagggacggcgtctgcaccaagtacatgcagaactgccccaagtcccagcgctacgcctacgtggtggatgcctgccagcccacttgccgcggcctgagtgaggccgacgtcacctgcagcgtttccttcgtgcctgtggacggctgcacctgccccgcgggcaccttcctcaatgacgcgggcgcctgtgtgcccgcccaggagtgcccctgctacgctcacggcaccgtgctggctcctggagaggtggtgcacgacgagggcgccgtgtgttcatgtacgggtgggaagctaagctgcctgggagcctctctgcagaaaagcacagggtgtgcagcccccatggtgtacctggactgcagcaacagctcggcgggcacccctggggccgagtgcctccggagctgccacacgctggacgtgggctgtttcagcacacactgcgtgtccggctgtgtctgtcccccggggctggtgtcggatgggagtgggggctgcattgccgaggaggactgcccctgtgtgcacaacgaggccacctacaagcctggagagaccatcagggtcgactgcaacacctgcacctgcaggaaccggaggtgggagtgcagccaccggctctgcctgggcacctgcgtggcctacggggatggccacttcatcacctttgatggcgatcgctacagctttgaaggcagctgcgagtacatcttggcccaggactactgtggggacaacaccacccacgggaccttccgcatcgtcaccgagaacatcccctgtgggaccaccggcaccacctgctccaaggccatcaagctcttcgtggagagctacgagctgatcctccaagaggggacctttaaggcggtggcgagagggccgggtggggacccaccctacaagatacgctacatggggatcttcctggtcatcgagacccacgggatggccgtgtcctgggaccggaagaccagcgtgttcatccgactgcaccaggactacaagggcagggtctgcggcctgtgcgggaacttcgacgacaatgccatcaatgactttgccacgcgtagccggtccgtggtgggggacgcactggagtttgggaacagctggaagctctccccctcctgcccggacgccctggcacccaaggacccctgcacggccaaccccttccgcaagtcctgggcccagaagcagtgcagcatcctccacggccccaccttcgccgcctgccgctcccaggttgactccaccaagtactacgaggcctgcgtgaacgacgcgtgtgcctgcgactcgggtggcgactgcgagtgtttctgcacggctgtggctgcctacgcccaggcctgccacgacgcgggcctgtgtgtgtcctggcggactccggacacctgccccttgttctgtgacttctacaacccacatgggggctgtgagtggcactaccagccctgcggggcaccctgcctaaaaacctgccggaaccccagtgggcactgcctggtggacctgcctggcctggaaggctgctacccgaagtgcccacccagccagcccttcttcaatgaggaccagatgaagtgcgtggcccagtgtggctgctacgacaaggacggaaactactatgacgtcggtgcaagggtccccacagcggagaactgccagagctgtaactgcacacccagtggcatccagtgcgctcacagccttgaggcctgcacctgcacctatgaggacaggacctacagctaccaggacgtcatctacaacaccaccgatgggcttggcgcctgcttgatcgccatctgcggaagcaacggcaccatcatcaggaaggctgtggcatgtcctggaactccagccacaacgccattcaccttcaccaccgcctgggtcccccactccacgacaagcccggccctcccggtctccaccgtgtgtgtccgcgaggtctgccgctggtccagctggtacaatgggcaccgcccagagcccggcctgggaggcggagactttgagacgtttgaaaacctgaggcagagagggtaccaggtatgccctgtgctggctgacatcgagtgccgggcggcgcagcttcccgacatgccgctggaggagctgggccagcaggtggactgtgaccgcatgcgggggctgatgtgcgccaacagccaacagagtcccccgctctgtcacgactacgagctgcgggttctctgctgcgaatacgtgccctgtggcccctccccggccccaggcaccagccctcagccctccctcagtgccagcacggagcctgctgtgcctaccccaacccagaccacagcaaccgaaaagaccaccctatgggtgaccccgagcatccggtcgacggcggccctcacctcgcagactgggtccagctcaggccccgtgacggtcaccccctcggccccaggtaccaccacctgccagccccggtgtcagtggacagagtggtttgatgaggactaccccaagtctgaacaacttggaggggacgttgagtcctacgataagatcagggccgctggagggcacttatgccagcagcctaaggacatagagtgccaggccgagagcttccccaactggaccctggcacaggtggggcagaaggtgcactgtgacgtccacttcggcctggtgtgcaggaactgggagcaggagggcgtcttcaagatgtgctacaactacaggatccgggtcctctgctgcagtgacgaccactgcaggggacgtgccacaaccccgccaccgaccacagagctggagacggccaccaccaccaccacccaggccctgttctcaacgccgcagcctacgagtagcccggggctgaccagggctcccccggccagcaccacagcagtccccaccctctcagaaggactgacatcccccagatacacaagcacccttggtacagccaccacgggaggccccacgacgcctgcaggctccacagaacccactgtcccaggggtggccacatccacccttccaacacgctcagcccttccagggacgacggggagcttgggcacatggcgcccctcacagccacccacgctggccccaacaacaatggcaacctccagagctcgcccgacaggcacagccagcaccgcttccaaagagccgctgaccacgagcctggcgccaacactcacgagcgagctgtccacctctcaggccgagaccagcacgcccaggacagagacgacaatgagccccttgactaacaccaccaccagccagggcacgacccgctgtcaaccgaagtgtgagtggacagagtggtttgacgtggacttcccaacctcaggggttgcaggcggggacatggaaacttttgaaaacatcagggctgctgggggcaagatgtgctgggcaccaaagagcatagagtgccgggcggagaactaccccgaggtaagcatcgaccaggtcgggcaggtgctgacctgcagcctggagacggggctgacctgcaagaacgaagaccagacaggcaggttcaacatgtgcttcaactacaacgtgcgtgtgctttgctgtgacgactacagccactgccccagtaccccagccaccagctccacggccacgccctcctcaactccggggacgacctggatcctcacaaagccgaccacaacagccactacgactgcgtccactggatccacggccaccccgacctccaccctgagaacagctccccctcccaaagtgctgaccaccacggccaccacacccacagtcaccagctccaaagccactccctcctccagtccagggactgcaaccgcccttccagcactgagaagcacagccaccacacccacagctaccagcgttacacccatcccctcttcctccctgggcaccacctggacccgcctatcacagaccaccacacccacggccaccatgtccacagccacaccctcctccactccagagactgcccacacctccacagtgcttaccgccacggccaccacaactggggccaccggctctgtggccaccccctcctccaccccaggaacagctcacactaccaaagtgccaactaccacaaccacgggcttcacagccaccccctcctccagcccagggacggcactcacgcctccagtgtggatcagcacaaccaccacacccacaaccagaggctccacggtgaccccctcctccatcccggggaccacccacaccgccacagtgctgaccaccaccaccacaactgtggccactggttctatggcaacaccctcctctagcacacagaccagtggtactcccccatcactgaccaccacggccactacgatcacggccaccggctccaccaccaacccctcctcaactcctgggacaactcccatccccccagtgctgaccaccaccgccaccacacctgcagccaccagcaacacagtgactccctcctctgccctagggaccacccacacacccccagtgccgaacaccatggccaccacacacgggcgatccctgccccccagcagtccccacacggtgcgcacagcctggacttcggccacctcgggcatcttgggcaccacccacatcacagagccttccacggtgacttcccacaccctagcagcaaccaccggtaccacccagcactcgactccagccctttccagccctcaccctagcagcagaaccaccgagtcacccccttctccagggacgaccaccccgggccacaccacggccacctccaggaccacagccacggccacacccagcaagacccgcacctcgaccctgctgcccagcagccccacatcggcccccataaccacggtggtgaccatgggctgtgagccccagtgtgcctggtcagagtggctggactacagctaccccatgccggggccctctggcggggactttgacacctactccaacatccgtgcggccggaggggccgtctgtgagcagcccctgggcctcgagtgccgtgcccaggcccagcctggtgtccccctgcgggagttgggccaggtcgtggaatgcagcctggactttggcctggtctgcaggaaccgtgagcaggtggggaagttcaagatgtgcttcaactatgaaatccgtgtgttctgctgcaactacggccactgccccagcaccccggccaccagctctacggccatgccctcctccactccggggacgacctggatcctcacagagctgaccacaacagccactacgactgagtccactggatccacggccaccccgtcctccaccccagggaccacctggatcctcacagagccgagcactacagccaccgtgacggtgcccaccggatccacggccaccgcctcctccacccaggcaactgctggcaccccacatgtgagcaccacggccacgacacccacagtcaccagctccaaagccactcccttctccagtccagggactgcaaccgcccttccagcactgagaagcacagccaccacacccacagctaccagctttacagccatcccctcctcctccctgggcaccacctggacccgcctatcacagaccaccacacccacggccaccatgtccacagccacaccctcctccactccagagactgtccacacctccacagtgcttaccaccacggccaccacaaccggggccaccggctctgtggccaccccctcctccaccccaggaacagctcacactaccaaagtgctgactaccacaaccacgggcttcacagccaccccctcctccagcccagggacggcacgcacgcttccagtgtggatcagcacaaccaccacacccacaaccagaggttccacggtgaccccctcctccatcccggggaccacccacacccccacagtgctgaccaccaccaccacaactgtggccactggttctatggcaacaccctcctctagcacacagaccagtggtactcccccatcactgaccaccacggccactacgatcacggccaccggctccaccaccaacccctcctcaactccagggacaacacctatccccccagtgctgaccaccaccgccaccacacctgcagccaccagcagcacagtgactccctcctctgccctagggaccacccacacacccccagtgccgaacaccacggccaccacacacgggcgatccctgtcccccagcagtccccacacggtgcgcacagcctggacttcggccacctcaggcaccttgggcaccacccacatcacagagccttccacggggacttcccacaccccagcagcaaccaccggtaccacccagcactcgactccagccctgtccagccctcaccctagcagcaggaccaccgagtcacccccttctccagggacgaccaccccgggccacaccagggccacctccaggaccacggccacggccacacccagcaagacccgcacctcgaccctgctgcccagcagccccacatcggccccaataaccacggtggtgaccatgggctgtgagccccagtgtgcctggtcagagtggctggactacagctaccccatgccggggccctctggcggggactttgacacctactccaacatccgtgcggccggaggggccgtctgtgagcagcccctgggcctcgagtgccgtgcccaggcccagcctggtgtccccctgcgggagttgggccaggtcgtggaatgcagcctggactttggcctggtctgcaggaaccgtgagcaggtggggaagttcaagatgtgcttcaactatgaaatccgtgtgttctgctgcaactacggccactgccccagcaccccggccaccagctctacggccacgccctcctccactccagggacgacctggatcctcacagagcagaccacagcagccactacgaccgcaaccactggatccacggccatcccgtcctccaccccgggaacagctccccctcccaaagtgctgaccagcacggccaccacacccacagccaccagttccaaagccacttcctcctccagtccaaggactgcaaccacccttccagtgctgacaagcacagccaccaaatccacagctaccagctttacacccatcccctccttcacccttgggaccaccgggaccctcccagaacagaccaccacacccatggccaccatgtccacaatccacccctcctccactccggagaccacccacacctccacagtgctgaccacgaaggccaccacgacaagggccaccagttccatgtccaccccctcctccactccggggacgacctggatcctcacagagctgaccacagcagccactacaactgcagccactggccccacggccaccccgtcctccaccccagggaccacctggatcctcacagagcccagcactacagccaccgtgacggtgcccaccggatccacggccaccgcctcctccacccgggcaactgctggcaccctcaaagtgctgaccagcacggccaccacacccacagtcatcagctccagagccactccctcctccagtccagggactgcaaccgcccttccagcactgagaagcacagccaccacacccacagctaccagcgttacagccatcccctcttcctccctgggcaccgcctggacccgcctatcacagaccaccacacccacggccaccatgtccacagccacaccctcctctactccagagactgtccacacctccacagtgcttaccaccacgaccaccacaaccagggccaccggctctgtggccaccccctcctccaccccaggaacagctcacactaccaaagtgccgactaccacaaccacgggcttcacagccaccccctcctccagcccagggacggcactcacgcctccagtgtggatcagcacaaccaccacacccacaaccagaggctccacggtgaccccctcctccatcccggggaccacccacaccgccacagtgctgaccaccaccaccacaactgtggccactggttctatggcaacaccctcctctagcacacagaccagtggtactcccccatcactgaccaccacggccactacgatcacagccaccggctccaccaccaacccctcctcaactccagggacaactcccatccccccagtgctgaccaccaccgccaccacacctgcagccaccagcagcacagtgactccctcctctgccctagggaccacccacacacccccagtgccgaacaccacggccaccacacacgggcggtccctgccccccagcagtccccacacggtgcgcacagcctggacttcggccacctcgggcatcttgggcaccacccacatcacagagccttccacggtgacttcccacaccccagcagcaaccaccagtaccacccagcactcgactccagccctgtccagccctcaccctagcagcaggaccaccgagtcacccccttctccagggacgaccaccccgggccacaccaggggcacctccaggaccacagccacagccacacccagcaagacccgcacctcgaccctgctgcccagcagccccacatcggcccccataaccacggtggtgaccacgggctgtgagccccagtgtgcctggtcagagtggctggactacagctaccccatgccggggccctctggcggggactttgacacctactccaacatccgtgcggccggaggggcagtctgtgagcagcccctgggcctcgagtgccgtgcccaggcccagcctggtgtccccctgcgggagttgggccaggtcgtggaatgcagcctggactttggcctggtctgcaggaaccgtgagcaggtggggaagttcaagatgtgcttcaactatgaaatccgtgtgttctgctgcaactacggccactgccccagcaccccggccaccagctctacggccacgccctcctcaactccggggacgacctggatcctcacaaagctgaccacaacagccactacgactgagtccactggatccacggccaccccgtcctccaccccagggaccacctggatcctcacagagccgagcactacagccaccgtgacggtgcccaccggatccacggccaccgcctcctccacccaggcaactgctggcaccccacatgtgagcaccacggccacgacacccacagtcaccagctccaaagccactcccttctccagtccagggactgcaaccgcccttccagcactgagaagcacagccaccacacccacagctaccagctttacagccatcccctcctcctccctgggcaccacctggacccgcctatcacagaccaccacacccacggccaccatgtccacagccacaccctcctccactccagagactgcccacacctccacagtgcttaccaccacggccaccacaaccagggccaccggctctgtggccaccccctcttccaccccaggaacagctcacactaccaaagtgccgactaccacaaccacgggcttcacagtcaccccctcctccagcccagggacggcacgcacgcctccagtgtggatcagcacaaccaccacacccacaaccagtggctccacggtgaccccctcctccgtcccggggaccacccacacccccacagtgctgaccaccaccaccacaactgtggccactggttctatggcaacaccctcctctagcacacagaccagtggtactcccccatcactgatcaccacggccactacgatcacggccaccggctccaccaccaacccctcctcaactccagggacaacacctatccccccagtgctgaccaccaccgccaccacacctgcagccaccagcagcacagtgactccctcctctgccctagggaccacccacacacccccagtgccgaacaccacggccaccacacacgggcgatccctgtcccccagcagtccccacacggtgcgcacagcctggacttcggccacctcaggcaccttgggcaccacccacatcacagagccttccacggggacttcccacaccccagcagcaaccaccggtaccacccagcactcgactccagccctgtccagccctcaccctagcagcaggaccaccgagtcacccccttccccagggacgaccaccccgggccacaccacggccacctccaggaccacggccacggccacacccagcaagacccgcacctcgaccctgctgcccagcagccccacatcggcccccataaccacggtggtgaccacgggctgtgagccccagtgtgcctggtcagagtggctggactacagctaccccatgccggggccctctggcggggactttgacacctactccaacatccgtgcggccggaggggccgtctgtgagcagcccctgggcctcgagtgccgtgcccaggcccagcctggtgtccccctgggggagttgggccaggtcgtggaatgcagcctggactttggcctggtctgcaggaaccgtgagcaggtggggaagttcaagatgtgcttcaactatgaaatccgtgtgttctgctgcaactacggccactgccccagcaccccggccaccagctctacggccatgccctcctccactccggggacgacctggatcctcacagagctgaccacaacagccactacgactgcatccactggatccacggccaccccgtcctccaccccgggaacagctccccctcccaaagtgctgaccagcccggccaccacacccacagccaccagttccaaagccacttcctcctccagtccaaggactgcaaccacccttccagtgctgacaagcacagccaccaaatccacagctaccagcgttacacccatcccctcctccacccttgggaccaccgggaccctcccagaacagaccaccacacccgtggccaccatgtccacaatccacccctcctccactccggagaccacccacacctccacagtgctgaccacgaaggccaccacgacaagggccaccagttccacgtccaccccctcctccactccggggacgacctggatcctcacagagctgaccacagcagccactacaactgcagccactggccccacggccaccccgtcctccaccccagggaccacctggatcctcacagagctgaccacaacagccactacgactgcgtccactggatccacggccaccccgtcctccaccccagggaccacctggatcctcacagagccgagcactacagccaccgtgacggtgcccaccggatccacggccaccgcctcctccacccaggcaactgctggcaccccacatgtgagcaccacggccacgacacccacagtcaccagctccaaagccactccctcctccagtccagggactgcaactgcccttccagcactgagaagcacagccaccacacccacagctaccagctttacagccatcccctcctcctccctgggcaccacctggacccgcctatcacagaccaccacacccacggccaccatgtccacagccacaccctcctccactccagagactgtccacacctccacagtgcttaccgccacggccaccacaaccggggccaccggctctgtggccaccccctcctccaccccaggaacagctcacactaccaaagtgccgactaccacaaccacgggcttcacagccaccccctcctccagcccagggacggcactcacgcctccagtgtggatcagcacaaccaccacacccacaaccaccacacccacaaccagtggctccacggtgaccccctcctccatcccggggaccacccacaccgccagagtgctgaccaccaccaccacaactgtggccactggttctatggcaacaccctcctctagcacacagaccagtggtactcccccatcactgaccaccacggccactacgatcacggccaccggctccaccaccaacccctcctcaactccagggacaacacccatcaccccagtgctgaccagcacggccaccacacccgcagccaccagctccaaagccacttcctcctccagtccaaggactgcaaccacccttccagtgctgacaagcacagccacaaaatccacagctaccagctttacacccatcccctcctccaccctgtggaccacgtggaccgtcccagcacagaccaccacacccatgtccaccatgtccacaatccacacctcctctactccagagaccacccacacctccacagtgctgaccaccacagccaccatgacaagggccaccaattccacggccacaccctcctccactctggggacgacccggatcctcactgagctgaccacaacagccactacaactgcagccactggatccacggccaccctgtcctccaccccagggaccacctggatcctcacagagccgagcactatagccaccgtgatggtgcccaccggttccacggccaccgcctcctccactctgggaacagctcacacccccaaagtggtgaccaccatggccactatgcccacagccactgcctccacggttcccagctcgtccaccgtggggaccacccgcacccctgcagtgctccccagcagcctgccaaccttcagcgtgtccactgtgtcctcctcagtcctcaccaccctgagacccactggcttccccagctcccacttctctactccctgcttctgcagggcatttggacagtttttctcgcccggggaagtcatctacaataagaccgaccgagccggctgccatttctacgcagtgtgcaatcagcactgtgacattgaccgcttccagggcgcctgtcccacctccccaccgccagtgtcctccgccccgctgtcctcgccctcccctgcccctggctgtgacaatgccatccctctccggcaggtgaatgagacctggaccctggagaactgcacggtggccaggtgcgtgggtgacaaccgtgtcgtcctgctggacccaaagcctgtggccaacgtcacctgcgtgaacaagcacctgcccatcaaagtgtcggacccgagccagccctgtgacttccactatgagtgcgagtgcatctgcagcatgtggggcggctcccactattccacctttgacggcacctcttacaccttccggggcaactgcacctatgtcctcatgagagagatccatgcacgctttgggaatctcagcctctacctggacaaccactactgcacggcctctgccactgccgctgccgcccgctgcccccgcgccctcagcatccactacaagtccatggatatcgtcctcactgtcaccatggtgcatgggaaggaggagggcctgatcctgtttgaccaaattccggtgagcagcggtttcagcaagaacggcgtgcttgtgtctgtgctggggaccaccaccatgcgtgtggacattcctgccctgggcgtgagcgtcaccttcaatggccaagtcttccaggcccggctgccctacagcctcttccacaacaacaccgagggccagtgcggcacctgcaccaacaaccagagggacgactgtctccagcgggacggaaccactgccgccagttgcaaggacatggccaagacgtggctggtccccgacagcagaaaggatggctgctgggccccgactggcacaccccccactgccagccccgcagccccggtgtctagcacacccacccccaccccatgcccaccacagccgctctgtgatctgatgctgagccaggtctttgctgagtgccacaaccttgtgcccccgggcccattcttcaacgcctgcatcagcgaccactgcaggggccgccttgaggtgccctgccagagcctggaggcttacgcagagctctgccgcgcccggggagtgtgcagtgactggcgaggtgcaaccggtggcctgtgcgacctcacctgcccacccaccaaagtgtacaagccatgcggccccatacagcctgccacctgcaactctaggaaccagagcccacagctggaggggatggcggagggctgcttctgccctgaggaccagatcctcttcaacgcacacatgggcatctgcgtgcaggcctgcccctgcgtgggacccgatgggtttcctaaatttcccggggagcggtgggtcagcaactgccagtcctgcgtgtgtgacgagggttcagtgtcggtgcagtgcaagcccctgccctgtgacgcccagggtcagcccccgccgtgcaaccgtcccggcttcgtaaccgtgaccaggccccgggccgagaacccctgctgccccgagacggtgtgcgtgtgcaacacaaccacctgcccccagagcctgcctgtgtgcccgccagggcaggagtccatctgcacccaggaggagggcgactgctgtcccaccttccgctgcagacctcagctgtgttcgtacaatggcaccttctacggggttggtgcaaccttcccaggcgcccttccctgccacatgtgtacctgcctctctggggacacccaggacccaacggtgcaatgtcaggaggatgcctgcaacaatactacctgtccccagggctttgagtacaagagagtggccgggcagtgctgtggggagtgcgtccagaccgcctgcctcacgcccgatggccagccagtccagctgaatgaaacctgggtcaacagccatgtggacaactgcaccgtgtacctctgtgaggctgagggtggagtccatttgctgaccccacagcctgcatcctgcccagatgtgtccagctgcagggggagcctcaggaaaaccggctgctgctactcctgtgaggaggactcctgtcaagtccgcatcaacacgaccatcctgtggcaccagggctgcgagaccgaggtcaacatcaccttctgcgagggctcctgccccggagcgtccaagtactcagcagaggcccaggccatgcagcaccagtgcacctgctgccaggagaggcgggtccacgaggagacggtgcccttgcactgtcctaacggctcagccatcctgcacacctacacccacgtggatgagtgtggctgcacgcccttctgtgtccctgcgcccatggctcccccacacacccgtggcttcccggcccaggaggccactgctgtctgagaacgttctgcctccatccccatgctctgtccacctggagccaggatgtgcattgtctgatcatgaaaaccttgggcctcctctgcggagccccccggcctgtgtgtggcaccccgcgctccgtgctcctgctgcccaccccgtgggtgaaaccggccccagaagggtgaggggccagcaggacccctttcgggagggcgccactcaggagtcctaccctgggagagcctgtggcccaccttggccttgcccctccctgatgtcactgggacgccctggaacaaactaagcatgtgcgggcctatgtgtccctgccacggccggagcgcccgcgcagcacggattccagctggccacgtccggccgctggggcagacaggctggtccaggcaaggccagctgctgccaggaagctgcgacaggcaaggcggccgcctgtccatgcctgctgcagggtaactcagggctgaggtcgcaacggccaggtcagagaggggtcagcatcccaaagccccctctgctcaacccagcccagttttgcaaataaaccctgagcattgagtacgtt

SEQ ID NO: 18691 - DNA, 17911 bp, Homo sapiens
  source 1..17911: mol_type = unassigned DNA
acccggcccggctccctccctgcccgtccccgtccccccacccgtgccagcccccaggatgggtgccccgagcgcgtgccggacgctggtgttggctctggcggccatgctcgtggtgccgcaggcagagacccagggccctgtggagccgagctgggagaatgcagggcacaccatggatggcggtgccccgacgtcctcgcccacccggcgcgtgagctttgttccacccgtcactgtcttccccagcctgagccccctgaacccggcgcacaatgggcgggtgtgcagcacctggggtgacttccactacaagaccttcgacggcgacgtcttccgcttccctggcctttgcaactacgtgttctctgagcactgccgcgccgcctacgaggacttcaacgtccagctacgccgaggcctagtgggctccaggcctgtggtcacccgtgttgtcatcaaggcccaggggctggtgctggaggcgtccaacggctccgtcctcatcaatgggcagcgggaggagctgccttacagccgcactggcctcctggtggagcagagcggggactacatcaaggtcagcatccggctggtgctgacattcctgtggaacggagaggacagtgccctgctggagctggatcccaaatacgccaaccagacctgtggcctgtgtggggacttcaacggcctcccggccttcaacgagttctatgcccacaacgccaggctgaccccgctccagtttgggaacctgcagaagttggatgggcccacggagcagtgcccggacccgctgcccttgccggccggcaactgcacggacgaggagggcatctgccaccgcaccctgctggggccggcctttgcggagtgccacgcactggtggacagcactgcgtacctggccgcctgcgcccaggacctgtgccgctgccccacctgcccgtgtgccacctttgtggaatactcacgccagtgcgcccacgcggggggccagccgcggaactggaggtgccctgagctctgcccccggacctgccccctcaacatgcagcaccaggagtgtggctcaccctgcacggacacctgctccaacccccagcgcgcgcagctctgcgaggaccactgtgtggacggctgcttctgccccccaggcacggtgctggatgacatcacgcactctggctgcctgcccctcgggcagtgcccctgcacccacggcggccgcacctacagcccgggcacctccttcaacaccacctgcagctcctgcacctgctccggggggctatggcagtgccaggacctgccgtgccctggcacctgctctgtgcagggcggggcccacatctccacctatgatgagaaactctacgacctgcatggtgactgcagctacgttctgtccaagaaatgtgccgacagcagcttcaccgtgctggctgagctgcggaagtgcggcctgacggacaacgagaactgcctgaaagcggtgacgctcagcctggacggcggggacacggccatccgggtccaagcggacggcggcgtgttcctcaactccatctacacgcagctgcccctgtcggcagccaacatcaccctgttcacaccctcgagcttcttcatcgtggtgcagacaggcctggggctgcagctgctggtgcagctggtgccactcatgcaggtgtttgtcaggctggaccccgcccaccagggccagatgtgcggcctgtgtgggaacttcaaccagaaccaggctgacgacttcacggccctcagcggggtggtggaggccacgggcgcagccttcgccaacacctggaaggcccaggctgcctgtgccaatgccaggaacagctttgaggacccctgctccctcagtgtggagaatgagaactacgcccggcactggtgctcgcgcctgaccgatcccaacagtgccttctcgcgctgccactccatcatcaaccccaagcccttccactcgaactgcatgtttgacacctgcaactgtgagcggagcgaggactgcctgtgcgccgcgctgtcctcctatgtgcacgcctgtgccgccaagggcgtacagctcagcgactggagggacggcgtctgcaccaagtacatgcagaactgccccaagtcccagcgctacgcctacgtggtggatgcctgccagcccacttgccgcggcctgagtgaggccgacgtcacctgcagcgtttccttcgtgcctgtggacggctgcacctgccccgcgggcaccttcctcaatgacgcgggcgcctgtgtgcccgcccaggagtgcccctgctacgctcacggcaccgtgctggctcctggagaggtggtgcacgacgagggcgccgtgtgttcatgtacgggtgggaagctaagctgcctgggagcctctctgcagaaaagcacagggtgtgcagcccccatggtgtacctggactgcagcaacagctcggcgggcacccctggggccgagtgcctccggagctgccacacgctggacgtgggctgtttcagcacacactgcgtgtccggctgtgtctgtcccccggggctggtgtcggatgggagtgggggctgcattgccgaggaggactgcccctgtgtgcacaacgaggccacctacaagcctggagagaccatcagggtcgactgcaacacctgcacctgcaggaaccggaggtgggagtgcagccaccggctctgcctgggcacctgcgtggcctacggggatggccacttcatcacctttgatggcgatcgctacagctttgaaggcagctgcgagtacatcttggcccaggactactgtggggacaacaccacccacgggaccttccgcatcgtcaccgagaacatcccctgtgggaccaccggcaccacctgctccaaggccatcaagctcttcgtggagagctacgagctgatcctccaagaggggacctttaaggcggtggcgagagggccgggtggggacccaccctacaagatacgctacatggggatcttcctggtcatcgagacccacgggatggccgtgtcctgggaccggaagaccagcgtgttcatccgactgcaccaggactacaagggcagggtctgcggcctgtgcgggaacttcgacgacaatgccatcaatgactttgccacgcgtagccggtccgtggtgggggacgcactggagtttgggaacagctggaagctctccccctcctgcccggacgccctggcacccaaggacccctgcacggccaaccccttccgcaagtcctgggcccagaagcagtgcagcatcctccacggccccaccttcgccgcctgccgctcccaggttgactccaccaagtactacgaggcctgcgtgaacgacgcgtgtgcctgcgactcgggtggcgactgcgagtgtttctgcacggctgtggctgcctacgcccaggcctgccacgacgcgggcctgtgtgtgtcctggcggactccggacacctgccccttgttctgtgacttctacaacccacatgggggctgtgagtggcactaccagccctgcggggcaccctgcctaaaaacctgccggaaccccagtgggcactgcctggtggacctgcctggcctggaaggctgctacccgaagtgcccacccagccagcccttcttcaatgaggaccagatgaagtgcgtggcccagtgtggctgctacgacaaggacggaaactactatgacgtcggtgcaagggtccccacagcggagaactgccagagctgtaactgcacacccagtggcatccagtgcgctcacagccttgaggcctgcacctgcacctatgaggacaggacctacagctaccaggacgtcatctacaacaccaccgatgggcttggcgcctgcttgatcgccatctgcggaagcaacggcaccatcatcaggaaggctgtggcatgtcctggaactccagccacaacgccattcaccttcaccaccgcctgggtcccccactccacgacaagcccggccctcccggtctccaccgtgtgtgtccgcgaggtctgccgctggtccagctggtacaatgggcaccgcccagagcccggcctgggaggcggagactttgagacgtttgaaaacctgaggcagagagggtaccaggtatgccctgtgctggctgacatcgagtgccgggcggcgcagcttcccgacatgccgctggaggagctgggccagcaggtggactgtgaccgcatgcgggggctgatgtgcgccaacagccaacagagtcccccgctctgtcacgactacgagctgcgggttctctgctgcgaatacgtgccctgtggcccctccccggccccaggcaccagccctcagccctccctcagtgccagcacggagcctgctgtgcctaccccaacccagaccacagcaaccgaaaagaccaccctatgggtgaccccgagcatccggtcgacggcggccctcacctcgcagactgggtccagctcaggccccgtgacggtcaccccctcggccccaggtaccaccacctgccagccccggtgtcagtggacagagtggtttgatgaggactaccccaagtctgaacaacttggaggggacgttgagtcctacgataagatcagggccgctggagggcacttatgccagcagcctaaggacatagagtgccaggccgagagcttccccaactggaccctggcacaggtggggcagaaggtgcactgtgacgtccacttcggcctggtgtgcaggaactgggagcaggagggcgtcttcaagatgtgctacaactacaggatccgggtcctctgctgcagtgacgaccactgcaggggacgtgccacaaccccgccaccgaccacagagctggagacggccaccaccaccaccacccaggccctgttctcaacgccgcagcctacgagtagcccggggctgaccagggctcccccggccagcaccacagcagtccccaccctctcagaaggactgacatcccccagatacacaagcacccttggtacagccaccacgggaggccccacgacgcctgcaggctccacagaacccactgtcccaggggtggccacatccacccttccaacacgctcagcccttccagggacgacggggagcttgggcacatggcgcccctcacagccacccacgctggccccaacaacaatggcaacctccagagctcgcccgacaggcacagccagcaccgcttccaaagagccgctgaccacgagcctggcgccaacactcacgagcgagctgtccacctctcaggccgagaccagcacgcccaggacagagacgacaatgagccccttgactaacaccaccaccagccagggcacgacccgctgtcaaccgaagtgtgagtggacagagtggtttgacgtggacttcccaacctcaggggttgcaggcggggacatggaaacttttgaaaacatcagggctgctgggggcaagatgtgctgggcaccaaagagcatagagtgccgggcggagaactaccccgaggtaagcatcgaccaggtcgggcaggtgctgacctgcagcctggagacggggctgacctgcaagaacgaagaccagacaggcaggttcaacatgtgcttcaactacaacgtgcgtgtgctttgctgtgacgactacagccactgccccagtaccccagccaccagctccacggccacgccctcctcaactccggggacgacctggatcctcacaaagccgaccacaacagccactacgactgcgtccactggatccacggccaccccgacctccaccctgagaacagctccccctcccaaagtgctgaccaccacggccaccacacccacagtcaccagctccaaagccactccctcctccagtccagggactgcaaccgcccttccagcactgagaagcacagccaccacacccacagctaccagcgttacacccatcccctcttcctccctgggcaccacctggacccgcctatcacagaccaccacacccacggccaccatgtccacagccacaccctcctccactccagagactgcccacacctccacagtgcttaccgccacggccaccacaactggggccaccggctctgtggccaccccctcctccaccccaggaacagctcacactaccaaagtgccaactaccacaaccacgggcttcacagccaccccctcctccagcccagggacggcactcacgcctccagtgtggatcagcacaaccaccacacccacaaccagaggctccacggtgaccccctcctccatcccggggaccacccacaccgccacagtgctgaccaccaccaccacaactgtggccactggttctatggcaacaccctcctctagcacacagaccagtggtactcccccatcactgaccaccacggccactacgatcacggccaccggctccaccaccaacccctcctcaactcctgggacaactcccatccccccagtgctgaccaccaccgccaccacacctgcagccaccagcaacacagtgactccctcctctgccctagggaccacccacacacccccagtgccgaacaccatggccaccacacacgggcgatccctgccccccagcagtccccacacggtgcgcacagcctggacttcggccacctcgggcatcttgggcaccacccacatcacagagccttccacggtgacttcccacaccctagcagcaaccaccggtaccacccagcactcgactccagccctttccagccctcaccctagcagcagaaccaccgagtcacccccttctccagggacgaccaccccgggccacaccacggccacctccaggaccacagccacggccacacccagcaagacccgcacctcgaccctgctgcccagcagccccacatcggcccccataaccacggtggtgaccatgggctgtgagccccagtgtgcctggtcagagtggctggactacagctaccccatgccggggccctctggcggggactttgacacctactccaacatccgtgcggccggaggggccgtctgtgagcagcccctgggcctcgagtgccgtgcccaggcccagcctggtgtccccctgcgggagttgggccaggtcgtggaatgcagcctggactttggcctggtctgcaggaaccgtgagcaggtggggaagttcaagatgtgcttcaactatgaaatccgtgtgttctgctgcaactacggccactgccccagcaccccggccaccagctctacggccatgccctcctccactccggggacgacctggatcctcacagagctgaccacaacagccactacgactgagtccactggatccacggccaccccgtcctccaccccagggaccacctggatcctcacagagccgagcactacagccaccgtgacggtgcccaccggatccacggccaccgcctcctccacccaggcaactgctggcaccccacatgtgagcaccacggccacgacacccacagtcaccagctccaaagccactcccttctccagtccagggactgcaaccgcccttccagcactgagaagcacagccaccacacccacagctaccagctttacagccatcccctcctcctccctgggcaccacctggacccgcctatcacagaccaccacacccacggccaccatgtccacagccacaccctcctccactccagagactgtccacacctccacagtgcttaccaccacggccaccacaaccggggccaccggctctgtggccaccccctcctccaccccaggaacagctcacactaccaaagtgctgactaccacaaccacgggcttcacagccaccccctcctccagcccagggacggcacgcacgcttccagtgtggatcagcacaaccaccacacccacaaccagaggttccacggtgaccccctcctccatcccggggaccacccacacccccacagtgctgaccaccaccaccacaactgtggccactggttctatggcaacaccctcctctagcacacagaccagtggtactcccccatcactgaccaccacggccactacgatcacggccaccggctccaccaccaacccctcctcaactccagggacaacacctatccccccagtgctgaccaccaccgccaccacacctgcagccaccagcagcacagtgactccctcctctgccctagggaccacccacacacccccagtgccgaacaccacggccaccacacacgggcgatccctgtcccccagcagtccccacacggtgcgcacagcctggacttcggccacctcaggcaccttgggcaccacccacatcacagagccttccacggggacttcccacaccccagcagcaaccaccggtaccacccagcactcgactccagccctgtccagccctcaccctagcagcaggaccaccgagtcacccccttctccagggacgaccaccccgggccacaccagggccacctccaggaccacggccacggccacacccagcaagacccgcacctcgaccctgctgcccagcagccccacatcggccccaataaccacggtggtgaccatgggctgtgagccccagtgtgcctggtcagagtggctggactacagctaccccatgccggggccctctggcggggactttgacacctactccaacatccgtgcggccggaggggccgtctgtgagcagcccctgggcctcgagtgccgtgcccaggcccagcctggtgtccccctgcgggagttgggccaggtcgtggaatgcagcctggactttggcctggtctgcaggaaccgtgagcaggtggggaagttcaagatgtgcttcaactatgaaatccgtgtgttctgctgcaactacggccactgccccagcaccccggccaccagctctacggccacgccctcctccactccagggacgacctggatcctcacagagcagaccacagcagccactacgaccgcaaccactggatccacggccatcccgtcctccaccccgggaacagctccccctcccaaagtgctgaccagcacggccaccacacccacagccaccagttccaaagccacttcctcctccagtccaaggactgcaaccacccttccagtgctgacaagcacagccaccaaatccacagctaccagctttacacccatcccctccttcacccttgggaccaccgggaccctcccagaacagaccaccacacccatggccaccatgtccacaatccacccctcctccactccggagaccacccacacctccacagtgctgaccacgaaggccaccacgacaagggccaccagttccatgtccaccccctcctccactccggggacgacctggatcctcacagagctgaccacagcagccactacaactgcagccactggccccacggccaccccgtcctccaccccagggaccacctggatcctcacagagcccagcactacagccaccgtgacggtgcccaccggatccacggccaccgcctcctccacccgggcaactgctggcaccctcaaagtgctgaccagcacggccaccacacccacagtcatcagctccagagccactccctcctccagtccagggactgcaaccgcccttccagcactgagaagcacagccaccacacccacagctaccagcgttacagccatcccctcttcctccctgggcaccgcctggacccgcctatcacagaccaccacacccacggccaccatgtccacagccacaccctcctctactccagagactgtccacacctccacagtgcttaccaccacgaccaccacaaccagggccaccggctctgtggccaccccctcctccaccccaggaacagctcacactaccaaagtgccgactaccacaaccacgggcttcacagccaccccctcctccagcccagggacggcactcacgcctccagtgtggatcagcacaaccaccacacccacaaccagaggctccacggtgaccccctcctccatcccggggaccacccacaccgccacagtgctgaccaccaccaccacaactgtggccactggttctatggcaacaccctcctctagcacacagaccagtggtactcccccatcactgaccaccacggccactacgatcacagccaccggctccaccaccaacccctcctcaactccagggacaactcccatccccccagtgctgaccaccaccgccaccacacctgcagccaccagcagcacagtgactccctcctctgccctagggaccacccacacacccccagtgccgaacaccacggccaccacacacgggcggtccctgccccccagcagtccccacacggtgcgcacagcctggacttcggccacctcgggcatcttgggcaccacccacatcacagagccttccacggtgacttcccacaccccagcagcaaccaccagtaccacccagcactcgactccagccctgtccagccctcaccctagcagcaggaccaccgagtcacccccttctccagggacgaccaccccgggccacaccaggggcacctccaggaccacagccacagccacacccagcaagacccgcacctcgaccctgctgcccagcagccccacatcggcccccataaccacggtggtgaccacgggctgtgagccccagtgtgcctggtcagagtggctggactacagctaccccatgccggggccctctggcggggactttgacacctactccaacatccgtgcggccggaggggcagtctgtgagcagcccctgggcctcgagtgccgtgcccaggcccagcctggtgtccccctgcgggagttgggccaggtcgtggaatgcagcctggactttggcctggtctgcaggaaccgtgagcaggtggggaagttcaagatgtgcttcaactatgaaatccgtgtgttctgctgcaactacggccactgccccagcaccccggccaccagctctacggccacgccctcctcaactccggggacgacctggatcctcacaaagctgaccacaacagccactacgactgagtccactggatccacggccaccccgtcctccaccccagggaccacctggatcctcacagagccgagcactacagccaccgtgacggtgcccaccggatccacggccaccgcctcctccacccaggcaactgctggcaccccacatgtgagcaccacggccacgacacccacagtcaccagctccaaagccactcccttctccagtccagggactgcaaccgcccttccagcactgagaagcacagccaccacacccacagctaccagctttacagccatcccctcctcctccctgggcaccacctggacccgcctatcacagaccaccacacccacggccaccatgtccacagccacaccctcctccactccagagactgcccacacctccacagtgcttaccaccacggccaccacaaccagggccaccggctctgtggccaccccctcttccaccccaggaacagctcacactaccaaagtgccgactaccacaaccacgggcttcacagtcaccccctcctccagcccagggacggcacgcacgcctccagtgtggatcagcacaaccaccacacccacaaccagtggctccacggtgaccccctcctccgtcccggggaccacccacacccccacagtgctgaccaccaccaccacaactgtggccactggttctatggcaacaccctcctctagcacacagaccagtggtactcccccatcactgatcaccacggccactacgatcacggccaccggctccaccaccaacccctcctcaactccagggacaacacctatccccccagtgctgaccaccaccgccaccacacctgcagccaccagcagcacagtgactccctcctctgccctagggaccacccacacacccccagtgccgaacaccacggccaccacacacgggcgatccctgtcccccagcagtccccacacggtgcgcacagcctggacttcggccacctcaggcaccttgggcaccacccacatcacagagccttccacggggacttcccacaccccagcagcaaccaccggtaccacccagcactcgactccagccctgtccagccctcaccctagcagcaggaccaccgagtcacccccttccccagggacgaccaccccgggccacaccacggccacctccaggaccacggccacggccacacccagcaagacccgcacctcgaccctgctgcccagcagccccacatcggcccccataaccacggtggtgaccacgggctgtgagccccagtgtgcctggtcagagtggctggactacagctaccccatgccggggccctctggcggggactttgacacctactccaacatccgtgcggccggaggggccgtctgtgagcagcccctgggcctcgagtgccgtgcccaggcccagcctggtgtccccctgggggagttgggccaggtcgtggaatgcagcctggactttggcctggtctgcaggaaccgtgagcaggtggggaagttcaagatgtgcttcaactatgaaatccgtgtgttctgctgcaactacggccactgccccagcaccccggccaccagctctacggccatgccctcctccactccggggacgacctggatcctcacagagctgaccacaacagccactacgactgcatccactggatccacggccaccccgtcctccaccccgggaacagctccccctcccaaagtgctgaccagcccggccaccacacccacagccaccagttccaaagccacttcctcctccagtccaaggactgcaaccacccttccagtgctgacaagcacagccaccaaatccacagctaccagcgttacacccatcccctcctccacccttgggaccaccgggaccctcccagaacagaccaccacacccgtggccaccatgtccacaatccacccctcctccactccggagaccacccacacctccacagtgctgaccacgaaggccaccacgacaagggccaccagttccacgtccaccccctcctccactccggggacgacctggatcctcacagagctgaccacagcagccactacaactgcagccactggccccacggccaccccgtcctccaccccagggaccacctggatcctcacagagctgaccacaacagccactacgactgcgtccactggatccacggccaccccgtcctccaccccagggaccacctggatcctcacagagccgagcactacagccaccgtgacggtgcccaccggatccacggccaccgcctcctccacccaggcaactgctggcaccccacatgtgagcaccacggccacgacacccacagtcaccagctccaaagccactccctcctccagtccagggactgcaactgcccttccagcactgagaagcacagccaccacacccacagctaccagctttacagccatcccctcctcctccctgggcaccacctggacccgcctatcacagaccaccacacccacggccaccatgtccacagccacaccctcctccactccagagactgtccacacctccacagtgcttaccgccacggccaccacaaccggggccaccggctctgtggccaccccctcctccaccccaggaacagctcacactaccaaagtgccgactaccacaaccacgggcttcacagccaccccctcctccagcccagggacggcactcacgcctccagtgtggatcagcacaaccaccacacccacaaccaccacacccacaaccagtggctccacggtgaccccctcctccatcccggggaccacccacaccgccagagtgctgaccaccaccaccacaactgtggccactggttctatggcaacaccctcctctagcacacagaccagtggtactcccccatcactgaccaccacggccactacgatcacggccaccggctccaccaccaacccctcctcaactccagggacaacacccatcaccccagtgctgaccagcacggccaccacacccgcagccaccagctccaaagccacttcctcctccagtccaaggactgcaaccacccttccagtgctgacaagcacagccacaaaatccacagctaccagctttacacccatcccctcctccaccctgtggaccacgtggaccgtcccagcacagaccaccacacccatgtccaccatgtccacaatccacacctcctctactccagagaccacccacacctccacagtgctgaccaccacagccaccatgacaagggccaccaattccacggccacaccctcctccactctggggacgacccggatcctcactgagctgaccacaacagccactacaactgcagccactggatccacggccaccctgtcctccaccccagggaccacctggatcctcacagagccgagcactatagccaccgtgatggtgcccaccggttccacggccaccgcctcctccactctgggaacagctcacacccccaaagtggtgaccaccatggccactatgcccacagccactgcctccacggttcccagctcgtccaccgtggggaccacccgcacccctgcagtgctccccagcagcctgccaaccttcagcgtgtccactgtgtcctcctcagtcctcaccaccctgagacccactggcttccccagctcccacttctctactccctgcttctgcagggcatttggacagtttttctcgcccggggaagtcatctacaataagaccgaccgagccggctgccatttctacgcagtgtgcaatcagcactgtgacattgaccgcttccagggcgcctgtcccacctccccaccgccagtgtcctccgccccgctgtcctcgccctcccctgcccctggctgtgacaatgccatccctctccggcaggtgaatgagacctggaccctggagaactgcacggtggccaggtgcgtgggtgacaaccgtgtcgtcctgctggacccaaagcctgtggccaacgtcacctgcgtgaacaagcacctgcccatcaaagtgtcggacccgagccagccctgtgacttccactatgagtgcgagtgcatctgcagcatgtggggcggctcccactattccacctttgacggcacctcttacaccttccggggcaactgcacctatgtcctcatgagagagatccatgcacgctttgggaatctcagcctctacctggacaaccactactgcacggcctctgccactgccgctgccgcccgctgcccccgcgccctcagcatccactacaagtccatggatatcgtcctcactgtcaccatggtgcatgggaaggaggagggcctgatcctgtttgaccaaattccggtgagcagcggtttcagcaagaacggcgtgcttgtgtctgtgctggggaccaccaccatgcgtgtggacattcctgccctgggcgtgagcgtcaccttcaatggccaagtcttccaggcccggctgccctacagcctcttccacaacaacaccgagggccagtgcggcacctgcaccaacaaccagagggacgactgtctccagcgggacggaaccactgccgccagttgcaaggacatggccaagacgtggctggtccccgacagcagaaaggatggctgctgggccccgactggcacaccccccactgccagccccgcagccccggtgtctagcacacccacccccaccccatgcccaccacagccgctctgtgatctgatgctgagccaggtctttgctgagtgccacaaccttgtgcccccgggcccattcttcaacgcctgcatcagcgaccactgcaggggccgccttgaggtgccctgccagagcctggaggcttacgcagagctctgccgcgcccggggagtgtgcagtgactggcgaggtgcaaccggtggcctgtgcgacctcacctgcccacccaccaaagtgtacaagccatgcggccccatacagcctgccacctgcaactctaggaaccagagcccacagctggaggggatggcggagggctgcttctgccctgaggaccagatcctcttcaacgcacacatgggcatctgcgtgcaggcctgcccctgcgtgggacccgatgggtttcctaaatttcccggggagcggtgggtcagcaactgccagtcctgcgtgtgtgacgagggttcagtgtcggtgcagtgcaagcccctgccctgtgacgcccagggtcagcccccgccgtgcaaccgtcccggcttcgtaaccgtgaccaggccccgggccgagaacccctgctgccccgagacggtgtgcgtgtgcaacacaaccacctgcccccagagcctgcctgtgtgcccgccagggcaggagtccatctgcacccaggaggagggcgactgctgtcccaccttccgctgcagacctcagctgtgttcgtacaatggcaccttctacggggttggtgcaaccttcccaggcgcccttccctgccacatgtgtacctgcctctctggggacacccaggacccaacggtgcaatgtcaggaggatgcctgcaacaatactacctgtccccagggctttgagtacaagagagtggccgggcagtgctgtggggagtgcgtccagaccgcctgcctcacgcccgatggccagccagtccagctgaatgaaacctgggtcaacagccatgtggacaactgcaccgtgtacctctgtgaggctgagggtggagtccatttgctgaccccacagcctgcatcctgcccagatgtgtccagctgcagggggagcctcaggaaaaccggctgctgctactcctgtgaggaggactcctgtcaagtccgcatcaacacgaccatcctgtggcaccagggctgcgagaccgaggtcaacatcaccttctgcgagggctcctgccccggagcgtccaagtactcagcagaggcccaggccatgcagcaccagtgcacctgctgccaggagaggcgggtccacgaggagacggtgcccttgcactgtcctaacggctcagccatcctgcacacctacacccacgtggatgagtgtggctgcacgcccttctgtgtccctgcgcccatggctcccccacacacccgtggcttcccggcccaggaggccactgctgtctgagaacgttctgcctccatccccatgctctgtccacctggagccaggatgtgcattgtctgatcatgaaaaccttgggcctcctctgcggagccccccggcctgtgtgtggcaccccgcgctccgtgctcctgctgcccaccccgtgggtgaaaccggccccagaagggtgaggggccagcaggacccctttcgggagggcgccactcaggagtcctaccctgggagagcctgtggcccaccttggccttgcccctccctgatgtcactgggacgccctggaacaaactaagcatgtgcgggcctatgtgtccctgccacggccggagcgcccgcgcagcacggattccagctggccacgtccggccgctggggcagacaggctggtccaggcaaggccagctgctgccaggaagctgcgacaggcaaggcggccgcctgtccatgcctgctgcagggtaactcagggctgaggtcgcaacggccaggtcagagaggggtcagcatcccaaagccccctctgctcaacccagcccagttttgcaaataaaccctgagcattgagta

SEQ ID NO: 18692 - DNA, 1608 bp, Homo sapiens
  source 1..1608: mol_type = unassigned DNA
gtgttctgctgcaactacggccactgccccccccggccaccagctctacggccatgccctcctccactccggggacgacctggatccacagagctgaccacaacagccactacgactgcatccactggatccacggccaccccgtcctccaccccgggaacagctccccctcccaaagtgctgaccagcccggccaccacacccacagccaccagttccaaagccacttcctcctccagtccaaggactgcaaccacccttccagtgctgacaagcacagccaccaaatccacagctaccagcgttacacccatcccctcctccacccttgggaccaccgggaccctcccagaacagaccaccacacccgtggccaccatgtccacaatccacccctcctccactccggagaccacccacacctccacagtgctgaccacgaaggccaccacgacaagggccaccagttccacgtccaccccctcctccactccggggacgacctggatcctcacagagctgaccacagcagccactacaactgcagccactggccccacggccaccccgtcctccaccccagggaccacctggatcctcacagagctgaccacaacagccactacgactgcgtccactggatccacggccaccccgtcctccaccccagggaccacctggatcctcacagagccgagcactacagccaccgtgacggtgcccaccggatccacggccaccgcctcctccacccaggcaactgctggcaccccacatgtgagcaccacggccacgacacccacagtcaccagctccaaagccactccctcctccagtccagggactgcaactgcccttccagcactgagaagcacagccaccacccacagctaccagctttacagccatcccctcctcctccctaccacctggacccgcctatcacagaccaccacacccacggccaccatgtccacagccacaccctcctccactccagagactgtccacacctccacagtgcttaccgccacggccaccacaaccgggccggctctgtggccaccccctcctccaccccaggaacagctcacactaccaaagtgccgactaccacaaccacggcacagccaccccctcctccagcccagggacggcactcacgcctccagtgtggatcagcacaaccaccacacccacaaccaccacacccacaaccagtggctccacggtgaccccctcctccatcccggggaccacccacaccgccagagtgctgaccaccaccaccacaactgtactggttctatggcaacaccctcctctagcacacagaccagtggtactcccccatcactgaccaccacggccactacgatcacggccaccggctccaccaccaacccctcctcaactccagggacaacacccatcaccccagtgctgaccagcacggccaccacacccgcagccaccagctccaaagccacttcctcctccagtccaaggactgcaaccacccttccagtgctgacaagcacagccacaaaatccacagctaccagctttacacccatcccctccccctgtggaccacgtggaccgtcc

SEQ ID NO: 18693 - DNA, 558 bp, Homo sapiens
  source 1..558: mol_type = unassigned DNA
tcctccaccccagggaccacctggatcctcacagagccgagcactacagccaccgtgacggtgcccaccggatccacggccaccgcctcctccacccaggcaactgctggcaccccacatgtgagcaccacggccacgacacccacagtcaccagctccaaagccactcccttctccagtccagggactgcaaccgcccttccagcactgagaagcacagccaccacacccacagctaccagctttacagccatcccctcctcctgggcaccacctggacccgcctatcacagaccaccacacccacggccaccatgtccacagccacaccctcctccactccagagactgtccacacctccacagtgcttaccaccacggccaccacggggccaccggctctgtggccaccccctcctccaccccaggaacagctcacactaccaaagtgctgactaccacaaccacttcacagccaccccctcctccagcccagggacggcacgcacgcttccagtgtggatcagcacaaccaccacacccacaaccagaggttcc

SEQ ID NO: 18694 - DNA, 957 bp, Homo sapiens
  source 1..957: mol_type = unassigned DNA
acgaaggccaccacgacaagggccaccagttccatgtccaccccctcctccactccggggacgacctggatcctcacagagctgaccacagcagccactacaactgcagccactccccacggccaccccgtcctccaccccagggaccacctggatcctcacagagcccagcactacaccgtgacggtgcccaccggatccacggccaccgcctcctccacccgggcaactgctggcaccctcaaagtgctgaccagccaccacacccacagtcatcagctccagagccactccctcctccagtccagggactgcaaccgcccttccagcactgagaagcacagccaccacacccacagctaccagcgttacagccatcccctcttcctccctaccgcctggacccgcctatcacagaccaccacacccacggccaccatgtccacagccacaccctcctctactccagagactgtccacacctccacagtgcttaccaccacgaccaccacaaccagggccaccctgtggccaccccctcctccaccccaggaacagctcacactaccaaagtgccgactaccacaaccacggcacagccaccccctcctccagcccagggacggcactcacgcctccagtgtggatcagcacaaccaccacacccacaaccagaggctccacggtgaccccctcctccatcccaccacccacaccgccacagtgctgaccaccaccaccacaactccactggttctatggcaacaccctcctctagcacacagaccagtggtacccccatcactgaccaccacggccactacgatcacagccaccggctccaccaccaacccctcctcaactccagggacaactcccatccccccagtgctgaccaccaccgcccacacctgcagccaccagcagcacagtgactccctcctctgccctagggac

SEQ ID NO: 18695 - DNA, 17377 bp, Homo sapiens
  source 1..17377: mol_type = unassigned DNA
acccggcccggctccctccctgcccgtccccgtccccccacccgtgccagcccccaggatgggtgccccgagcgcgtgccggacgctggtgttggctctggcggccatgctcgtggtgccgcaggcagagacccagggccctgtggagccgagctgggagaatgcagggcacaccatggatggcggtgccccgacgtcctcgcccacccggcgcgtgagctttgttccacccgtcactgtcttccccagcctgagccccctgaacccggcgcacaatgggcgggtgtgcagcacctggggtgacttccactacaagaccttcgacggcgacgtcttccgcttccctggcctttgcaactacgtgttctctgagcactgccgcgccgcctacgaggacttcaacgtccagctacgccgaggcctagtgggctccaggcctgtggtcacccgtgttgtcatcaaggcccaggggctggtgctggaggcgtccaacggctccgtcctcatcaatgggcagcgggaggagctgccttacagccgcactggcctcctggtggagcagagcggggactacatcaaggtcagcatccggctggtgctgacattcctgtggaacggagaggacagtgccctgctggagctggatcccaaatacgccaaccagacctgtggcctgtgtggggacttcaacggcctcccggccttcaacgagttctatgcccacaacgccaggctgaccccgctccagtttgggaacctgcagaagttggatgggcccacggagcagtgcccggacccgctgcccttgccggccggcaactgcacggacgaggagggcatctgccaccgcaccctgctggggccggcctttgcggagtgccacgcactggtggacagcactgcgtacctggccgcctgcgcccaggacctgtgccgctgccccacctgcccgtgtgccacctttgtggaatactcacgccagtgcgcccacgcggggggccagccgcggaactggaggtgccctgagctctgcccccggacctgccccctcaacatgcagcaccaggagtgtggctcaccctgcacggacacctgctccaacccccagcgcgcgcagctctgcgaggaccactgtgtggacggctgcttctgccccccaggcaggtcttgcacggtgctggatgacatcacgcactctggctgcctgcccctcgggcagtgcccctgcacccacggcggccgcacctacagcccgggcacctccttcaacaccacctgcagctcctgcacctgctccggggggctatggcagtgccaggacctgccgtgccctggcacctgctctgtgcagggcggggcccacatctccacctatgatgagaaactctacgacctgcatggtgactgcagctacgttctgtccaagaaatgtgccgacagcagcttcaccgtgctggctgagctgcggaagtgcggcctgacggacaacgagaactgcctgaaagcggtgacgctcagcctggacggcggggacacggccatccgggtccaagcggacggcggcgtgttcctcaactccatctacacgcagctgcccctgtcggcagccaacatcaccctgttcacaccctcgagcttcttcatcgtggtgcagacaggcctggggctgcagctgctggtgcagctggtgccactcatgcaggtgtttgtcaggctggaccccgcccaccagggccagatgtgcggcctgtgtgggaacttcaaccagaaccaggctgacgacttcacggccctcagcggggtggtggaggccacgggcgcagccttcgccaacacctggaaggcccaggctgcctgtgccaatgccaggaacagctttgaggacccctgctccctcagtgtggagaatgagaactacgcccggcactggtgctcgcgcctgaccgatcccaacagtgccttctcgcgctgccactccatcatcaaccccaagcccttccactcgaactgcatgtttgacacctgcaactgtgagcggagcgaggactgcctgtgcgccgcgctgtcctcctatgtgcacgcctgtgccgccaagggcgtacagctcagcgactggagggacggcgtctgcaccaagtacatgcagaactgccccaagtcccagcgctacgcctacgtggtggatgcctgccagcccacttgccgcggcctgagtgaggccgacgtcacctgcagcgtttccttcgtgcctgtggacggctgcacctgccccgcgggcaccttcctcaatgacgcgggcgcctgtgtgcccgcccaggagtgcccctgctacgctcacggcaccgtgctggctcctggagaggtggtgcacgacgagggcgccgtgtgttcatgtacgggtgggaagctaagctgcctgggagcctctctgcagaaaagcacagggtgtgcagcccccatggtgtacctggactgcagcaacagctcggcgggcacccctggggccgagtgcctccggagctgccacacgctggacgtgggctgtttcagcacacactgcgtgtccggctgtgtctgtcccccggggctggtgtcggatgggagtgggggctgcattgccgaggaggactgcccctgtgtgcacaacgaggccacctacaagcctggagagaccatcagggtcgactgcaacacctgcacctgcaggaaccggaggtgggagtgcagccaccggctctgcctgggcacctgcgtggcctacggggatggccacttcatcacctttgatggcgatcgctacagctttgaaggcagctgcgagtacatcttggcccaggactactgtggggacaacaccacccacgggaccttccgcatcgtcaccgagaacatcccctgtgggaccaccggcaccacctgctccaaggccatcaagctcttcgtggagagctacgagctgatcctccaagaggggacctttaaggcggtggcgagagggccgggtggggacccaccctacaagatacgctacatggggatcttcctggtcatcgagacccacgggatggccgtgtcctgggaccggaagaccagcgtgttcatccgactgcaccaggactacaagggcagggtctgcggcctgtgcgggaacttcgacgacaatgccatcaatgactttgccacgcgtagccggtccgtggtgggggacgcactggagtttgggaacagctggaagctctccccctcctgcccggacgccctggcacccaaggacccctgcacggccaaccccttccgcaagtcctgggcccagaagcagtgcagcatcctccacggccccaccttcgccgcctgccgctcccaggttgactccaccaagtactacgaggcctgcgtgaacgacgcgtgtgcctgcgactcgggtggcgactgcgagtgtttctgcacggctgtggctgcctacgcccaggcctgccacgacgcgggcctgtgtgtgtcctggcggactccggacacctgccccttgttctgtgacttctacaacccacatgggggctgtgagtggcactaccagccctgcggggcaccctgcctaaaaacctgccggaaccccagtgggcactgcctggtggacctgcctggcctggaaggctgctacccgaagtgcccacccagccagcccttcttcaatgaggaccagatgaagtgcgtggcccagtgtggctgctacgacaaggacggaaactactatgacgtcggtgcaagggtccccacagcggagaactgccagagctgtaactgcacacccagtggcatccagtgcgctcacagccttgaggcctgcacctgcacctatgaggacaggacctacagctaccaggacgtcatctacaacaccaccgatgggcttggcgcctgcttgatcgccatctgcggaagcaacggcaccatcatcaggaaggctgtggcatgtcctggaactccagccacaacgccattcaccttcaccaccgcctgggtcccccactccacgacaagcccggccctcccggtctccaccgtgtgtgtccgcgaggtctgccgctggtccagctggtacaatgggcaccgcccagagcccggcctgggaggcggagactttgagacgtttgaaaacctgaggcagagagggtaccaggtatgccctgtgctggctgacatcgagtgccgggcggcgcagcttcccgacatgccgctggaggagctgggccagcaggtggactgtgaccgcatgcgggggctgatgtgcgccaacagccaacagagtcccccgctctgtcacgactacgagctgcgggttctctgctgcgaatacgtgccctgtggcccctccccggccccaggcaccagccctcagccctccctcagtgccagcacggagcctgctgtgcctaccccaacccagaccacagcaaccgaaaagaccaccctatgggtgaccccgagcatccggtcgacggcggccctcacctcgcagactgggtccagctcaggccccgtgacggtcaccccctcggccccaggtaccaccacctgccagccccggtgtcagtggacagagtggtttgatgaggactaccccaagtctgaacaacttggaggggacgttgagtcctacgataagatcagggccgctggagggcacttatgccagcagcctaaggacatagagtgccaggccgagagcttccccaactggaccctggcacaggtggggcagaaggtgcactgtgacgtccacttcggcctggtgtgcaggaactgggagcaggagggcgtcttcaagatgtgctacaactacaggatccgggtcctctgctgcagtgacgaccactgcaggggacgtgccacaaccccgccaccgaccacagagctggagacggccaccaccaccaccacccaggccctgttctcaacgccgcagcctacgagtagcccggggctgaccagggctcccccggccagcaccacagcagtccccaccctctcagaaggactgacatcccccagatacacaagcacccttggtacagccaccacgggaggccccacgacgcctgcaggctccacagaacccactgtcccaggggtggccacatccacccttccaacacgctcagcccttccagggacgacggggagcttgggcacatggcgcccctcacagccacccacgctggccccaacaacaatggcaacctccagagctcgcccgacaggcacagccagcaccgcttccaaagagccgctgaccacgagcctggcgccaacactcacgagcgagctgtccacctctcaggccgagaccagcacgcccaggacagagacgacaatgagccccttgactaacaccaccaccagccagggcacgacccgctgtcaaccgaagtgtgagtggacagagtggtttgacgtggacttcccaacctcaggggttgcaggcggggacatggaaacttttgaaaacatcagggctgctgggggcaagatgtgctgggcaccaaagagcatagagtgccgggcggagaactaccccgaggtaagcatcgaccaggtcgggcaggtgctgacctgcagcctggagacggggctgacctgcaagaacgaagaccagacaggcaggttcaacatgtgcttcaactacaacgtgcgtgtgctttgctgtgacgactacagccactgccccagtaccccagccaccagctccacggccacgccctcctcaactccggggacgacctggatcctcacaaagccgaccacaacagccactacgactgcgtccactggatccacggccaccccgacctccaccctgagaacagctccccctcccaaagtgctgaccaccacggccaccacacccacagtcaccagctccaaagccactccctcctccagtccagggactgcaaccgcccttccagcactgagaagcacagccaccacacccacagctaccagcgttacacccatcccctcttcctccctgggcaccacctggacccgcctatcacagaccaccacacccacggccaccatgtccacagccacaccctcctccactccagagactgcccacacctccacagtgcttaccgccacggccaccacaactggggccaccggctctgtggccaccccctcctccaccccaggaacagctcacactaccaaagtgccaactaccacaaccacgggcttcacagccaccccctcctccagcccagggacggcactcacgcctccagtgtggatcagcacaaccaccacacccacaaccagaggctccacggtgaccccctcctccatcccggggaccacccacaccgccacagtgctgaccaccaccaccacaactgtggccactggttctatggcaacaccctcctctagcacacagaccagtggtactcccccatcactgaccaccacggccactacgatcacggccaccggctccaccaccaacccctcctcaactcctgggacaactcccatccccccagtgctgaccaccaccgccaccacacctgcagccaccagcaacacagtgactccctcctctgccctagggaccacccacacacccccagtgccgaacaccatggccaccacacacgggcgatccctgccccccagcagtccccacacggtgcgcacagcctggacttcggccacctcgggcatcttgggcaccacccacatcacagagccttccacggtgacttcccacaccctagcagcaaccaccggtaccacccagcactcgactccagccctttccagccctcaccctagcagcagaaccaccgagtcacccccttctccagggacgaccaccccgggccacaccacggccacctccaggaccacagccacggccacacccagcaagacccgcacctcgaccctgctgcccagcagccccacatcggcccccataaccacggtggtgaccatgggctgtgagccccagtgtgcctggtcagagtggctggactacagctaccccatgccggggccctctggcggggactttgacacctactccaacatccgtgcggccggaggggccgtctgtgagcagcccctgggcctcgagtgccgtgcccaggcccagcctggtgtccccctgcgggagttgggccaggtcgtggaatgcagcctggactttggcctggtctgcaggaaccgtgagcaggtggggaagttcaagatgtgcttcaactatgaaatccgtgtgttctgctgcaactacggccactgccccagcaccccggccaccagctctacggccatgccctcctccactccggggacgacctggatcctcacagagctgaccacaacagccactacgactgagtccactggatccacggccaccccgtcctccaccccagggaccacctggatcctcacagagccgagcactacagccaccgtgacggtgcccaccggatccacggccaccgcctcctccacccaggcaactgctggcaccccacatgtgagcaccacggccacgacacccacagtcaccagctccaaagccactcccttctccagtccagggactgcaaccgcccttccagcactgagaagcacagccaccacacccacagctaccagctttacagccatcccctcctcctccctgggcaccacctggacccgcctatcacagaccaccacacccacggccaccatgtccacagccacaccctcctccactccagagactgtccacacctccacagtgcttaccaccacggccaccacaaccggggccaccggctctgtggccaccccctcctccaccccaggaacagctcacactaccaaagtgctgactaccacaaccacgggcttcacagccaccccctcctccagcccagggacggcacgcacgcttccagtgtggatcagcacaaccaccacacccacaaccagaggttccacggtgaccccctcctccatcccggggaccacccacacccccacagtgctgaccaccaccaccacaactgtggccactggttctatggcaacaccctcctctagcacacagaccagtggtactcccccatcactgaccaccacggccactacgatcacggccaccggctccaccaccaacccctcctcaactccagggacaacacctatccccccagtgctgaccaccaccgccaccacacctgcagccaccagcagcacagtgactccctcctctgccctagggaccacccacacacccccagtgccgaacaccacggccaccacacacgggcgatccctgtcccccagcagtccccacacggtgcgcacagcctggacttcggccacctcaggcaccttgggcaccacccacatcacagagccttccacggggacttcccacaccccagcagcaaccaccggtaccacccagcactcgactccagccctgtccagccctcaccctagcagcaggaccaccgagtcacccccttctccagggacgaccaccccgggccacaccagggccacctccaggaccacggccacggccacacccagcaagacccgcacctcgaccctgctgcccagcagccccacatcggccccaataaccacggtggtgaccatgggctgtgagccccagtgtgcctggtcagagtggctggactacagctaccccatgccggggccctctggcggggactttgacacctactccaacatccgtgcggccggaggggccgtctgtgagcagcccctgggcctcgagtgccgtgcccaggcccagcctggtgtccccctgcgggagttgggccaggtcgtggaatgcagcctggactttggcctggtctgcaggaaccgtgagcaggtggggaagttcaagatgtgcttcaactatgaaatccgtgtgttctgctgcaactacggccactgccccagcaccccggccaccagctctacggccacgccctcctccactccagggacgacctggatcctcacagagcagaccacagcagccactacgaccgcaaccactggatccacggccatcccgtcctccaccccgggaacagctccccctcccaaagtgctgaccagcacggccaccacacccacagccaccagttccaaagccacttcctcctccagtccaaggactgcaaccacccttccagtgctgacaagcacagccaccaaatccacagctaccagctttacacccatcccctccttcacccttgggaccaccgggaccctcccagaacagaccaccacacccatggccaccatgtccacaatccacccctcctccactccggagaccacccacacctccacagtgctgaccacgaaggccaccacgacaagggccaccagttccatgtccaccccctcctccactccggggacgacctggatcctcacagagctgaccacagcagccactacaactgcagccactggccccacggccaccccgtcctccaccccagggaccacctggatcctcacagagcccagcactacagccaccgtgacggtgcccaccggatccacggccaccgcctcctccacccgggcaactgctggcaccctcaaagtgctgaccagcacggccaccacacccacagtcatcagctccagagccactccctcctccagtccagggactgcaaccgcccttccagcactgagaagcacagccaccacacccacagctaccagcgttacagccatcccctcttcctccctgggcaccgcctggacccgcctatcacagaccaccacacccacggccaccatgtccacagccacaccctcctctactccagagactgtccacacctccacagtgcttaccaccacgaccaccacaaccagggccaccggctctgtggccaccccctcctccaccccaggaacagctcacactaccaaagtgccgactaccacaaccacgggcttcacagccaccccctcctccagcccagggacggcactcacgcctccagtgtggatcagcacaaccaccacacccacaaccagaggctccacggtgaccccctcctccatcccggggaccacccacaccgccacagtgctgaccaccaccaccacaactgtggccactggttctatggcaacaccctcctctagcacacagaccagtggtactcccccatcactgaccaccacggccactacgatcacagccaccggctccaccaccaacccctcctcaactccagggacaactcccatccccccagtgctgaccaccaccgccaccacacctgcagccaccagcagcacagtgactccctcctctgccctagggaccacccacacacccccagtgccgaacaccacggccaccacacacgggcggtccctgccccccagcagtccccacacggtgcgcacagcctggacttcggccacctcgggcatcttgggcaccacccacatcacagagccttccacggtgacttcccacaccccagcagcaaccaccagtaccacccagcactcgactccagccctgtccagccctcaccctagcagcaggaccaccgagtcacccccttctccagggacgaccaccccgggccacaccaggggcacctccaggaccacagccacagccacacccagcaagacccgcacctcgaccctgctgcccagcagccccacatcggcccccataaccacggtggtgaccacgggctgtgagccccagtgtgcctggtcagagtggctggactacagctaccccatgccggggccctctggcggggactttgacacctactccaacatccgtgcggccggaggggcagtctgtgagcagcccctgggcctcgagtgccgtgcccaggcccagcctggtgtccccctgcgggagttgggccaggtcgtggaatgcagcctggactttggcctggtctgcaggaaccgtgagcaggtggggaagttcaagatgtgcttcaactatgaaatccgtgtgttctgctgcaactacggccactgccccagcaccccggccaccagctctacggccacgccctcctcaactccggggacgacctggatcctcacaaagctgaccacaacagccactacgactgagtccactggatccacggccaccccgtcctccaccccagggaccacctggatcctcacagagccgagcactacagccaccgtgacggtgcccaccggatccacggccaccgcctcctccacccaggcaactgctggcaccccacatgtgagcaccacggccacgacacccacagtcaccagctccaaagccactcccttctccagtccagggactgcaaccgcccttccagcactgagaagcacagccaccacacccacagctaccagctttacagccatcccctcctcctccctgggcaccacctggacccgcctatcacagaccaccacacccacggccaccatgtccacagccacaccctcctccactccagagactgcccacacctccacagtgcttaccaccacggccaccacaaccagggccaccggctctgtggccaccccctcttccaccccaggaacagctcacactaccaaagtgccgactaccacaaccacgggcttcacagtcaccccctcctccagcccagggacggcacgcacgcctccagtgtggatcagcacaaccaccacacccacaaccagtggctccacggtgaccccctcctccgtcccggggaccacccacacccccacagtgctgaccaccaccaccacaactgtggccactggttctatggcaacaccctcctctagcacacagaccagtggtactcccccatcactgatcaccacggccactacgatcacggccaccggctccaccaccaacccctcctcaactccagggacaacacctatccccccagtgctgaccaccaccgccaccacacctgcagccaccagcagcacagtgactccctcctctgccctagggaccacccacacacccccagtgccgaacaccacggccaccacacacgggcgatccctgtcccccagcagtccccacacggtgcgcacagcctggacttcggccacctcaggcaccttgggcaccacccacatcacagagccttccacggggacttcccacaccccagcagcaaccaccggtaccacccagcactcgactccagccctgtccagccctcaccctagcagcaggaccaccgagtcacccccttccccagggacgaccaccccgggccacaccacggccacctccaggaccacggccacggccacacccagcaagacccgcacctcgaccctgctgcccagcagccccacatcggcccccataaccacggtggtgaccacgggctgtgagccccagtgtgcctggtcagagtggctggactacagctaccccatgccggggccctctggcggggactttgacacctactccaacatccgtgcggccggaggggccgtctgtgagcagcccctgggcctcgagtgccgtgcccaggcccagcctggtgtccccctgggggagttgggccaggtcgtggaatgcagcctggactttggcctggtctgcaggaaccgtgagcaggtggggaagttcaagatgtgcttcaactatgaaatccgtgtgttctgctgcaactacggccactgccccagcaccccggccaccagctctacggccatgccctcctccactccggggacgacctggatcctcacagagctgaccacaacagccactacgactgcatccactggatccacggccaccccgtcctccaccccgggaacagctccccctcccaaagtgctgaccagcccggccaccacacccacagccaccagttccaaagccacttcctcctccagtccaaggactgcaaccacccttccagtgctgacaagcacagccaccaaatccacagctaccagcgttacacccatcccctcctccacccttgggaccaccgggaccctcccagaacagaccaccacacccgtggccaccatgtccacaatccacccctcctccactccggagaccacccacacctccacagtgctgaccacgaaggccaccacgacaagggccaccagttccacgtccaccccctcctccactccggggacgacctggatcctcacagagctgaccacagcagccactacaactgcagccactggccccacggccaccccgtcctccaccccagggaccacctggatcctcacagagctgaccacaacagccactacgactgcgtccactggatccacggccaccccgtcctccaccccagggaccacctggatcctcacagagccgagcactacagccaccgtgacggtgcccaccggatccacggccaccgcctcctccacccaggcaactgctggcaccccacatgtgagcaccacggccacgacacccacagtcaccagctccaaagccactccctcctccagtccagggactgcaactgcccttccagcactgagaagcacagccaccacacccacagctaccagctttacagccatcccctcctcctccctgggcaccacctggacccgcctatcacagaccaccacacccacggccaccatgtccacagccacaccctcctccactccagagactgtccacacctccacagtgcttaccgccacggccaccacaaccggggccaccggctctgtggccaccccctcctccaccccaggaacagctcacactaccaaagtgccgactaccacaaccacgggcttcacagccaccccctcctccagcccagggacggcactcacgcctccagtgtggatcagcacaaccaccacacccacaaccaccacacccacaaccagtggctccacggtgaccccctcctccatcccggggaccacccacaccgccagagtgctgaccaccaccaccacaactgtggccactggttctatggcaacaccctcctctagcacacagaccagtggtactcccccatcactgaccaccacggccactacgatcacggccaccggctccaccaccaacccctcctcaactccagggacaacacccatcaccccagtgctgaccagcacggccaccacacccgcagccaccagctccaaagccacttcctcctccagtccaaggactgcaaccacccttccagtgctgacaagcacagccacaaaatccacagctaccagctttacacccatcccctcctccaccctgtggaccacgtggaccgtcccagcacagaccaccacacccatgtccaccatgtccacaatccacacctcctctactccagagaccacccacacctccacagtgctgaccaccacagccaccatgacaagggccaccaattccacggccacaccctcctccactctggggacgacccggatcctcactgagctgaccacaacagccactacaactgcagccactggatccacggccaccctgtcctccaccccagggaccacctggatcctcacagagccgagcactatagccaccgtgatggtgcccaccggttccacggccaccgcctcctccactctgggaacagctcacacccccaaagtggtgaccaccatggccactatgcccacagccactgcctccacggttcccagctcgtccaccgtggggaccacccgcacccctgcagtgctccccagcagcctgccaaccttcagcgtgtccactgtgtcctcctcagtcctcaccaccctgagacccactggcttccccagctcccacttctctactccctgcttctgcagggcatttggacagtttttctcgcccggggaagtcatctacaataagaccgaccgagccggctgccatttctacgcagtgtgcaatcagcactgtgacattgaccgcttccagggcgcctgtcccacctccccaccgccagtgtcctccgccccgctgtcctcgccctcccctgcccctggctgtgacaatgccatccctctccggcaggtgaatgagacctggaccctggagaactgcacggtggccaggtgcgtgggtgacaaccgtgtcgtcctgctggacccaaagcctgtggccaacgtcacctgcgtgaacaagcacctgcccatcaaagtgtcggacccgagccagccctgtgacttccactatgagtgcgagtgcatctgcagcatgtggggcggctcccactattccacctttgacggcacctcttacaccttccggggcaactgcacctatgtcctcatgagagagatccatgcacgctttgggaatctcagcctctacctggacaaccactactgcacggcctctgccactgccgctgccgcccgctgcccccgcgccctcagcatccactacaagtccatggatatcgtcctcactgtcaccatggtgcatgggaaggaggagggcctgatcctgtttgaccaaattccggtgagcagcggtttcagcaagaacggcgtgcttgtgtctgtgctggggaccaccaccatgcgtgtggacattcctgccctgggcgtgagcgtcaccttcaatggccaagtcttccaggcccggctgccctacagcctcttccacaacaacaccgagggccagtgcggcacctgcaccaacaaccagagggacgactgtctccagcgggacggaaccactgccgccagttgcaaggacatggccaagacgtggctggtccccgacagcagaaaggatggctgctgggccccgactggcacaccccccactgccagccccgcagccccggtgtctagcacacccacccccaccccatgcccaccacagccgctctgtgatctgatgctgagccaggtctttgctgagtgccacaaccttgtgcccccgggcccattcttcaacgcctgcatcagcgaccactgcaggggccgccttgaggtgccctgccagagcctggaggcttacgcagagctctgccgcgcccggggagtgtgcagtgactggcgaggtgcaaccggtggcctgtgcgacctcacctgcccacccaccaaagtgtacaagccatgcggccccatacagcctgccacctgcaactctaggaaccagagcccacagctggaggggatggcggagggctgcttctgccctgaggaccagatcctcttcaacgcacacatgggcatctgcgtgcaggcctgcccctgcgtgggacccgatgggtttcctaaatttcccggggagcggtgggtcagcaactgccagtcctgcgtgtgtgacgagggttcagtgtcggtgcagtgcaagcccctgccctgtgacgcccagggtcagcccccgccgtgcaaccgtcccggcttcgtaaccgtgaccaggccccgggccgagaacccctgctgccccgagacggtgtgcgtgtgcaacacaaccacctgcccccagagcctgcctgtgtgcccgccagggcaggagtccatctgcacccaggaggagggcgactgctgtcccaccttccgctgcagacctcagctgtgttcgtacaatggcaccttctacggggttggtgcaaccttcccaggcgcccttccctgccacatgtgtacctgcctctctggggacacccaggacccaacggtgcaatgtcaggaggatgcctgcaacaatactacctgtccccagggctttgagtacaagagagtggccgggcagtgctgtggggagtgcgtccagaccgcctgcctcacgcccgatggccagccagtccagctgaatgaaacctgggtcaacagccatgtggacaactgcaccgtgtacctctgtgaggctgagggtggagtccatttgctgaccccacagcctgcatcctgcccagatgtgtccagctgcagggggagcctcaggaaaaccggctgctgctactcctgtgaggaggactcctgtcaagtccgcatcaacacgaccatcctgtggcaccagggctgcgagaccgaggtcaacatcaccttctgcgagggctcctgccccggagcgtccaagtactcagcagaggcccaggccatgcagcaccagtgcacctgctgccaggagaggcgggtccacgaggagacggtgcccttgcactgtcctaacggctcagccatcctgcacacctacacccacgtggatgagtgtggctgcacgcccttctgtgtccctgcgcccatgagccccccggcctgtgtgtggcaccccgcgctccgtgctcctgctgcccaccttggccttgcccctccctga

SEQ ID NO: 18696 - DNA, 8006 bp, Homo sapiens
  source 1..8006: mol_type = unassigned DNA
ggcagcagcaggcctgccgggcccagcgcgagctcctctccactgtgcaccatggtccagcggtggctgctgctgtcctgctgcggagccctgctcagcgctggtctggctaacacctcctacaccagcccaggcctccagaggctgaaggactctccacagacagccccggacaaaggccagtgctccacgtggggggctggtcacttctccaccttcgaccaccacgtgtacgacttctcggggacgtgcaactacatcttcgcggccacctgcaaggacgccttccccaccttcagtgtccagctgcggcgaggcccagacgggagcatctcgcggatcatcgtggagctgggggcctccgtcgtcactgtgagcgaagccatcatctcagtcaaggacatcggggtcatcagcctgccctataccagcaatggactccagatcacacccttcggccagagcgtgcggctggtggccaagcagctggagctggagctggaagtcgtgtggggtcctgacagccacctcatggttctggtggagcggaagtacatgggtcagatgtgcgggctctgcgggaactttgacgggaaggtgaccaacgagtttgtcagtgaggagggcaagttcctggaaccccacaagtttgctgccctccagaagctggacgaccccggcgagatctgcaccttccaggacatccccagcacccacgtccggcaggcccagcacgcccggatctgcacccagctgctgaccctggtggcccctgagtgcagcgtgtccaaggagcccttcgtgctaagctgccaggcggacgtggccgcagccccccagccaggcccacagaacagcagttgtgccaccctgtcggagtactcccgccagtgcagcatggtgggccagccggtccgccgctggcggagccccggcctgtgctccgtgggtcagtgcccggccaaccaggtgtaccaggagtgcggctcggcctgcgtgaagacctgctccaacccgcagcacagctgctccagctcctgcaccttcgggtgcttctgcccggaaggtacggtcctgaatgacctctccaataaccacacctgcgtgcccgtcacccagtgcccctgtgtgctccacggcgccatgtatgcccccggggaggtcacaatagctgcctgccaaacctgccggtgcaccctgggccgctgggtgtgcacggagcggccgtgccccggacactgctccctggaaggtggctcctttgttaccacatttgacgccaggccctaccgcttccacggcacctgcacctacatcctcctccagagcccccagcttcccgaggacggtgccctcatggctgtgtacgacaagtccggcgtctcacactccgagacctccctggtggctgtggtctacctctccaggcaggacaaaattgtgatctctcaggacgaggtggtcaccaacaacggagaagccaagtggctgccatacaagactcgcaacatcacggtcttcaggcagacgtccacccacctccagatggccaccagcttcgggctggagctcgtggtccagctgcgccccatcttccaggcctatgtcactgttgggccccagttcagaggtcagaccagagggctctgcggcaacttcaacggggacacaacggatgacttcaccactagcatgggtatcgccgagggcaccgcctcgctgtttgtggactcctggcgggcggggaactgtccggccgctctggagcgtgagactgacccctgctccatgagccagctcaacaaggtgtgtgcagagacccactgctccatgctgctgaggacaggcacggtgttcgagaggtgccacgccacagtgaaccctgcacccttctacaagaggtgcgtgtaccaggcctgcaactacgaggagacctttccccacatctgtgccgccctgggcgactacgtacacgcctgctccttgcggggcgtcctgctctggggctggagaagcagtgtggacaactgcaccatcccctgcacgggtaacaccaccttcagctacaacagccaagcctgtgagcgcacctgcctgtcgctgtcggaccgtgccaccgagtgccaccacagcgccgtgcccgtggacggttgcaactgccccgatggcacctacctgaaccaaaagggcgagtgtgtgcgcaaggcccagtgcccgtgcatactggagggttacaagttcatcctggccgagcagtccactgtcatcaacggcatcacctgccactgcatcaacgggcggctgagttgcccgcagcggccacagatgttcctggcctcctgccaggcccctaagaccttcaagtcctgcagccagtcctccgagaacaagtttggggcagcctgtgcccccacatgccagatgctggccaccggtgttgcctgcgtgcccaccaagtgtgagcctggctgtgtctgcgccgagggcctctacgagaatgccgacgggcagtgtgtgccccccgaggagtgcccatgtgagttctcgggggtctcctaccctggaggagctgagctccacactgactgcaggacctgctcctgctcaagggggaggtgggcctgtcagcagggcacccactgcccatccacctgcaccctctacggggagggccacgtcatcaccttcgacggccagcgcttcgtattcgacggcaactgcgagtacatcctggccacggacgtctgtggtgtcaacgactcacagcccaccttcaagatcctgacagagaacgtcatctgtgggaactccggggtcacatgctcacgggccatcaagatcttcctggggggcctgtccgtggtgctggcggacagaaactacacggtcaccggggaggagccccacgtgcagctcggggtgacgccgggtgcgctgagccttgtcgtggacatcagcatccccgggaggtacaacctgacgctcatctggaacaggcacatgaccatcctcatcaggatcgcccgtgcctcccaggatcccctctgcggcttgtgtggcaacttcaacgggaacatgaaggacgacttcgagacgcgcagcaggtacgtggcatccagcgagctggagttggtgaactcgtggaaggagagcccgctgtgcggggacgtgagcttcgtgacagacccctgcagtctcaatgccttccggcgctcctgggccgagcgcaagtgcagcgtcatcaacagccagacctttgccacctgccacagcaaggtataccacctgccctactacgaggcctgcgtgcgcgacgcatgtgggtgtgacagtggcggggactgtgagtgtctgtgcgatgccgtggctgcctacgcccaagcctgtctggacaagggtgtgtgcgtggactggaggaccccggccttctgccccatctactgcggcttctacaacacgcacacgcaggacggccatggcgagtaccagtacacacaggaggccaactgcacgtggcactaccagccctgcctctgccccagccagccacagagcgtcccaggcagcaacatcgaaggctgctacaactgctcccaggatgagtacttcgaccacgaggagggggtgtgcgtgccctgcatgccgcccaccacgccgcagccacccaccacgccgcagctgcccaccacaggctcacggcccacgcaagtctggcccatgacgggaacctccaccaccatcgggcttctcagctccaccggaccctcacccagctctaatcacacccctgccagccccacccagacacccctccttccagccacgctcacatcctccaagcccacagcctcctcgggagaaccacctagaccaaccacggccgtcaccccacaagccacatcagggctgcctcccacagccacactgagatcgacagccacaaaacccacagtgacccaggccacaaccagggccacggcgtcgaccgccagcccagccacgacgtccacagctcagtccacaacacggaccacaatgacactaccaaccccagccacatcagggacaagccccacgctgccaaaatcgaccaatcaggaactgccaggaacaacggccacccagacgacaggcccacgtccaaccccagcaagcaccacaggcccaaccaccccacagccaggacaacccacgaggcccacagccacagagaccactcaaacaagaacgactactgaatacacaacgccccaaaccccacacaccacacactccccgcctacggcggggagtcccgtcccttccacaggtcctgtcactgcaacatctttccatgccaccactacctatccaaccccatcacaccctgagaccacacttcccactcacgttccacctttctccacctccttggtgactccaagtactcacacagtcatcacccctacccacgcacagatggccacatctgcctccaaccactcagcgccaacaggtaccattcctccaccaacaacgctcaaggccacagggtccacccacacagccccaccaataacgccgaccaccagtgggaccagccaagcccacagctcattcagcacaaacaaaacacctacctcgctacattcacacacttcctccacacaccatcctgaagtcaccccaacttctactaccacgattactcccaaccccactagtacacgcaccagaacccctgtggcccacaccaactcagccaccagcagcaggccaccaccacccttcaccacacactccccacctacagggagcagtcccttctcttccacaggtcccatgacggcaacatccttcaagaccaccactacctatccaaccccatcacaccctcagaccacacttcccactcacgttccacctttctccacctctttggtgactccaagtactcacacagtcatcacccctacccatgcacagatggccacttctgcctccatccactcaatgccaacaggcacgattcctccaccgacaacgctcaaggccacagggtccacccacacagcgccaacaatgacgctgaccaccagcgggaccagccaagccctgagctcattaaacacagccaaaacctctacatccctacattcacacacttcctccacacaccatgctgaagccacctcaacttctaccaccaacatcacccccaaccccaccagtacaggaaccccaccaatgacagtgaccaccagtgggaccagccaatcccgaagctcatttagcacggccaaaacctctacatccctacattcacacacttcctccacacaccatcctgaagtcacctcaacttctaccaccagcatcacccccaaccacaccagtacaggcaccagaacccctgtggcccacaccacgtcggccaccagcagcaggctacccacacccttcaccacacactccccacctacagggaccactcccatctcttccacaggtcctgtcactgcaacatccttccagaccaccactacctatccaaccccatcacaccctcacaccacacttcccactcacgttccatctttctccacctccttggtgactccaagtactcacacggtcatcatccctacccacacacagatggccacttctgcctccatccactcaatgccaacaggcaccattcctccaccgaccacgatcaaggccacagggtccacccacacagccccaccaatgacaccgaccaccagtgggaccagccaatccccaagctcatttagcacggccaaaacttctacatccctaccttaccacacttcctcaacacaccatcctgaagtcaccccaacttctaccaccaacatcacccccaaacacaccagtacaggcaccagaacccctgtggcccacaccacctcggccagcagcagcaggctacccacacccttcaccacacactccccacctacagggagcagtcccttctcttccacaggtcctatgactgcaacatccttccagaccaccactacctatccaaccccatcacaccctcagaccacacttcccactcacgttccacctttctccacctccttggtgactccaagtactcacacagtcatcatcactacccacacacagatggccacttctgcctccatccactcaacgccaacaggcaccgttcctccaccaacaacgctcaaggccacagggtccacccacacagccccaccaatgacagtgaccaccagtgggaccagccaaacccacagctcattcagcacagctacagcctcttcttccttcatatcctcctcgtcttggctgcctcagaactctagctcaaggccaccgtcatcacctatcaccacacaactcccccacttgagttctgcaaccactcctgtttccacaactaatcagctgtcctcctcattttctcccagtccttctgccccctctactgtttcttcttatgtgccctcctcccactcctctccccagacttcatcgccttctgttggcacatcttcctctttcgtgtccgcccccgtgcactccacaaccctgagctcggggtcacactcctcattgtccactcatcccacgactgcatcagtgtctgcatctcctctttttccttcttctccagctgcctctactaccattagggccactctcccccacactatctcctctcctttcaccctctctgctctactccccatatccactgttaccgtgtctcccaccccatccagccacctagcctccagcaccattgcatttccgtccacgcccaggaccacggccagcacccacaccgcccctgccttctcctctcagtccaccacctcgcggtccacttctctcaccacccgagttcccacatcaggctttgtgtcactcacctcgggggtgacgggtatccccacctctccagtcaccaaccttaccaccaggcaccctggtcccaccttgtcgcctaccacacggttcctgaccagctccctcactgcccatggaagcacccctgcttctgccccggtatcttctctcgggacacctacgcccacctcacccggggtctgcagtgtgcgggagcagcaggaggagatcacgttcaaggggtgcatggcgaacgtgacggtaacccgctgtgagggcgcctgcatttccgctgccagcttcaacatcatcacccagcaggtggatgcccgctgcagctgctgccgccccctccactcctatgagcagcagctggagctgccctgccccgatcccagcacgcctggccggcggctcgtactcaccctgcaggtgttcagccactgcgtgtgcagctctgtggcctgtggagactagcagggtcgctgcctgctctcctggggctgaaggactgcagatgacagacaggaaaacacccaccagcccccttcccgcttgtgccagcagctgctttcctggtcaccaggcctggcccccaagtgccctgggccgtggctccctggggcaccggttggagaggggctgccaagcaggggctcagactaccacactcctgcagaccctgagccagcagagagggactgaggcggacagtggtcacggacctcccaggcacacagggcactcccgaccacccctgcccaccgtccaacacctcccagcccctgaacttggccccagccctgctgggcccagaaccctgcagatgaagccacagagcaggcgctcgaccagacccatcaggggcgaggagggcacggaaacctgtgccgagatgggggcaagaggcccaggcagccaccagcacagagaagaggagatccccagagtcagggagggcagagggtggcagcgagggcagggcagccgcccccgctcccagccaggcagaaggcccccaccagcaccacacccatccccagcagcctgtccttgggagagggcgtcacccggtcagagactccaaataaaccggttcttgtcaaggcaca

SEQ ID NO: 18697 - DNA, 2443 bp, Homo sapiens
  source 1..2443: mol_type = unassigned DNA
ttatcttaaatctaatagatttcctatttccaaaaagctcgactggagtgttataaaacctgaaaattctcttgtgctttctcttcttttgcttctagttaccatcctcaaaggattggctaaaagcaagcaactggattgaacaccctaagaagaaagattcacactgcaccaggagacatcagaaagaatgaaaactctgccgctgtttgtgtgcatctgtgcactgagtgcttgcttctcgttcagtgaaggtcgagaaagggatcatgaactacgtcacagaaggcatcatcaccaatcacccaaatctcactttgaattaccacattatcctggactgctagctcaccagaagccgttcattagaaagtcctataaatgtctgcacaaacgctgtaggcctaagcttccaccttcacctaataacccccccaaattcccaaatcctcaccagccacctaaacatccagataaaaatagcagtgtggtcaaccctaccttagtggctacaacccaaattccatctgtgactttcccatcagcttccaccaaaattactacccttccaaatgtgacttttcttccccagaatgccaccaccatatcttcaagagaaaatgttaacacaagctcttctgtagctacattagcaccagtgaattccccagctccacaagacaccacagctgccccacccacaccttctgcaactacaccagctccaccatcttcctcagctccaccagagaccacagctgccccacccacaccttctgcaactacacaagctccaccatcttcctcagctccaccagagaccacagctgccccacccacacctcctgcaactacaccagctccaccatcttcctcagctccaccagagaccacagctgccccacccacaccttctgcaactacaccagctccactatcttcctcagctccaccagagaccacagctgtcccacccacaccttctgcaactaccctagacccatcatccgcctcagctccaccagagaccacagctgccccacccacaccttctgcaactacaccagctccaccgtcttccccagctccacaagagaccacagctgccccaattaccacacctaattcttccccaactactcttgcacctgacacttctgaaacttcagctgcacccacacaccagactactacttcggtcactactcaaactactactactaaacaaccaacttcagctcctggccaaaataaaatttctcgatttcttttatatatgaagaatctactaaacagaattattgacgacatggtggagcaatagtatattgtatgttgtaaagtgttctgtcatttacaagatgtgattcatgagtgcagaactaccacctttcttttagcaccaatcccaacatgaaattatattactcagatttaaagcactatcattaatctttcaatctaattattcaccaccacaagacctattaacaagacaaaatgcctctatcccacaagccagatgcaggtctggggttcaaaataactctttggatcctacagagatagcctactgagggcaaagaaagtccttagataaagagagaatattgtatgggccatcaaccatttacttttccctgaatgttagaaactacaaaaccactaccttgtacccccatcaaaatcccacctgaaccatctaatcctataaacataaaggggtaaaattggaactctccagatgaacaaagacatctaaatatctgtagatagaaacatttatctatctaaatatattgatagacctgtcattgtattgattaatgacaaaaccctttagataattatcttccattttaaataaaattttatttcacaaatatgagccaagaaagaggaaagttgatttgaagtgaggattagaagtgaatgacaataaagtctgtcagccaagcacgaaccaagactggcactatttttcttagtgtatataattgtttaaactgcaaggttgacatttattgtgttgtgtctaagttaatttcgatctaatgtacctgattctagcctctgtgaacaacaagaatatgtttgtgtatgttcacatggtgcttataatatttcactatcaattcaattaattcacataaattccatgtgaaatgtattcaacaatggaatattttctaaaacatttagtatacatttgaatgtattttaaaccatgccaaactactgctttaatgtcaagtttgcagaattgtctctgaaaataaaaaccctgactttagttgtaaaacaataaaagttagctacttggtatacggagatgttaatttgggatatggaggcatttttatcttctgtcactactacttaaaactctgatgattatgttagatttttttgctaactaataaagatttcaaatggcaattta

SEQ ID NO: 18698 - DNA, 2540 bp, Homo sapiens
  source 1..2540: mol_type = unassigned DNA
actcaattacagtatttcctattcctaaaagaatctagtaggaaggctataagaaatgttctcttactgatccttcttatttgccaccttagattttaagttgcttcttggctaccaaaatgcctagacacagtaactaacaagaattcaactgacaagtagtttgaccagacttggaggaaggattccttcaaagttaccatcctcaaaggattggctaaaagcaagcaactggattgaacaccctaagaagaaagattcacactgcaccaggagacatcagaaagaatgaaaactctgccgctgtttgtgtgcatctgtgcactgagtgcttgcttctcgttcagtgaaggtcgagaaagggatcatgaactacgtcacagaaggcatcatcaccaatcacccaaatctcactttgaattaccacattatcctggactgctagctcaccagaagccgttcattagaaagtcctataaatgtctgcacaaacgctgtaggcctaagcttccaccttcacctaataacccccccaaattcccaaatcctcaccagccacctaaacatccagataaaaatagcagtgtggtcaaccctaccttagtggctacaacccaaattccatctgtgactttcccatcagcttccaccaaaattactacccttccaaatgtgacttttcttccccagaatgccaccaccatatcttcaagagaaaatgttaacacaagctcttctgtagctacattagcaccagtgaattccccagctccacaagacaccacagctgccccacccacaccttctgcaactacaccagctccaccatcttcctcagctccaccagagaccacagctgccccacccacaccttctgcaactacacaagctccaccatcttcctcagctccaccagagaccacagctgccccacccacacctcctgcaactacaccagctccaccatcttcctcagctccaccagagaccacagctgccccacccacaccttctgcaactacaccagctccactatcttcctcagctccaccagagaccacagctgtcccacccacaccttctgcaactaccctagacccatcatccgcctcagctccaccagagaccacagctgccccacccacaccttctgcaactacaccagctccaccgtcttccccagctccacaagagaccacagctgccccaattaccacacctaattcttccccaactactcttgcacctgacacttctgaaacttcagctgcacccacacaccagactactacttcggtcactactcaaactactactactaaacaaccaacttcagctcctggccaaaataaaatttctcgatttcttttatatatgaagaatctactaaacagaattattgacgacatggtggagcaatagtatattgtatgttgtaaagtgttctgtcatttacaagatgtgattcatgagtgcagaactaccacctttcttttagcaccaatcccaacatgaaattatattactcagatttaaagcactatcattaatctttcaatctaattattcaccaccacaagacctattaacaagacaaaatgcctctatcccacaagccagatgcaggtctggggttcaaaataactctttggatcctacagagatagcctactgagggcaaagaaagtccttagataaagagagaatattgtatgggccatcaaccatttacttttccctgaatgttagaaactacaaaaccactaccttgtacccccatcaaaatcccacctgaaccatctaatcctataaacataaaggggtaaaattggaactctccagatgaacaaagacatctaaatatctgtagatagaaacatttatctatctaaatatattgatagacctgtcattgtattgattaatgacaaaaccctttagataattatcttccattttaaataaaattttatttcacaaatatgagccaagaaagaggaaagttgatttgaagtgaggattagaagtgaatgacaataaagtctgtcagccaagcacgaaccaagactggcactatttttcttagtgtatataattgtttaaactgcaaggttgacatttattgtgttgtgtctaagttaatttcgatctaatgtacctgattctagcctctgtgaacaacaagaatatgtttgtgtatgttcacatggtgcttataatatttcactatcaattcaattaattcacataaattccatgtgaaatgtattcaacaatggaatattttctaaaacatttagtatacatttgaatgtattttaaaccatgccaaactactgctttaatgtcaagtttgcagaattgtctctgaaaataaaaaccctgactttagttgtaaaacaataaaagttagctacttggtatacggagatgttaatttgggatatggaggcatttttatcttctgtcactactacttaaaactctgatgattatgttagatttttttgctaactaataaagatttcaaatggcaattt

SEQ ID NO: 18699 - DNA, 2479 bp, Homo sapiens
  source 1..2479: mol_type = unassigned DNA
actgttccactactcatcaagcacataagttactcattgagaacctctgatcgtcactgtgctcatcaggaagaaattgatgcacaaagaactactgtcaatctcagcaaaccacaactattcttttctttaaaattaccatcctcaaaggattggctaaaagcaagcaactggattgaacaccctaagaagaaagattcacactgcaccaggagacatcagaaagaatgaaaactctgccgctgtttgtgtgcatctgtgcactgagtgcttgcttctcgttcagtgaaggtcgagaaagggatcatgaactacgtcacagaaggcatcatcaccaatcacccaaatctcactttgaattaccacattatcctggactgctagctcaccagaagccgttcattagaaagtcctataaatgtctgcacaaacgctgtaggcctaagcttccaccttcacctaataacccccccaaattcccaaatcctcaccagccacctaaacatccagataaaaatagcagtgtggtcaaccctaccttagtggctacaacccaaattccatctgtgactttcccatcagcttccaccaaaattactacccttccaaatgtgacttttcttccccagaatgccaccaccatatcttcaagagaaaatgttaacacaagctcttctgtagctacattagcaccagtgaattccccagctccacaagacaccacagctgccccacccacaccttctgcaactacaccagctccaccatcttcctcagctccaccagagaccacagctgccccacccacaccttctgcaactacacaagctccaccatcttcctcagctccaccagagaccacagctgccccacccacacctcctgcaactacaccagctccaccatcttcctcagctccaccagagaccacagctgccccacccacaccttctgcaactacaccagctccactatcttcctcagctccaccagagaccacagctgtcccacccacaccttctgcaactaccctagacccatcatccgcctcagctccaccagagaccacagctgccccacccacaccttctgcaactacaccagctccaccgtcttccccagctccacaagagaccacagctgccccaattaccacacctaattcttccccaactactcttgcacctgacacttctgaaacttcagctgcacccacacaccagactactacttcggtcactactcaaactactactactaaacaaccaacttcagctcctggccaaaataaaatttctcgatttcttttatatatgaagaatctactaaacagaattattgacgacatggtggagcaatagtatattgtatgttgtaaagtgttctgtcatttacaagatgtgattcatgagtgcagaactaccacctttcttttagcaccaatcccaacatgaaattatattactcagatttaaagcactatcattaatctttcaatctaattattcaccaccacaagacctattaacaagacaaaatgcctctatcccacaagccagatgcaggtctggggttcaaaataactctttggatcctacagagatagcctactgagggcaaagaaagtccttagataaagagagaatattgtatgggccatcaaccatttacttttccctgaatgttagaaactacaaaaccactaccttgtacccccatcaaaatcccacctgaaccatctaatcctataaacataaaggggtaaaattggaactctccagatgaacaaagacatctaaatatctgtagatagaaacatttatctatctaaatatattgatagacctgtcattgtattgattaatgacaaaaccctttagataattatcttccattttaaataaaattttatttcacaaatatgagccaagaaagaggaaagttgatttgaagtgaggattagaagtgaatgacaataaagtctgtcagccaagcacgaaccaagactggcactatttttcttagtgtatataattgtttaaactgcaaggttgacatttattgtgttgtgtctaagttaatttcgatctaatgtacctgattctagcctctgtgaacaacaagaatatgtttgtgtatgttcacatggtgcttataatatttcactatcaattcaattaattcacataaattccatgtgaaatgtattcaacaatggaatattttctaaaacatttagtatacatttgaatgtattttaaaccatgccaaactactgctttaatgtcaagtttgcagaattgtctctgaaaataaaaaccctgactttagttgtaaaacaataaaagttagctacttggtatacggagatgttaatttgggatatggaggcatttttatcttctgtcactactacttaaaactctgatgattatgttagatttttttgctaactaataaagatttcaaatggcaattt

SEQ ID NO: 18700 - DNA, 635 bp, Homo sapiens
  source 1..635: mol_type = unassigned DNA
actgttccactactcatcaagcacataagttactcattgagaacctctgatcgtcactgtgctcatcaggaagaaattgatgcacaaagaactactgtcaatctcagcaaaccacaactattcttttctttaaaattaccatcctcaaaggattggctaaaagcaagcaactggattgaacaccctaagaagaaagattcacactgcaccaggagacatcagaaagaatgaaaactctgccgctgtttgtgtgcatctgtgcactgagtgcttgcttctcgttcagtgaaggtcgagaaagggatcatgaactacgtcacagaaggcatcatcaccaatcacccaaatctcactttgaattaccacattatcctggactgctagctcaccagaagccgttcattagaaagtcctataaatgtctgcacaaacgctgtaggcctaagcttccaccttcacctaataacccccccaaattcccaaatcctcaccagccacctaaacatccagataaaaatagcagtgtggtcaaccctaccttagtggctacaacccaaattccatctgtgactttcccatcagcttccaccaaaattactacccttccaaatgtgacttttcttccccagaatgcc

SEQ ID NO: 18701 - DNA, 2097 bp, Homo sapiens
  source 1..2097: mol_type = unassigned DNA
cacgtgaccgaggcacagatcagctgatgccggagggtttgaagccgcgccgcgagggagcgaggtcgcagtgacagcggcgggcgatcggacccaggctgccccgccgtacccgcctgcgtcccgcgctcccgccccagcatgacagccccggcgggtccgcgcggctcagagaccgagcggcttctgacccccaaccccgggtatgggacccaggcggggccttcaccggcccctccgacacccccagaagaggaagaccttcgccgtcgtctcaaatactttttcatgagtccctgcgacaagtttcgagccaagggccgcaagccctgcaagctgatgctgcaagtggtcaagatcctggtggtcacggtgcagctcatcctgtttgggctcagtaatcagctggctgtgacattccgggaagagaacaccatcgccttccgacacctcttcctgctgggctactcggacggagcggatgacaccttcgcagcctacacgcgggagcagctgtaccaggccatcttccatgctgtggaccagtacctggcgttgcctgacgtgtcactgggccggtatgcgtatgtccgtggtgggggtgacccttggaccaatggctcagggcttgctctctgccagcggtactaccaccgaggccacgtggacccggccaacgacacatttgacattgatccgatggtggttactgactgcatccaggtggatccccccgagcggccccctccgccccccagcgacgatctcaccctcttggaaagcagctccagttacaagaacctcacgctcaaattccacaagctggtcaatgtcaccatccacttccggctgaagaccattaacctccagagcctcatcaataatgagatcccggactgctataccttcagcgtcctgatcacgtttgacaacaaagcacacagtgggcggatccccatcagcctggagacccaggcccacatccaggagtgtaagcaccccagtgtcttccagcacggagacaacagcttccggctcctgtttgacgtggtggtcatcctcacctgctccctgtccttcctcctctgcgcccgctcactccttcgaggcttcctgctgcagaacgagtttgtggggttcatgtggcggcagcggggacgggtcatcagcctgtgggagcggctggaatttgtcaatggctggtacatcctgctcgtcaccagcgatgtgctcaccatctcgggcaccatcatgaagatcggcatcgaggccaagaacttggcgagctacgacgtctgcagcatcctcctgggcacctcgacgctgctggtgtgggtgggcgtgatccgctacctgaccttcttccacaactacaatatcctcatcgccacactgcgggtggccctgcccagcgtcatgcgcttctgctgctgcgtggctgtcatctacctgggctactgcttctgtggctggatcgtgctggggccctatcatgtgaagttccgctcactctccatggtgtctgagtgcctgttctcgctcatcaatggggacgacatgtttgtgacgttcgccgccatgcaggcgcagcagggccgcagcagcctggtgtggctcttctcccagctctacctttactccttcatcagcctcttcatctacatggtgctcagcctcttcatcgcgctcatcaccggcgcctacgacaccatcaagcatcccggcggcgcaggcgcagaggagagcgagctgcaggcctacatcgcacagtgccaggacagccccacctccggcaagttccgccgcgggagcggctcggcctgcagccttctctgctgctgcggaagggacccctcggaggagcattcgctgctggtgaattgattcgacctgactgccgttggaccgtaggccctggactgcagagacccccgcccccgaccccgcttatttatttgtagggtttgcttttaaggatcggctccctgtcgcgcccgaggagggcctggacctttcgtgtcggacccttgggggcggggagactgggtggggagggtgttgaataaaagggaaaataaatgtgtcgttttcattttt

SEQ ID NO: 18702 - DNA, 2332 bp, Homo sapiens
  source 1..2332: mol_type = unassigned DNA
cacgtgaccgaggcacagatcagctgatgccggagggtttgaagccgcgccgcgagggagcgaggtcgcagtgacagcggcgggcgatcggacccaggctgccccgccgtacccgcctgcgtcccgcgctcccgccccagcatgacagccccggcgggtccgcgcggctcagagaccgagcggcttctgacccccaaccccgggtatgggacccaggcggggccttcaccggcccctccgacacccccagaagaggaagaccttcgccgtcgtctcaaatactttttcatgagtccctgcgacaagtttcgagccaagggccgcaagccctgcaagctgatgctgcaagtggtcaagatcctggtggtcacggtgcagctcatcctgtttgggctcagtaatcagctggctgtgacattccgggaagagaacaccatcgccttccgacacctcttcctgctgggctactcggacggagcggatgacaccttcgcagcctacacgcgggagcagctgtaccaggccatcttccatgctgtggaccagtacctggcgttgcctgacgtgtcactgggccggtatgcgtatgtccgtggtgggggtgacccttggaccaatggctcagggcttgctctctgccagcggtactaccaccgaggccacgtggacccggccaacgacacatttgacattgatccgatggtggttactgactgcatccaggtggatccccccgagcggccccctccgccccccagcgacgatctcaccctcttggaaagcagctccagttacaagaacctcacgctcaaattccacaagtactgcctgctcactcgaggggggcccagggtgggggaggcagcacactaggcactctcaccccagcaactacttccctaaggtggggacagggcccccccgcccgcgctggtgcctgctgggtgagcacttcccctgccagctgcagagtcagcacgtggcaggggacgctggcacttggggccggaagggacccgaagacgcccctgaccctcacccgagcctcctgcctaggctggtcaatgtcaccatccacttccggctgaagaccattaacctccagagcctcatcaataatgagatcccggactgctataccttcagcgtcctgatcacgtttgacaacaaagcacacagtgggcggatccccatcagcctggagacccaggcccacatccaggagtgtaagcaccccagtgtcttccagcacggagacaacagcttccggctcctgtttgacgtggtggtcatcctcacctgctccctgtccttcctcctctgcgcccgctcactccttcgaggcttcctgctgcagaacgagtttgtggggttcatgtggcggcagcggggacgggtcatcagcctgtgggagcggctggaatttgtcaatggctggtacatcctgctcgtcaccagcgatgtgctcaccatctcgggcaccatcatgaagatcggcatcgaggccaagaacttggcgagctacgacgtctgcagcatcctcctgggcacctcgacgctgctggtgtgggtgggcgtgatccgctacctgaccttcttccacaactacaatatcctcatcgccacactgcgggtggccctgcccagcgtcatgcgcttctgctgctgcgtggctgtcatctacctgggctactgcttctgtggctggatcgtgctggggccctatcatgtgaagttccgctcactctccatggtgtctgagtgcctgttctcgctcatcaatggggacgacatgtttgtgacgttcgccgccatgcaggcgcagcagggccgcagcagcctggtgtggctcttctcccagctctacctttactccttcatcagcctcttcatctacatggtgctcagcctcttcatcgcgctcatcaccggcgcctacgacaccatcaagcatcccggcggcgcaggcgcagaggagagcgagctgcaggcctacatcgcacagtgccaggacagccccacctccggcaagttccgccgcgggagcggctcggcctgcagccttctctgctgctgcggaagggacccctcggaggagcattcgctgctggtgaattgattcgacctgactgccgttggaccgtaggccctggactgcagagacccccgcccccgaccccgcttatttatttgtagggtttgcttttaaggatcggctccctgtcgcgcccgaggagggcctggacctttcgtgtcggacccttgggggcggggagactgggtggggagggtgttgaataaaagggaaaataaatgtgtcgttttcattttt

SEQ ID NO: 18703 - DNA, 2869 bp, Homo sapiens
  source 1..2869: mol_type = unassigned DNA
gagtcggccgtgaacggtgtttcctgttccgaatcccgagagccctggaaagttttgaaggaggaggcatggcccggcagccttatcgttttccccaggcaaggattccggagagaggatcaggtgttttcaggttaaccgtcagaaatgcaatggcacatcgtgattctgagatgaaagaagaatgtctaagggaagacctgaagttttacttcatgagcccttgtgaaaaataccgagccagacgccagattccgtggaaactgggtttgcagattttgaagatagtcatggtcaccacacagcttgttcgttttggtttaagtaaccagctggtggttgctttcaaagaagataacactgttgcttttaagcacttgtttttgaaaggatattctggtacagatgaagatgactacagctgcagtgtatatactcaagaggatgcctatgagagcatcttttttgctattaatcagtatcatcagctaaaggacattaccctggggacccttggttatggagaaaatgaagacaatagaattggcttaaaagtctgtaagcagcattacaagaaagggaccatgtttccttctaatgagacactgaatattgacaacgacgttgagctcgattgtgttcaattagaccttcaggacctctccaagaagcctccggactggaagaactcatcattcttcagactggaattttatcggctcttacaggttgaaatctcctttcatcttaaaggcattgacctacagacaattcattcccgtgagttaccagactgttatgtctttcagaatacgattatctttgacaataaagctcacagtggcaaaatcaaaatctattttgacagtgatgccaaaattgaagaatgtaaagacttgaacatatttggatctactcagaaaaatgctcagtatgtcctggtgtttgatgcatttgtcattgtgatttgcttggcatctcttattctgtgtacaagatccattgttcttgctctaaggttacggaagagatttctaaatttcttcctggagaagtacaagcggcctgtgtgtgacaccgaccagtgggagttcatcaacggctggtatgtcctggtgattatcagcgacctaatgacaatcattggctccatattaaaaatggaaatcaaagcaaagaatctcacaaactatgatctctgcagcatttttcttggaacctctacgctcttggtttgggttggagtcatcagatacctgggttatttccaggcatataatgtgctgattttaacaatgcaggcctcactgccaaaagttcttcggttttgtgcttgtgctggtatgatttatctgggttacacattctgtggctggattgtcttaggaccataccatgacaagtttgaaaatctgaacacagttgctgagtgtctgttttctctggtcaacggtgatgacatgtttgcaacctttgcccaaatccagcagaagagcatcttggtgtggctgttcagtcgtctgtatttatattccttcatcagcctttttatatatatgattctcagtctttttattgcacttattacagattcttatgacaccattaagaaattccaacagaatgggtttcctgaaacggatttgcaggaattcctgaaggaatgcagtagcaaagaagagtatcagaaagagtcctcagccttcctgtcctgcatctgctgtcggaggaggaaaagaagtgatgatcacttgatacctattagctaaagttctgctaaagatgattaaagttcaggcatccttatccagcggctgagcagaggaaccccaaatgacttggacaagcagttccaaaatgactctcttatttaattgtggagtgggaaagaggactcacagttagccagctgaccatgactgaagttccagctttactttttataaacttgaatgataaagaatagaccatgggctactactgggcattagtgcaatataacagcgataataaaattctctattagtctgttaatttatgacatgatctcggaatggaaaaagatcatttcagagtgtgcgaaataatagtctttaaccatgtaattaaatatgtgtgtttattgtcaaataaggatttgttttaaaggtgattcttgggtttgaagacatttgttaattcatggtctgtacagaaatgaagctggttgcaataccaatctagagagtccaagctggtgaactattaagctgtttaaagatcacccttggcctggcacagtggttcacacctgtaatcccagcactttgggaggcctaggcaggcagactgagctcaggagcttgagaccagcctgggcaacatggcaaaaacccacctctacaaaaagtacaaaaattagtcgggcgtgatggcaggcatctgtagtcccagctacttgggaagctgaagtgggaggatcacctgagctctggaggtggaggctgccatgagccatgatcgtgccactacactccagcctgggtgacagagtgagatcctgtctcaaaaaaaaaaaaaaatcacccttaaatcaacaaaaagacctcatgctcatgcagtggacatttcttggcctgttttcctgtgggttttcttcagcatgatatgaagcaactgttggcatagccagtgggataaataagaaatggaatcatttggctgcctcgtcacttgtgctaatggtcagttgtacacacatgacatgtggaagtgacctgtagcagcggtcactcattttaacaattgaactctgctgggttgggtatttacctttgtctagaaaagaaatatgatatattttctctaaataaatttattttcatcattc

SEQ ID NO: 18704 - DNA, 2795 bp, Homo sapiens
  source 1..2795: mol_type = unassigned DNA
cggggctcgaggctgctggagtcgctcgctgactcgccctgcgccctcgccgcggacaccggagctgcggccgctccccgctgtcccccagagatggcagatcctgaggtagttgtgagtagctgcagctctcatgaagaggaaaatcgctgcaattttaaccagcaaacatctccatctgaggagcttctattagaagaccagatgaggcgaaaactcaaattttttttcatgaatccctgtgagaagttctgggctcgaggtagaaaaccatggaaacttgccatacaaattctaaaaattgcaatggtgactatccagctggtcttatttgggctaagtaaccagatggtggtagctttcaaggaagagaatactatagcattcaaacaccttttcctaaaaggatatatggaccgaatggatgacacatatgcagtgtacacacaaagtgacgtgtatgatcagttaatcttcgcagtaaaccagtacttgcagctatacaatgtctccgttgggaatcatgcttatgagaacaaaggtaccaagcaatctgctatggcaatctgtcagcacttctacaagcgaggaaacatctaccctggaaatgatacctttgacatcgatccagaaattgaaactgagtgtttctttgtggagccagatgaaccttttcacattgggacaccagcagaaaataaactgaacttaacactggacttccacagactcctaacagtggagcttcagtttaaactgaaagccattaatctgcagacagttcgtcatcaagaactccctgactgttatgactttactctgactataacatttgacaacaaggcccatagtggaagaattaaaataagtttagataatgacatttccatcagagaatgtaaagactggcatgtatctggatcaattcagaagaacactcattacatgatgatctttgatgcctttgtcattctgacttgcttggtttcattaatcctctgcattagatctgtgattagaggacttcagcttcagcaggagtttgtcaattttttcctcctccattataagaaggaagtttctgtttctgatcaaatggaatttgtcaatggatggtacattatgattattattagtgacatattgacaatcattggatcaattctaaaaatggaaatccaagctaagagtctaactagttatgatgtctgtagcatacttcttgggacttctaccatgctcgtgtggcttggagtcatccgatacctcggtttctttgcaaagtacaacctcctcattttgacccttcaggcagcgctgcccaatgtcatcaggttctgctgctgtgcagctatgatttacttaggttactgcttctgtggatggatcgtgctggggccttaccatgacaagtttcgttctctgaacatggtctctgagtgccttttctctctgataaatggagatgatatgtttgccacgtttgcaaaaatgcagcaaaaaagttacttagtctggctgtttagtagaatttacctctactcattcatcagcctctttatatatatgattttaagtcttttcattgcactgatcactgatacatacgaaacaattaagcaataccaacaagatggcttcccagagactgaacttcgtacatttatatcagaatgcaaagatctacccaactctggaaaatacagattagaagatgaccctccagtatctttattctgctgttgtaaaaagtagctatcaggtttatctgtactttagaggaaaatataatgtgtagctgagttggaacactgtggatattctgagatcagatgtagtatgtttgaagactgttattttgagctaattgagacctataattcaccaataactgtttatatttttaaaagcaatatttaatgtctttgcaactttatgctgggattgtttttaaaaaaactttaatgaggaaagctattggattattattatttcttgtttattttgccatggctttagaatgtattctgtatgcctctcttttgctctgatactgttgctcctgctattctgattgtgcagactgtgtaattagtggaaaacaatccttggtctgactgtgactttggacaactcagtaaccctggcttggaccactctcaggagtccatccttgagagagtgggtgtagttatcatttatacagtaatcattgcattttaaaatcttctcttgaaaggaagaataagagtgcaccagaataagagcgcaccagaataagagcgcaccagctaacaatgtgatacggccatatgtcacttaaggatggagatatgttctgagaaatgtgtcattaggcgattttgtcattaaacatcatagcatgtacttccacaaacctagatggtatagcctactacacacctaggctatttggtatagcctgttggtcctggggtacaaatctgtacaacatgttactgtattgaatacagtaggcaattgtaacacaatggtaagtatctaaacatagaaaagggacagtaaaaatatggttttataatcttctgggaccaccattgtatatgcggtacatcattgaccaaaacatcgttatccagcatatgactgtatttggttatgaaagccaactgttacttgattctgcttttagttcttaagaggatcaggcttttaaatactcatttacaagttttctatcctccttcagtgttaaagtagaaagtaaaaagagtatcttatacatgcatgaaattaaagcatataccaaatgc

SEQ ID NO: 18705 - DNA, 1760 bp, Homo sapiens
  source 1..1760: mol_type = unassigned DNA
gcgccctcgccgcggacaccggagctgcggccgctccccgctgtcccccagatggcagatcctgaggtagttgtgagtagctgcagctctcatgaagaggaaaatcgctgcaattttaaccagcaaacatctccatctgaggagcttctattagaagaccagatgaggcgaaaactcaaattttttttcatgaatccctgtgagaagttctgggctcgaggtagaaaaccatggaaacttgccatacaaattctaaaaattgcaatggtgactatccagtacttgcagctatacaatgtctccgttgggaatcatgcttatgagaacaaaggtaccaagcaatctgctatggcaatctgtcagcacttctacaagcgaggaaacatctaccctggaaatgatacctttgacatcgatccagaaattgaaactgagtgtttctttgtggagccagatgaaccttttcacattgggacaccagcagaaaataaactgaacttaacactggacttccacagactcctaacagtggagcttcagtttaaactgaaagccattaatctgcagacagttcgtcatcaagaactccctgactgttatgactttactctgactataacatttgacaacaaggcccatagtggaagaattaaaataagtttagataatgacatttccatcagagaatgtaaagactggcatgtatctggatcaattcagaagaacactcattacatgatgatctttgatgcctttgtcattctgacttgcttggtttcattaatcctctgcattagatctgtgattagaggacttcagcttcagcaggagtttgtcaattttttcctcctccattataagaaggaagtttctgtttctgatcaaatggaatttgtcaatggatggtacattatgattattattagtgacatattgacaatcattggatcaattctaaaaatggaaatccaagctaagagtctaactagttatgatgtctgtagcatacttcttgggacttctaccatgctcgtgtggcttggagtcatccgatacctcggtttctttgcaaagtacaacctcctcattttgacccttcaggcagcgctgcccaatgtcatcaggttctgctgctgtgcagctatgatttacttaggttactgcttctgtggatggatcgtgctggggccttaccatgacaagtttcgttctctgaacatggtctctgagtgccttttctctctgataaatggagatgatatgtttgccacgtttgcaaaaatgcagcaaaaaagttacttagtctggctgtttagtagaatttacctctactcattcatcagcctctttatatatatgattttaagtcttttcattgcactgatcactgatacatacgaaacaattaagcaataccaacaagatggcttcccagagactgaacttcgtacatttatatcagaatgcaaagatctacccaactctggaaaatacagattagaagatgaccctccagtatctttattctgctgttgtaaaaagtagctatcaggtttatctgtactttagaggaaaatataatgtgtagctgagttggaacactgtggatattctgagatcagatgtagtatgtttgaagactgttattttgagctaattgagacctataattcaccaataactgtttatatttttaaaagcaatatttaatgtctttgcaactttatgctgggattgtttttaaaaaaactttaatgagg

SEQ ID NO: 18706 - DNA, 2953 bp, Homo sapiens
  source 1..2953: mol_type = unassigned DNA
tggagtcgctcgctgactcgccctgcgccctcgccgcggacaccggagctgcggccgctccccgctgtcccccagcttactccaatcaagcctctgcccgccaggaacaggtaacctgtgtgtgtccgtttgctccttctaagagcatgcctgatagatacttcggtagcctctccggatggccccttcgtcgggtagcctctcctgatggggtccttcgcccaccctgcctcccgcgccggcgctccgggtgaatgtcaagggtggctggctgcgaatacctccttcagctgctggggttcccgacagtttgcagtttttaaaagtgcaccctcggaagggcttttcagactgggtaaacctgacttttccaagagatggcagatcctgaggtagttgtgagtagctgcagctctcatgaagaggaaaatcgctgcaattttaaccagcaaacatctccatctgaggagcttctattagaagaccagatgaggcgaaaactcaaattttttttcatgaatccctgtgagaagttctgggctcgaggtagaaaaccatggaaacttgccatacaaattctaaaaattgcaatggtgactatccagctggtcttatttgggctaagtaaccagatggtggtagctttcaaggaagagaatactatagcattcaaacaccttttcctaaaaggatatatggaccgaatggatgacacatatgcagtgtacacacaaagtgacgtgtatgatcagttaatcttcgcagtaaaccagtacttgcagctatacaatgtctccgttgggaatcatgcttatgagaacaaaggtaccaagcaatctgctatggcaatctgtcagcacttctacaagcgaggaaacatctaccctggaaatgatacctttgacatcgatccagaaattgaaactgagtgtttctttgtggagccagatgaaccttttcacattgggacaccagcagaaaataaactgaacttaacactggacttccacagactcctaacagtggagcttcagtttaaactgaaagccattaatctgcagacagttcgtcatcaagaactccctgactgttatgactttactctgactataacatttgacaacaaggcccatagtggaagaattaaaataagtttagataatgacatttccatcagagaatgtaaagactggcatgtatctggatcaattcagaagaacactcattacatgatgatctttgatgcctttgtcattctgacttgcttggtttcattaatcctctgcattagatctgtgattagaggacttcagcttcagcaggtagggaacgttgctttctaggaatgctactgacattttgattgacagagacattcactgtgcctcccctcttttccctaaaggagtttgtcaattttttcctcctccattataagaaggaagtttctgtttctgatcaaatggaatttgtcaatggatggtacattatgattattattagtgacatattgacaatcattggatcaattctaaaaatggaaatccaagctaaggtaatttttttcctaatcatgctattgttagtgtcagatttgcactaatggtaatgtatttttccagaatgtaagaattttcagaatgaattgtttcttccaaactgtatatcaagtagacttgaaattggtaatggtaattttcttaaatctagtcaggaggtctcttaggcagagtttttcaaagtgtgatccacaaaccattgcatcagaatcattgggtgcctggtaaagtgtaccatgttagacctactgaattcagactcttcggcggggcctgtgaattcttacacacaccaaaattcatacacaaccaaggtaactaaggtaagagttttttttttttttttaatcttacaagaaatgctcgaatctttaacaaaaatgagtggggctataggggaaagtgaggtcaaggcactatggtgtgcatgcttgcatttgtttcctccgtccattcaaagtgagaatgctcccattttcttactttaccattgatgtgctacaagcttatttattttaagactaacctagcctaaaaatcaactgtccccacaaaataaaaatcacattaaaaaaactaatagtgttcagactaatcttgctcaaacttatgtttccctagtcttgatgcaactgattgagtcacctggggagttggttataaacctgggcagagaccccaaatgcaatggctcagagaagataggagcttatttctgtcttatgcaatagtcagaatgggttttacagactggtgagtagctcaacatctcacagtcattcaggcacccatgttcctcccattttgtttctctgccaccccttaaggacttgccctgactgcatgattattgccgtgttgcctcaaacaggttgcagcttatgggaagcaaaaacacggtatggtagaagctctcccatagactgatggcttggctcaagagtggccgactttatttctgtacatatcccactggatagaatttagtcaatcctaactgcagagggagccagggaacacagcccaggcatgtgcctaggaaggggagaatgggtttaggttgacacttagcagctgccactatatgtggctatagtatgtatcattggaatagatgtttaactttagggacaaataaaaaaccaaaacaaaaaaaggagtaaggggagagatttgcagcaaatctttatttttaccaacctcaactatcattaatttcagtgaaccctaaatggtatccaacaaaatatctttctagaccattcaccgtctctgcctcatagatgatcatatcatgttttcttctcttctgaaacctctaatacccttgtcctatcctcattctaagctgatgaccttacttcctatttcacaaaaataatagaaaaaaaaaa

SEQ ID NO: 18707 - DNA, 2627 bp, Homo sapiens
  source 1..2627: mol_type = unassigned DNA
cggggctcgaggctgctggagtcgctcgctgactcgccctgcgccctcgccgcggacaccggagctgcggccgctccccgctgtcccccagagatggcagatcctgaggtagttgtgagtagctgcagctctcatgaagaggaaaatcgctgcaattttaaccagcaaacatctccatctgaggagcttctattagaagaccagatgaggcgaaaactcaaattttttttcatgaatccctgtgagaagttctgggctcgaggtagaaaaccatggaaacttgccatacaaattctaaaaattgcaatggtgactatccagtacttgcagctatacaatgtctccgttgggaatcatgcttatgagaacaaaggtaccaagcaatctgctatggcaatctgtcagcacttctacaagcgaggaaacatctaccctggaaatgatacctttgacatcgatccagaaattgaaactgagtgtttctttgtggagccagatgaaccttttcacattgggacaccagcagaaaataaactgaacttaacactggacttccacagactcctaacagtggagcttcagtttaaactgaaagccattaatctgcagacagttcgtcatcaagaactccctgactgttatgactttactctgactataacatttgacaacaaggcccatagtggaagaattaaaataagtttagataatgacatttccatcagagaatgtaaagactggcatgtatctggatcaattcagaagaacactcattacatgatgatctttgatgcctttgtcattctgacttgcttggtttcattaatcctctgcattagatctgtgattagaggacttcagcttcagcaggagtttgtcaattttttcctcctccattataagaaggaagtttctgtttctgatcaaatggaatttgtcaatggatggtacattatgattattattagtgacatattgacaatcattggatcaattctaaaaatggaaatccaagctaagagtctaactagttatgatgtctgtagcatacttcttgggacttctaccatgctcgtgtggcttggagtcatccgatacctcggtttctttgcaaagtacaacctcctcattttgacccttcaggcagcgctgcccaatgtcatcaggttctgctgctgtgcagctatgatttacttaggttactgcttctgtggatggatcgtgctggggccttaccatgacaagtttcgttctctgaacatggtctctgagtgccttttctctctgataaatggagatgatatgtttgccacgtttgcaaaaatgcagcaaaaaagttacttagtctggctgtttagtagaatttacctctactcattcatcagcctctttatatatatgattttaagtcttttcattgcactgatcactgatacatacgaaacaattaagcaataccaacaagatggcttcccagagactgaacttcgtacatttatatcagaatgcaaagatctacccaactctggaaaatacagattagaagatgaccctccagtatctttattctgctgttgtaaaaagtagctatcaggtttatctgtactttagaggaaaatataatgtgtagctgagttggaacactgtggatattctgagatcagatgtagtatgtttgaagactgttattttgagctaattgagacctataattcaccaataactgtttatatttttaaaagcaatatttaatgtctttgcaactttatgctgggattgtttttaaaaaaactttaatgaggaaagctattggattattattatttcttgtttattttgccatggctttagaatgtattctgtatgcctctcttttgctctgatactgttgctcctgctattctgattgtgcagactgtgtaattagtggaaaacaatccttggtctgactgtgactttggacaactcagtaaccctggcttggaccactctcaggagtccatccttgagagagtgggtgtagttatcatttatacagtaatcattgcattttaaaatcttctcttgaaaggaagaataagagtgcaccagaataagagcgcaccagaataagagcgcaccagctaacaatgtgatacggccatatgtcacttaaggatggagatatgttctgagaaatgtgtcattaggcgattttgtcattaaacatcatagcatgtacttccacaaacctagatggtatagcctactacacacctaggctatttggtatagcctgttggtcctggggtacaaatctgtacaacatgttactgtattgaatacagtaggcaattgtaacacaatggtaagtatctaaacatagaaaagggacagtaaaaatatggttttataatcttctgggaccaccattgtatatgcggtacatcattgaccaaaacatcgttatccagcatatgactgtatttggttatgaaagccaactgttacttgattctgcttttagttcttaagaggatcaggcttttaaatactcatttacaagttttctatcctccttcagtgttaaagtagaaagtaaaaagagtatcttatacatgcatgaaattaaagcatataccaaatgc

SEQ ID NO: 18708 - DNA, 2754 bp, Homo sapiens
  source 1..2754: mol_type = unassigned DNA
gcgccctcgccgcggacaccggagctgcggccgctccccgctgtcccccagatggcagatcctgaggtagttgtgagtagctgcagctctcatgaagaggaaaatcgctgcaattttaaccagcaaacatctccatctgaggagcttctattagaagaccagatgaggcgaaaactcaaattttttttcatgaatccctgtgagaagttctgggctcgaggtagaaaaccatggaaacttgccatacaaattctaaaaattgcaatggtgactatccagctggtcttatttgggctaagtaaccagatggtggtagctttcaaggaagagaatactatagcattcaaacaccttttcctaaaaggatatatggaccgaatggatgacacatatgcagtgtacacacaaagtgacgtgtatgatcagttaatcttcgcagtaaaccagtacttgcagctatacaatgtctccgttgggaatcatgcttatgagaacaaaggtaccaagcaatctgctatggcaatctgtcagcacttctacaagcgaggaaacatctaccctggaaatgatacctttgacatcgatccagaaattgaaactgagtgtttctttgtggagccagatgaaccttttcacattgggacaccagcagaaaataaactgaacttaacactggacttccacagactcctaacagtggagcttcagtttaaactgaaagccattaatctgcagacagttcgtcatcaagaactccctgactgttatgactttactctgactataacatttgacaacaaggcccatagtggaagaattaaaataagtttagataatgacatttccatcagagaatgtaaagactggcatgtatctggatcaattcagaagaacactcattacatgatgatctttgatgcctttgtcattctgacttgcttggtttcattaatcctctgcattagatctgtgattagaggacttcagcttcagcaggagtttgtcaattttttcctcctccattataagaaggaagtttctgtttctgatcaaatggaatttgtcaatggatggtacattatgattattattagtgacatattgacaatcattggatcaattctaaaaatggaaatccaagctaagagtctaactagttatgatgtctgtagcatacttcttgggacttctaccatgctcgtgtggcttggagtcatccgatacctcggtttctttgcaaagtacaacctcctcattttgacccttcaggcagcgctgcccaatgtcatcaggttctgctgctgtgcagctatgatttacttaggttactgcttctgtggatggatcgtgctggggccttaccatgacaagtttcgttctctgaacatggtctctgagtgccttttctctctgataaatggagatgatatgtttgccacgtttgcaaaaatgcagcaaaaaagttacttagtctggctgtttagtagaatttacctctactcattcatcagcctctttatatatatgattttaagtcttttcattgcactgatcactgatacatacgaaacaattaagcaataccaacaagatggcttcccagagactgaacttcgtacatttatatcagaatgcaaagatctacccaactctggaaaatacagattagaagatgaccctccagtatctttattctgctgttgtaaaaagtagctatcaggtttatctgtactttagaggaaaatataatgtgtagctgagttggaacactgtggatattctgagatcagatgtagtatgtttgaagactgttattttgagctaattgagacctataattcaccaataactgtttatatttttaaaagcaatatttaatgtctttgcaactttatgctgggattgtttttaaaaaaactttaatgaggaaagctattggattattattatttcttgtttattttgccatggctttagaatgtattctgtatgcctctcttttgctctgatactgttgctcctgctattctgattgtgcagactgtgtaattagtggaaaacaatccttggtctgactgtgactttggacaactcagtaaccctggcttggaccactctcaggagtccatccttgagagagtgggtgtagttatcatttatacagtaatcattgcattttaaaatcttctcttgaaaggaagaataagagtgcaccagaataagagcgcaccagaataagagcgcaccagctaacaatgtgatacggccatatgtcacttaaggatggagatatgttctgagaaatgtgtcattaggcgattttgtcattaaacatcatagcatgtacttccacaaacctagatggtatagcctactacacacctaggctatttggtatagcctgttggtcctggggtacaaatctgtacaacatgttactgtattgaatacagtaggcaattgtaacacaatggtaagtatctaaacatagaaaagggacagtaaaaatatggttttataatcttctgggaccaccattgtatatgcggtacatcattgaccaaaacatcgttatccagcatatgactgtatttggttatgaaagccaactgttacttgattctgcttttagttcttaagaggatcaggcttttaaatactcatttacaagttttctatcctccttcagtgttaaagtagaaagtaaaaagagtatcttatacatgcatgaaattaaagcatataccaaatgca

SEQ ID NO: 18709 - DNA, 2819 bp, Homo sapiens
  source 1..2819: mol_type = unassigned DNA
ccggggccgaggcccgtgacggggcgggcgggagccccggcagtccggggtcgccggcgagggccatgtcgctgttgggggacccgctacaggccctgccgccctcggccgcccccacggggccgctgctcgcccctccggccggcgcgaccctcaaccgcctgcgggagccgctgctgcggaggctcagcgagctcctggatcaggcgcccgagggccggggctggaggagactggcggagctggcggggagtcgcgggcgcctccgcctcagttgcctagacctggagcagtgttctcttaaggtactggagcctgaaggaagccccagcctgtgtctgctgaagttaatgggtgaaaaaggttgcacagtcacagaattgagtgatttcctgcaggctatggaacacactgaagttcttcagcttctcagccccccaggaataaagattactgtaaacccagagtcaaaggcagtcttggctggacagtttgtgaaactgtgttgccgggcaactggacatccttttgttcaatatcagtggttcaaaatgaataaagagattccaaatggaaatacatcagagcttatttttaatgcagtgcatgtaaaagatgcaggcttttatgtctgtcgagttaataacaatttcacctttgaattcagccagtggtcacagctggatgtttgcgacatcccagagagcttccagagaagtgttgatggcgtctctgaatccaagttgcaaatctgtgttgaaccaacttcccaaaagctgatgccaggcagcacattggttttacagtgtgttgctgttggaagccctattcctcactaccagtggttcaaaaatgaattaccattaacacatgagaccaaaaagctatacatggtgccttatgtggatttggaacaccaaggaacctactggtgtcatgtatataatgatcgagacagtcaagatagcaagaaggtagaaatcatcatagatgaattaaataatcttggtcatcctgataataaagagcaaacaactgaccagcctttggcgaaggacaaggttgcccttttgataggaaatatgaattaccgggagcaccccaagctcaaagctcctttggtggatgtgtacgaattgactaacttactgagacagctggacttcaaagtggtttcactgttggatcttactgaatatgagatgcgtaatgctgtggatgagtttttactccttttagacaagggagtatatgggttattatattatgcaggacatggttatgaaaattttgggaacagcttcatggtccccgttgatgctccaaatccatataggtctgaaaattgtctgtgtgtacaaaatatactgaaattgatgcaagaaaaagaaactggacttaatgtgttcttattggatatgtgtaggaaaagaaatgactacgatgataccattccaatcttggatgcactaaaagtcaccgccaatattgtgtttggatatgccacgtgtcaaggagcagaagcttttgaaatccagcattctggattggcaaatggaatctttatgaaatttttaaaagacagattattagaagataagaaaatcactgtgttactggatgaagttgcagaagatatgggtaagtgtcaccttaccaaaggcaaacaggctctagagattcgaagtagtttatctgagaagagagcacttactgatccaatacagggaacagaatattctgctgaatctcttgtgcggaatctacagtgggccaaggctcatgaacttccagaaagtatgtgtcttaagtttgactgtggtgttcagattcaattaggatttgcagctgagttttccaatgtcatgatcatctatacaagtatagtttacaaaccaccggagataataatgtgtgatgcctacgttactgattttccacttgatctagatattgatccaaaagatgcaaataaaggcacacctgaagaaactggcagctacttggtatcaaaggatcttcccaagcattgcctctataccagactcagttcactgcaaaaattaaaggaacatctagtcttcacagtatgtttatcatatcagtactcaggattggaagatactgtagaggacaagcaggaagtgaatgttgggaaacctctcattgctaaattagacatgcatcgaggtttgggaaggaagacttgctttcaaacttgtcttatgtctaatggtccttaccagagttctgcagccacctcaggaggagcagggcattatcactcattgcaagacccattccatggtgtttaccattcacatcctggtaatccaagtaatgttacaccagcagatagctgtcattgcagccggactccagatgcatttatttcaagtttcgctcaccatgcttcatgtcattttagtagaagtaatgtgccagtagagacaactgatgaaataccatttagtttctctgacaggctcagaatttctgaaaaatgacctccttgtttttgaaagttagcataattttagatgcctgtgaaatagtactgcacttacataaagtgagacattgtgaaaaggcaaatttgtatatgtagagaaagaatagtagtaactgtttcatagcaaacttcaggactttgagatgttgaaattacattatttaattacagacttcctctttctaagattttgtgaattggttgaatagttctatacaaatgaagtatggaggtgtgtatgtttatatgtatataacaaaatattttcattgtgaccactctgaagtaagagcaatgggaatggcat

SEQ ID NO: 18710 - DNA, 8789 bp, Homo sapiens
  source 1..8789: mol_type = unassigned DNA
cgaggctccgtgccccgccccccgggtgccccgcccctttgcgcggctggcgcggccagcaggccaggctcccctcggcaaacctgtctaattggggcggggagcggagcttcctcctctgagggccgtgccgcgctgccagatttgttcttccgcccctgcctccgcggctcggaggcgagcggaaggtgccccggggccgaggcccgtgacggggcgggcgggagccccggcagtccggggtcgccggcgagggccatgtcgctgttgggggacccgctacaggccctgccgccctcggccgcccccacggggccgctgctcgcccctccggccggcgcgaccctcaaccgcctgcgggagccgctgctgcggaggctcagcgagctcctggatcaggcgcccgagggccggggctggaggagactggcggagctggcggggagtcgcgggcgcctccgcctcagttgcctagacctggagcagtgttctcttaaggtactggagcctgaaggaagccccagcctgtgtctgctgaagttaatgggtgaaaaaggttgcacagtcacagaattgagtgatttcctgcaggctatggaacacactgaagttcttcagcttctcagccccccaggaataaagattactgtaaacccagagtcaaaggcagtcttggctggacagtttgtgaaactgtgttgccgggcaactggacatccttttgttcaatatcagtggttcaaaatgaataaagagattccaaatggaaatacatcagagcttatttttaatgcagtgcatgtaaaagatgcaggcttttatgtctgtcgagttaataacaatttcacctttgaattcagccagtggtcacagctggatgtttgcgacatcccagagagcttccagagaagtgttgatggcgtctctgaatccaagttgcaaatctgtgttgaaccaacttcccaaaagctgatgccaggcagcacattggttttacagtgtgttgctgttggaagccctattcctcactaccagtggttcaaaaatgaattaccattaacacatgagaccaaaaagctatacatggtgccttatgtggatttggaacaccaaggaacctactggtgtcatgtatataatgatcgagacagtcaagatagcaagaaggtagaaatcatcataggaagaacagatgaggcagtggagtgcactgaagatgaattaaataatcttggtcatcctgataataaagagcaaacaactgaccagcctttggcgaaggacaaggttgcccttttgataggaaatatgaattaccgggagcaccccaagctcaaagctcctttggtggatgtgtacgaattgactaacttactgagacagctggacttcaaagtggtttcactgttggatcttactgaatatgagatgcgtaatgctgtggatgagtttttactccttttagacaagggagtatatgggttattatattatgcaggacatggttatgaaaattttgggaacagcttcatggtccccgttgatgctccaaatccatataggtctgaaaattgtctgtgtgtacaaaatatactgaaattgatgcaagaaaaagaaactggacttaatgtgttcttattggatatgtgtaggaaaagaaatgactacgatgataccattccaatcttggatgcactaaaagtcaccgccaatattgtgtttggatatgccacgtgtcaaggagcagaagcttttgaaatccagcattctggattggcaaatggaatctttatgaaatttttaaaagacagattattagaagataagaaaatcactgtgttactggatgaagttgcagaagatatgggtaagtgtcaccttaccaaaggcaaacaggctctagagattcgaagtagtttatctgagaagagagcacttactgatccaatacagggaacagaatattctgctgaatctcttgtgcggaatctacagtgggccaaggctcatgaacttccagaaagtatgtgtcttaagtttgactgtggtgttcagattcaattaggatttgcagctgagttttccaatgtcatgatcatctatacaagtatagtttacaaaccaccggagataataatgtgtgatgcctacgttactgattttccacttgatctagatattgatccaaaagatgcaaataaaggcacacctgaagaaactggcagctacttggtatcaaaggatcttcccaagcattgcctctataccagactcagttcactgcaaaaattaaaggaacatctagtcttcacagtatgtttatcatatcagtactcaggattggaagatactgtagaggacaagcaggaagtgaatgttgggaaacctctcattgctaaattagacatgcatcgaggtttgggaaggaagacttgctttcaaacttgtcttatgtctaatggtccttaccagagttctgcagccacctcaggaggagcagggcattatcactcattgcaagacccattccatggtgtttaccattcacatcctggtaatccaagtaatgttacaccagcagatagctgtcattgcagccggactccagatgcatttatttcaagtttcgctcaccatgcttcatgtcattttagtagaagtaatgtgccagtagagacaactgatgaaataccatttagtttctctgacaggctcagaatttctgaaaaatgacctccttgtttttgaaagttagcataattttagatgcctgtgaaatagtactgcacttacataaagtgagacattgtgaaaaggcaaatttgtatatgtagagaaagaatagtagtaactgtttcatagcaaacttcaggactttgagatgttgaaattacattatttaattacagacttcctctttctaagattttgtgaattggttgaatagttctatacaaatgaagtatggaggtgtgtatgtttatatgtatataacaaaatattttcattgtgaccactctgaagtaagagcaatgggaatggcattattgtagaataagtcattgtatttttaacaccagaaagaaccttgccgatcaccaggcataacctaattttatccatggaagaaacacagaaaggcatctaagttagagctggcaccagaactgagacctccagaaatctattccagtattttttccactacacaactgccttcctgacaggttctgagataagtgttatgtttgtagatagagtgaaatatatttatatatatataaatatatacagatacatatctgtgtattatctcaaggaatgtacaaactttagtttttgattataaggacttcactgcaagttttagttaagaggtttgtatataaatctgttatagaacaggctgaaatttcttgttcataagattatgaaaccacatgagaagtgataaaatgtttgttaaagctagatagaggttaagaatcaagatataatggataattttcatagctgcctatcagaatttcccaaatatttagcatcttccttgataatatgtattttcttcttgaatttcactggcctaatgagataatactcttatctttggctctacctaaaagttggttaaaaatgcaattggcattaacaaggaaaaatactgaattagtaattttaaaagtctcacaaagaaaatcccaggcctagatggctgcattgttgaattctgccaaacattaaaattagcactaattttttgcacactgtttctaaaagtaggagaggaaagaacacttcccaacttactctaggtcagtattaccctgatactagactagacatcacaagaaaactataagccaatattccttattaatacaaacacaaaaatcattaacaaaaatattagcaaactgaatccagcaacctataaaaaggattctatatcatgaccaagtggaatttatcccaggaattcaaggttggttcaacatctaaaaatcaaataagctaatatacagtcagttctcattattcacagtaattatgttctacagaatattctcccataaacactgaattaaatatggaacaactgcttttaggagaaagtgtatttgtgtatatgtgtgtatacatatgtttatctcacacacattatgagcttgaattcttaattcatcctagcaaattctaccttattttacagaagtgaaagtgaggtatcagaagtgttaagtgacatgcctgaggcacccccctaacaggtgtcagagctgaaattcaaaccccatccagctggccccggagccagagcttcttgtactacacagaattgcccctgccatttccaccctccagtcatttctctatgagactgaagcaggaaggcagagcatcatcttgttcagcctcagctgggaacatgtgtactgggtgactcaaatttttcacccatttacacatatccacaaatgactgcaaaagtgccacggatatcaatttgagggttataaattttagcaagttggtaaattcacaaatacataaccttgaataatgaggatcaactgtaccatatttaataaagcacaaaacccacacagattgtcttattacagcatttgataaaatccaaaactctttcataaaaacactcaacaaacttaggaataaaaggaatcttcctagatatgataaatataacatctatgaaaagcccacacctaacattatacttcatggtgatagactgaaggctgaatgttttccccttaagattgggaagaaggacaaggatgttcactcggcactacttctattcagcattgtacttgaagttctagccacagcagttaggttaggaattcaaggtttgttcaacatctaaaaatcaaataagctaataaagaaaagaggtttatactgcaaaagaagtgaaactatatgtattcacagttgatacatagttgtatatagaaaatgctaaagaatccataaaaagtaataaatgagttcaacaggttgcaggatacaagatcagttttatttctctactaacagcaaacattctgaaaatgagaataaagaaatcctatatacagtagcatcaagaataaaactccaacacgtttaaagaaattaagatccagataaatggaaagacatccatgttcatggattggaagactgaatattggtaagatggcaatgctgcccaaattagtctacatattcaacaattcctatcaaaatcctagctgtattttttgcagaaattgacaaactggtaaaattggtagggaaacgcaggggacccagaatagccaaaaaaccttggaaaagaacaaagttggaagacgtaccaatttcaaaaagtgctaccaagctacaataagacagtgtaggcatatggatagacatatcgatcagaggaatggaactgaacatccagaaataaacccatacatttctggtcaacttgttttcaacaaggatgccaataccatcaatagagaaggagtggtcttttcaacaaacggtgctgggacaactaactggtagctacgtgcacagcaaaaggatccctaccttcctaccacattacaaattctaactcaaaatggatcatagacctcaatataagagtttaaactcttagaagaaaacagaagtaaatctttgtgatgttgggcttaggaatggtttcttagacataataccaaaagcacaagcaacaaaggcaaacagtagataaatgggacttcatcaaaattaactttagcgccttaaaggacaccattaagaaagtgaagttaaccctcagaatgggagaaaaatttttgaaaaatcatgtatctgataaaaaaacaaacaaacatgcaggtgctcagctgtggttaccaccgagcagcactgtccagtgaacttgctgtgatgatgggatgcttggtatccgcactcccagtgtgatagcctttagcctcatggggttgttgagcagttgaaataatagctagtgtgaggaactgaacataaaattttagttttaggatgggtgtggtggctcacgcctataatctcagcactttgggaggccaatgaaggcggatcacttgagcccaggagttcaagaccagcttgaccaagatggcaaaaccctgtctctattaaaaatacaaaaaaattagctgggcatggtggcacacacctgtaatcccagctactagggaggctgaggcaggagaatcgtacttcccctttatactcttctgtatatttgatttttttttttttaagacagagtcctggctctgtcgcccaggctggagtgcagcgacatagtctcagctcactgcagcatccgtggaggctgaaacaggagaatcgcatgaattttttaaaaaatctaaacatgtaattttaaaacgggcttaagaagaatgataacagttttggtcttcttttttatcaaccatgcttttattttacttgaatctcgtgccaattgctttgtaatattaaagtaggatttacacaagtggaatttagaaaagatgataatctatcaaatctgtcaataccaattagaatgtaataaagaaattaggatagtggaggtttgagcaagtaaaggctcacccaaattcaaagccaatacttgatgctgagaggggatattttctggaaggtaatttttaaaaattaaagtcacaattataaattgtatatttcctaataaaagaaatctcaactcatgggacaatttgaatttaaaacactattgttcctcattcagtgatgaacaagtcaaaacgtttcagaaaagaaagcctttaaagaagaatcctggcacagaaaaggtccatttagacattgccttcttcccccatctctaatgcctcttttcaaatctctgacttgcacatgaagtaacagtgaggtgtcctgtgcagcagtcgcaattttttgacttgtcaaattgaagaaattcaattatgtagccagagcttagatcactgacatgtatactggcataagcttttttttgtttgtttttaattttattagaagtgggatctcattttgttgcccatgctggtctcaaacacctgtcttcaagtgatcctcctgcctcagcagcatcagtttaatatctagataaaatctgatgtatgtaattttacttttaagggtttttttccaaacagacgtcctgacaatgttgtttcctattccttgaacattcacctgacgcttatatactgtcattacttttatctgtcaactgatgtcagctactcaatttacacattacttttgtgcatttcatcctgtttctcagtttgacattgtcattcaaattcagagtttgacactgaaaccctgggcatggtggctcacacctgtaatcccagcacttcgggagactgcggtaagcagatcatttgaacccaggagtttgagactagccttggcaacatggtgaaaccccatctctaccaaaaaaaaaaaaaaaaaaaaagcaaaaacaaaaattaactgggcatagttgcacacacctgtagtcccagctactcaggaggctgaagtgggacgatcgcttgagcccagaaggcagaggttacggtgagtagagattgtgccactgcactccagcctggacgacagggcaagacgctgtctcaaaaataaaatattagtaaagaagagtacaatcagaatatgaaaatgtgtaaatgtgcatattctctttttttctaatttggtagcattaaaaatacttaagcatcaaagtttggctttatgaagaaggagtctgagacacctcaggtttcagcccttactaatagcgtggctcaaagagcgttaacttgcctgtgcttctgtttccttatctgtaaaatggggatgatgctgtaacatcaaagagcttataatactttccagagctggcagtactaaataagaccattcctctaaagtgccagcattttgaaaagcatcaacccatcaaccttgtgctttaaatctggcattcttaaagctatacctgtaggcagtatagagtgtttttttttatttgtttttttgttgttgtcttttgagtctcactctgtctcccaggctgtagtgcagtggcacgtcttggttcgccgcaacctccgcctcccaggttcaagcgattctcgtgcctcagccccccgcatagctggcattacaggcacacaccaccacgcccagctaatttttgtagttttagtagtatctactaaaataaacagggtttcaccatgttggccaggctggtctcaaactcctgacctcaagtgatctgcctgcctcggcctcccaaagtgctgggattacaggcgtgagtcaccatgcccggccggcagtgtatatcttctaaagttgcaatttttgttcactccagaatcacttttcaaaaagcatgcagatttaatgccaccagtttgtgttatgtatctatcccgcaaaacagctctaaaggtgatttactaaaagattaacagcatttatctctggtgggataatttttctttgcttgtttacctgtgtcttgcagattttacacagtgaacaatgactgtataattttaaaatacagatatgcacaattgtgtaatgtaaatatgctcagcttcaatacatttaagaacacatttttaacttttcgtaaggagtcttcagtttaaaagtacagtgtcattacagagtgcttattctgttacaaaattagtaaagctgattctgcctctaaa

SEQ ID NO: 18711 - DNA, 4182 bp, Homo sapiens
  source 1..4182: mol_type = unassigned DNA
aatgggcgggcggcagggagcgcgcgtgcgcagggcaggtcggggggggggggggggcggggcgaagccgaggaagagcgttttggggacgggggctggtgaggctcacgttggagggcttcgcgtctgcttcggagaccgtaaggatattgatgaccatgagatccctgctcagaacccccttcctgtgtggcctgctctgggccttttgtgccccaggcgccagggctgaggagcctgcagccagcttctcccaacccggcagcatgggcctggataagaacacagtgcacgaccaagagcatatcatggagcatctagaaggtgtcatcaacaaaccagaggcggagatgtcgccacaagaattgcagctccattacttcaaaatgcatgattatgatggcaataatttgcttgatggcttagaactctccacagccatcactcatgtccataaggaggaagggagtgaacaggcaccactaatgagtgaagatgaactgattaacataatagatggtgttttgagagatgatgacaagaacaatgatggatacattgactatgctgaatttgcaaaatcactgcagtagatgttatttggccatctcctggttatatacaaatgtgacccgtgataatgtgattgaacactttagtaatgcaaaataactcatttccaactactgctgcagcattttggtaaaaacctgtagcgattcgttacactggggtgagaagagataagagaaatgaaagagaagagaaatgggacatctaatagtccctaagtgctattaaataccttattggacaagggcttgcttcaagcatctgtattagtctgtattaatgctgctgataaagacgtacccgagactgggaagaaaaagaggtttacttggacttacagttccacatggctggggaggcctcagaatcatggcgggaggtgaaaggcacttcttacatggcagcaagagaaaatgaggaagaagcaaaagtggaaacccctgataagccatcagatcttgtgaaacttattcactatcacaagaatagcatgggaaagactggcccccatgattcaattacctccccttgggtctctcccacaacacgtgggaattctggtagatacaatttcaagttgagatttgggtggggacatagccaaaccatatcattctacccctggcccctccaaatctcatgtcctcactattcaaaaccaatcatgccttcctaacagtcccccaaagtcttaactcttttcagcattaacgcaaaaatccacagtccaaagtctcatctgagacaaggcaagtcccttccacctatgagcctgtaaaatcaaaagcaagctagttacttcctagataccaacaggggtacaggtattgattaaagacggctgttccaaatgggagaaattggccaaaataaaggggttacagggcccatgcaagtccgaaatccagcagggctgtcaaattttaaagttccagaataatctcctttgactccaggtctcacatccaggtcatactgatgcaagaagtgggttcccatggtcttgggcagctctgcccctgtggctttgtagggtacagcctccctcctggctgctttcacggctgttgttcagtgcctgcggcttttccaggtgcacggtgcaagctgttggtggatctaccattctggggtctggaggacggtggccctcttctcacagctccactaggcagtgccccagtagggactctgtgtgggggctcccacaccacatttcccttctgcactgccctagcagaggttctctcccctgccgctgagagggcctctcccctgcagcaaacgtttgcctgggcattgaggcatttccatacatcttctgaaaactaggcggaggtttccaaatctcaattcttgacttctgtgcacctgcaggcttaacagcacatagaagctgccaaggcttggggcttccactctgaagccacagcccgagctgtatgttggcccctttcagccatggctggagtggctgggacacaagacaccaagtccctaggctgcacacacatgtcaggggctgccctgacatggcctggagacattttccccatggtgttggggattaacattaggctccttgctacttatgcaaatttctgcagctggcttgaatttctccccagaaaatgggtttttcttttctattgcatagtcaggctgcaaatttccaaacttttatgctttgcttcccttatttataagggaatgcctttaaaagcacccaagtcacctgttgaacactttgctgcttagaaatttcttccgctagttaacctaaatcatctctctcaagttcaaagttccacaaatccctatggaaggggcaaaatgctgccagtctctttgctaaaacataacaagagtcacctttactccagttcccaacaagttcctcatcttcatctgaggccacctcagcctggactttgttgtccatattgctatcagcatttggggcaaagccattcaacaagtctgtaggaagttccaaactttcccacattttcctgttttcttctgagccctccaaactgttccagcctctgcctgttacccagttccaaagtcacttccacattttgggtatttcttcagcaggtcccaatctactggtaccaatttactgtattagtccgttttcacgctgctgataaagacatacccgagactgggaagaaaaagtggtttaattggacttaaagttccacatggctggggaggcctcagaatcatggtgggaggcaaaagacacttcttacattgtggcaagaaaaaatgaggaagaagcaaaagcagaaacccctgataaactgatcagatctcatgagacttattcactgtcacgagaatagcacgggaaagactggcccccatgattcaattacctccccctgggtctgtcccacaacacgtgggaattctgggagatacaattcaagttgagatttgtggggggacacaaccaaaccatatcagcatcctttcaagaatattagataattggagctgagtactcaggaacttgactgtagtagaatactgctagtttcttaattttaattcacatcacctgaaaagtaaaacaacaggctttgccaagtggatgcttttcagtaacagtgaagtggagtgaataccaaatgtttgccctggtggttcctatctcttcaggcaaacatggtcagtattctgtaaagttcccctggcctaaatgattacttgctctgggcaagtggatatttattaggctatttcaaagccacagcataagaatgtcagcctagccacagagtctgagattctgagttcagcctagccacagagtctaagattctgtatcctctgacattttggaaatgatacactactggcttaagtgatgactctttcagattttcagtattttatacaactactgccacatccttatactttattgcttttctgtcttcttcaacctgggagagaccctgaatttgagtgtgttctctaatcaatagtggtttagctttcttttctatttcactcgtttctagggttttttatttgcagtttaggaactattaggaatgtcaggactttatcagcaggggtaaaactaccacctggcctagcctaagtaggaagtgaaaagataattcaccaaacaatgattaatcagatagaagttctagtcaagagggatattgttgaagttacctcttttagcctagatacatggattcttttcaaatcaggaaagattagaaaaggaacccaaaaaaccctttaacagtgtgaatctttatagtatttgaaaatgagaagaagcagcagattgtaatttggtttattggatgtgatggacgttctgtaatagaaaacctgaaacgatgattgaatgggaaaaagagactacaaaatttgtcgtaggatgtatacagacttattttctttattacagtattataagaaaacatatgtatttgtaaaaatggtttcctgtgtcaagtatttgtgcagtcagagctgacttgtaaactattcttgtaatagctcattattttgaaagatttatatatgatgaattctggatatatgaccaataaaactgatgaagcaaaa

SEQ ID NO: 18712 - DNA, 4210 bp, Homo sapiens
  source 1..4210: mol_type = unassigned DNA
acgggggctggtgaggctcacgttggagggcttcgcgtctgcttcggagaccgtaaggctgtcatcagctgtggacgggagccttctgaagggaagcacttgggagcctgcaggacgaatacctacaccagacttggaattgaaaagacctcactggagaaagagacatttgatatattgatgaccatgagatccctgctcagaacccccttcctgtgtggcctgctctgggccttttgtgccccaggcgccagggctgaggagcctgcagccagcttctcccaacccggcagcatgggcctggataagaacacagtgcacgaccaagagcatatcatggagcatctagaaggtgtcatcaacaaaccagaggcggagatgtcgccacaagaattgcagctccattacttcaaaatgcatgattatgatggcaataatttgcttgatggcttagaactctccacagccatcactcatgtccataaggaggaagggagtgaacaggcaccactaatgagtgaagatgaactgattaacataatagatggtgttttgagagatgatgacaagaacaatgatggatacattgactatgctgaatttgcaaaatcactgcagtagatgttatttggccatctcctggttatatacaaatgtgacccgtgataatgtgattgaacactttagtaatgcaaaataactcatttccaactactgctgcagcattttggtaaaaacctgtagcgattcgttacactggggtgagaagagataagagaaatgaaagagaagagaaatgggacatctaatagtccctaagtgctattaaataccttattggacaagggcttgcttcaagcatctgtattagtctgtattaatgctgctgataaagacgtacccgagactgggaagaaaaagaggtttacttggacttacagttccacatggctggggaggcctcagaatcatggcgggaggtgaaaggcacttcttacatggcagcaagagaaaatgaggaagaagcaaaagtggaaacccctgataagccatcagatcttgtgaaacttattcactatcacaagaatagcatgggaaagactggcccccatgattcaattacctccccttgggtctctcccacaacacgtgggaattctggtagatacaatttcaagttgagatttgggtggggacatagccaaaccatatcattctacccctggcccctccaaatctcatgtcctcactattcaaaaccaatcatgccttcctaacagtcccccaaagtcttaactcttttcagcattaacgcaaaaatccacagtccaaagtctcatctgagacaaggcaagtcccttccacctatgagcctgtaaaatcaaaagcaagctagttacttcctagataccaacaggggtacaggtattgattaaagacggctgttccaaatgggagaaattggccaaaataaaggggttacagggcccatgcaagtccgaaatccagcagggctgtcaaattttaaagttccagaataatctcctttgactccaggtctcacatccaggtcatactgatgcaagaagtgggttcccatggtcttgggcagctctgcccctgtggctttgtagggtacagcctccctcctggctgctttcacggctgttgttcagtgcctgcggcttttccaggtgcacggtgcaagctgttggtggatctaccattctggggtctggaggacggtggccctcttctcacagctccactaggcagtgccccagtagggactctgtgtgggggctcccacaccacatttcccttctgcactgccctagcagaggttctctcccctgccgctgagagggcctctcccctgcagcaaacgtttgcctgggcattgaggcatttccatacatcttctgaaaactaggcggaggtttccaaatctcaattcttgacttctgtgcacctgcaggcttaacagcacatagaagctgccaaggcttggggcttccactctgaagccacagcccgagctgtatgttggcccctttcagccatggctggagtggctgggacacaagacaccaagtccctaggctgcacacacatgtcaggggctgccctgacatggcctggagacattttccccatggtgttggggattaacattaggctccttgctacttatgcaaatttctgcagctggcttgaatttctccccagaaaatgggtttttcttttctattgcatagtcaggctgcaaatttccaaacttttatgctttgcttcccttatttataagggaatgcctttaaaagcacccaagtcacctgttgaacactttgctgcttagaaatttcttccgctagttaacctaaatcatctctctcaagttcaaagttccacaaatccctatggaaggggcaaaatgctgccagtctctttgctaaaacataacaagagtcacctttactccagttcccaacaagttcctcatcttcatctgaggccacctcagcctggactttgttgtccatattgctatcagcatttggggcaaagccattcaacaagtctgtaggaagttccaaactttcccacattttcctgttttcttctgagccctccaaactgttccagcctctgcctgttacccagttccaaagtcacttccacattttgggtatttcttcagcaggtcccaatctactggtaccaatttactgtattagtccgttttcacgctgctgataaagacatacccgagactgggaagaaaaagtggtttaattggacttaaagttccacatggctggggaggcctcagaatcatggtgggaggcaaaagacacttcttacattgtggcaagaaaaaatgaggaagaagcaaaagcagaaacccctgataaactgatcagatctcatgagacttattcactgtcacgagaatagcacgggaaagactggcccccatgattcaattacctccccctgggtctgtcccacaacacgtgggaattctgggagatacaattcaagttgagatttgtggggggacacaaccaaaccatatcagcatcctttcaagaatattagataattggagctgagtactcaggaacttgactgtagtagaatactgctagtttcttaattttaattcacatcacctgaaaagtaaaacaacaggctttgccaagtggatgcttttcagtaacagtgaagtggagtgaataccaaatgtttgccctggtggttcctatctcttcaggcaaacatggtcagtattctgtaaagttcccctggcctaaatgattacttgctctgggcaagtggatatttattaggctatttcaaagccacagcataagaatgtcagcctagccacagagtctgagattctgagttcagcctagccacagagtctaagattctgtatcctctgacattttggaaatgatacactactggcttaagtgatgactctttcagattttcagtattttatacaactactgccacatccttatactttattgcttttctgtcttcttcaacctgggagagaccctgaatttgagtgtgttctctaatcaatagtggtttagctttcttttctatttcactcgtttctagggttttttatttgcagtttaggaactattaggaatgtcaggactttatcagcaggggtaaaactaccacctggcctagcctaagtaggaagtgaaaagataattcaccaaacaatgattaatcagatagaagttctagtcaagagggatattgttgaagttacctcttttagcctagatacatggattcttttcaaatcaggaaagattagaaaaggaacccaaaaaaccctttaacagtgtgaatctttatagtatttgaaaatgagaagaagcagcagattgtaatttggtttattggatgtgatggacgttctgtaatagaaaacctgaaacgatgattgaatgggaaaaagagactacaaaatttgtcgtaggatgtatacagacttattttctttattacagtattataagaaaacatatgtatttgtaaaaatggtttcctgtgtcaagtatttgtgcagtcagagctgacttgtaaactattcttgtaatagctcattattttgaaagatttatatatgatgaattctggatatatgaccaataaaactgatgaagcaaaa

SEQ ID NO: 18713 - DNA, 671 bp, Homo sapiens
  source 1..671: mol_type = unassigned DNA
gctcttaagactagcacggtgggctggcaggcgcccgctgtcggccgaggactgtctgggcgcgcttcctggaggaggcggtgcgtttcgcgcgctcgctgccggcgagccagcctcttcccttactcaccggtgtccggaaaggtgaacgctgcgctcgggctgcctcgcctgttacctccgccgccgggcatgctcagcgtctgcagctgccggaccagctccggcatgcggtcccagtggccctcggcgcggcagcgctccagctcgctctccaccttcaggcatatcatggagcatctagaaggtgtcatcaacaaaccagaggcggagatgtcgccacaagaattgcagctccattacttcaaaatgcatgattatgatggcaataatttgcttgatggcttagaactctccacagccatcactcatgtccataaggaggaagggagtgaacaggcaccactaatgagtgaagatgaactgattaacataatagatggtgttttgagagatgatgacaagaacaatgatggatacattgactatgctgaatttgcaaaatcactgcagtagatgttatttggccatctcctggttatatacaaatgtgacccgtgataatgtgattgaacactttagtaatgcaaaataactcatttccaactact

SEQ ID NO: 18714 - DNA, 1113 bp, Homo sapiens
  source 1..1113: mol_type = unassigned DNA
tactcaccggtgtccggaaaggtgaacgctgcgctcgggctgcctcgcctgttacctccgccgccgggcatgctcagcgtctgcagctgccggaccagctccggcatgcggtcccagtggccctcggcgcggcagcgctccagctcgctctccaccttcagatattgatgaccatgagatccctgctcagaacccccttcctgtgtggcctgctctgggccttttgtgccccaggcgccagggctgaggagcctgcagccagcttctcccaacccggcagcatgggcctggataagaacacagtgcacgaccaagagcatatcatggagcatctagaaggtgtcatcaacaaaccagaggcggagatgtcgccacaagaattgcagctccattacttcaaaatgcatgattatgatggcaataatttgcttgatggcttagaactctccacagccatcactcatgtccataaggaggaagggagtgaacaggcaccactaatgagtgaagatgaactgattaacataatagatggtgttttgagagatgatgacaagaacaatgatggatacattgactatgctgaatttgcaaaatcactgcagtagatgttatttggccatctcctggttatatacaaatgtgacccgtgataatgtgattgaacactttagtaatgcaaaataactcatttccaactactgctgcagcattttggtaaaaacctgtagcgattcgttacactggggtgagaagagataagagaaatgaaagagaagagaaatgggacatctaatagtccctaagtgctattaaataccttattggacaagggcttgcttcaagcatctgtattagtctgtattaatgctgctgataaagacgtacccgagactgggaagaaaaagaggtttacttggacttacagttccacatggctggggaggcctcagaatcatggcgggaggtgaaaggcacttcttacatggcagcaagagaaaatgaggaagaagcaaaagtggaaacccctgataagccatcagatcttgtgaaacttattcactatcacaagaatagcatgggaaagactggcccccatgattcaattacctc

SEQ ID NO: 18715 - DNA, 648 bp, Homo sapiens
  source 1..648: mol_type = unassigned DNA
ggatccgccatcctacgtcgcccgtggaactacgttcctgagggcttccggcgttgcctagcaactgccgggcccctagggcgtccagcggcccaactggagtggagccgagtgtcgcccttgggaaagcagatattgatgaccatgagatccctgctcagaacccccttcctgtgtggcctgctctgggccttttgtgccccaggcgccagggctgaggagcctgcagccagcttctcccaacccggcagcatgggcctggataagaacacagtgcacgaccaagagcatatcatggagcatctagaaggtgtcatcaacaaaccagaggcggagatgtcgccacaagaattgcagctccattacttcaaaatgcatgattatgatggcaataatttgcttgatggcttagaactctccacagccatcactcatgtccataaggaggaagggagtgaacaggcaccactaatgagtgaagatgaactgattaacataatagatggtgttttgagagatgatgacaagaacaatgatggatacattgactatgctgaatttgcaaaatcactgcagtagatgttatttggccatctcctggttatatacaaatgtgacccgtgataatgtgattgaacactttagtaa

SEQ ID NO: 18716 - DNA, 3955 bp, Homo sapiens
  source 1..3955: mol_type = unassigned DNA
tagcaactgccgggcccctagggcgtccagcggcccaactggagtggagccgagtgtcgcccttgggaaagcaggcatatcatggagcatctagaaggtgtcatcaacaaaccagaggcggagatgtcgccacaagaattgcagctccattacttcaaaatgcatgattatgatggcaataatttgcttgatggcttagaactctccacagccatcactcatgtccataaggaggaagggagtgaacaggcaccactaatgagtgaagatgaactgattaacataatagatggtgttttgagagatgatgacaagaacaatgatggatacattgactatgctgaatttgcaaaatcactgcagtagatgttatttggccatctcctggttatatacaaatgtgacccgtgataatgtgattgaacactttagtaatgcaaaataactcatttccaactactgctgcagcattttggtaaaaacctgtagcgattcgttacactggggtgagaagagataagagaaatgaaagagaagagaaatgggacatctaatagtccctaagtgctattaaataccttattggacaagggcttgcttcaagcatctgtattagtctgtattaatgctgctgataaagacgtacccgagactgggaagaaaaagaggtttacttggacttacagttccacatggctggggaggcctcagaatcatggcgggaggtgaaaggcacttcttacatggcagcaagagaaaatgaggaagaagcaaaagtggaaacccctgataagccatcagatcttgtgaaacttattcactatcacaagaatagcatgggaaagactggcccccatgattcaattacctccccttgggtctctcccacaacacgtgggaattctggtagatacaatttcaagttgagatttgggtggggacatagccaaaccatatcattctacccctggcccctccaaatctcatgtcctcactattcaaaaccaatcatgccttcctaacagtcccccaaagtcttaactcttttcagcattaacgcaaaaatccacagtccaaagtctcatctgagacaaggcaagtcccttccacctatgagcctgtaaaatcaaaagcaagctagttacttcctagataccaacaggggtacaggtattgattaaagacggctgttccaaatgggagaaattggccaaaataaaggggttacagggcccatgcaagtccgaaatccagcagggctgtcaaattttaaagttccagaataatctcctttgactccaggtctcacatccaggtcatactgatgcaagaagtgggttcccatggtcttgggcagctctgcccctgtggctttgtagggtacagcctccctcctggctgctttcacggctgttgttcagtgcctgcggcttttccaggtgcacggtgcaagctgttggtggatctaccattctggggtctggaggacggtggccctcttctcacagctccactaggcagtgccccagtagggactctgtgtgggggctcccacaccacatttcccttctgcactgccctagcagaggttctctcccctgccgctgagagggcctctcccctgcagcaaacgtttgcctgggcattgaggcatttccatacatcttctgaaaactaggcggaggtttccaaatctcaattcttgacttctgtgcacctgcaggcttaacagcacatagaagctgccaaggcttggggcttccactctgaagccacagcccgagctgtatgttggcccctttcagccatggctggagtggctgggacacaagacaccaagtccctaggctgcacacacatgtcaggggctgccctgacatggcctggagacattttccccatggtgttggggattaacattaggctccttgctacttatgcaaatttctgcagctggcttgaatttctccccagaaaatgggtttttcttttctattgcatagtcaggctgcaaatttccaaacttttatgctttgcttcccttatttataagggaatgcctttaaaagcacccaagtcacctgttgaacactttgctgcttagaaatttcttccgctagttaacctaaatcatctctctcaagttcaaagttccacaaatccctatggaaggggcaaaatgctgccagtctctttgctaaaacataacaagagtcacctttactccagttcccaacaagttcctcatcttcatctgaggccacctcagcctggactttgttgtccatattgctatcagcatttggggcaaagccattcaacaagtctgtaggaagttccaaactttcccacattttcctgttttcttctgagccctccaaactgttccagcctctgcctgttacccagttccaaagtcacttccacattttgggtatttcttcagcaggtcccaatctactggtaccaatttactgtattagtccgttttcacgctgctgataaagacatacccgagactgggaagaaaaagtggtttaattggacttaaagttccacatggctggggaggcctcagaatcatggtgggaggcaaaagacacttcttacattgtggcaagaaaaaatgaggaagaagcaaaagcagaaacccctgataaactgatcagatctcatgagacttattcactgtcacgagaatagcacgggaaagactggcccccatgattcaattacctccccctgggtctgtcccacaacacgtgggaattctgggagatacaattcaagttgagatttgtggggggacacaaccaaaccatatcagcatcctttcaagaatattagataattggagctgagtactcaggaacttgactgtagtagaatactgctagtttcttaattttaattcacatcacctgaaaagtaaaacaacaggctttgccaagtggatgcttttcagtaacagtgaagtggagtgaataccaaatgtttgccctggtggttcctatctcttcaggcaaacatggtcagtattctgtaaagttcccctggcctaaatgattacttgctctgggcaagtggatatttattaggctatttcaaagccacagcataagaatgtcagcctagccacagagtctgagattctgagttcagcctagccacagagtctaagattctgtatcctctgacattttggaaatgatacactactggcttaagtgatgactctttcagattttcagtattttatacaactactgccacatccttatactttattgcttttctgtcttcttcaacctgggagagaccctgaatttgagtgtgttctctaatcaatagtggtttagctttcttttctatttcactcgtttctagggttttttatttgcagtttaggaactattaggaatgtcaggactttatcagcaggggtaaaactaccacctggcctagcctaagtaggaagtgaaaagataattcaccaaacaatgattaatcagatagaagttctagtcaagagggatattgttgaagttacctcttttagcctagatacatggattcttttcaaatcaggaaagattagaaaaggaacccaaaaaaccctttaacagtgtgaatctttatagtatttgaaaatgagaagaagcagcagattgtaatttggtttattggatgtgatggacgttctgtaatagaaaacctgaaacgatgattgaatgggaaaaagagactacaaaatttgtcgtaggatgtatacagacttattttctttattacagtattataagaaaacatatgtatttgtaaaaatggtttcctgtgtcaagtatttgtgcagtcagagctgacttgtaaactattcttgtaatagctcattattttgaaagatttatatatgatgaattctggatatatgaccaataaaactgatgaagcaaaa

SEQ ID NO: 18717 - DNA, 3975 bp, Homo sapiens
  source 1..3975: mol_type = unassigned DNA
gggggcggggcgaagccgaggaagagcgttttggggacgggggctggtgaggctcacgttggagggcttcgcgtctgcttcggagaccgtaagggcatatcatggagcatctagaaggtgtcatcaacaaaccagaggcggagatgtcgccacaagaattgcagctccattacttcaaaatgcatgattatgatggcaataatttgcttgatggcttagaactctccacagccatcactcatgtccataaggaggaagggagtgaacaggcaccactaatgagtgaagatgaactgattaacataatagatggtgttttgagagatgatgacaagaacaatgatggatacattgactatgctgaatttgcaaaatcactgcagtagatgttatttggccatctcctggttatatacaaatgtgacccgtgataatgtgattgaacactttagtaatgcaaaataactcatttccaactactgctgcagcattttggtaaaaacctgtagcgattcgttacactggggtgagaagagataagagaaatgaaagagaagagaaatgggacatctaatagtccctaagtgctattaaataccttattggacaagggcttgcttcaagcatctgtattagtctgtattaatgctgctgataaagacgtacccgagactgggaagaaaaagaggtttacttggacttacagttccacatggctggggaggcctcagaatcatggcgggaggtgaaaggcacttcttacatggcagcaagagaaaatgaggaagaagcaaaagtggaaacccctgataagccatcagatcttgtgaaacttattcactatcacaagaatagcatgggaaagactggcccccatgattcaattacctccccttgggtctctcccacaacacgtgggaattctggtagatacaatttcaagttgagatttgggtggggacatagccaaaccatatcattctacccctggcccctccaaatctcatgtcctcactattcaaaaccaatcatgccttcctaacagtcccccaaagtcttaactcttttcagcattaacgcaaaaatccacagtccaaagtctcatctgagacaaggcaagtcccttccacctatgagcctgtaaaatcaaaagcaagctagttacttcctagataccaacaggggtacaggtattgattaaagacggctgttccaaatgggagaaattggccaaaataaaggggttacagggcccatgcaagtccgaaatccagcagggctgtcaaattttaaagttccagaataatctcctttgactccaggtctcacatccaggtcatactgatgcaagaagtgggttcccatggtcttgggcagctctgcccctgtggctttgtagggtacagcctccctcctggctgctttcacggctgttgttcagtgcctgcggcttttccaggtgcacggtgcaagctgttggtggatctaccattctggggtctggaggacggtggccctcttctcacagctccactaggcagtgccccagtagggactctgtgtgggggctcccacaccacatttcccttctgcactgccctagcagaggttctctcccctgccgctgagagggcctctcccctgcagcaaacgtttgcctgggcattgaggcatttccatacatcttctgaaaactaggcggaggtttccaaatctcaattcttgacttctgtgcacctgcaggcttaacagcacatagaagctgccaaggcttggggcttccactctgaagccacagcccgagctgtatgttggcccctttcagccatggctggagtggctgggacacaagacaccaagtccctaggctgcacacacatgtcaggggctgccctgacatggcctggagacattttccccatggtgttggggattaacattaggctccttgctacttatgcaaatttctgcagctggcttgaatttctccccagaaaatgggtttttcttttctattgcatagtcaggctgcaaatttccaaacttttatgctttgcttcccttatttataagggaatgcctttaaaagcacccaagtcacctgttgaacactttgctgcttagaaatttcttccgctagttaacctaaatcatctctctcaagttcaaagttccacaaatccctatggaaggggcaaaatgctgccagtctctttgctaaaacataacaagagtcacctttactccagttcccaacaagttcctcatcttcatctgaggccacctcagcctggactttgttgtccatattgctatcagcatttggggcaaagccattcaacaagtctgtaggaagttccaaactttcccacattttcctgttttcttctgagccctccaaactgttccagcctctgcctgttacccagttccaaagtcacttccacattttgggtatttcttcagcaggtcccaatctactggtaccaatttactgtattagtccgttttcacgctgctgataaagacatacccgagactgggaagaaaaagtggtttaattggacttaaagttccacatggctggggaggcctcagaatcatggtgggaggcaaaagacacttcttacattgtggcaagaaaaaatgaggaagaagcaaaagcagaaacccctgataaactgatcagatctcatgagacttattcactgtcacgagaatagcacgggaaagactggcccccatgattcaattacctccccctgggtctgtcccacaacacgtgggaattctgggagatacaattcaagttgagatttgtggggggacacaaccaaaccatatcagcatcctttcaagaatattagataattggagctgagtactcaggaacttgactgtagtagaatactgctagtttcttaattttaattcacatcacctgaaaagtaaaacaacaggctttgccaagtggatgcttttcagtaacagtgaagtggagtgaataccaaatgtttgccctggtggttcctatctcttcaggcaaacatggtcagtattctgtaaagttcccctggcctaaatgattacttgctctgggcaagtggatatttattaggctatttcaaagccacagcataagaatgtcagcctagccacagagtctgagattctgagttcagcctagccacagagtctaagattctgtatcctctgacattttggaaatgatacactactggcttaagtgatgactctttcagattttcagtattttatacaactactgccacatccttatactttattgcttttctgtcttcttcaacctgggagagaccctgaatttgagtgtgttctctaatcaatagtggtttagctttcttttctatttcactcgtttctagggttttttatttgcagtttaggaactattaggaatgtcaggactttatcagcaggggtaaaactaccacctggcctagcctaagtaggaagtgaaaagataattcaccaaacaatgattaatcagatagaagttctagtcaagagggatattgttgaagttacctcttttagcctagatacatggattcttttcaaatcaggaaagattagaaaaggaacccaaaaaaccctttaacagtgtgaatctttatagtatttgaaaatgagaagaagcagcagattgtaatttggtttattggatgtgatggacgttctgtaatagaaaacctgaaacgatgattgaatgggaaaaagagactacaaaatttgtcgtaggatgtatacagacttattttctttattacagtattataagaaaacatatgtatttgtaaaaatggtttcctgtgtcaagtatttgtgcagtcagagctgacttgtaaactattcttgtaatagctcattattttgaaagatttatatatgatgaattctggatatatgaccaataaaactgatgaagcaaaa

SEQ ID NO: 18718 - DNA, 821 bp, Homo sapiens
  source 1..821: mol_type = unassigned DNA
ggggcgaagccgaggaagagcgttttggggacgggggctggtgaggctcacgttggagggcttcgcgtctgcttcggagaccgtaaggagatgggggtctgactgtgttgtctaggctgatctcaaactcctggcctcaagtgatcctcctgcctcagcctcccaaagtgctgggattacagatattgatgaccatgagatccctgctcagaacccccttcctgtgtggcctgctctgggccttttgtgccccaggcgccagggctgaggagcctgcagccagcttctcccaacccggcagcatgggcctggataagaacacagtgcacgaccaagagcatatcatggagcatctagaaggtgtcatcaacaaaccagaggcggagatgtcgccacaagaattgcagctccattacttcaaaatgcatgattatgatggcaataatttgcttgatggcttagaactctccacagccatcactcatgtccataaggaggaagggagtgaacaggcaccactaatgagtgaagatgaactgattaacataatagatggtgttttgagagatgatgacaagaacaatgatggatacattgactatgctgaatttgcaaaatcactgcagtagatgttatttggccatctcctggttatatacaaatgtgacccgtgataatgtgattgaacactttagtaatgcaaaataactcatttccaactactgctgcagcattttggtaaaaacctgtagcgattcgttacactggggtgagaagagataagagaaatgaaagagaagagaaatgggacatctaatagt

SEQ ID NO: 18719 - DNA, 588 bp, Homo sapiens
  source 1..588: mol_type = unassigned DNA
acttccctgattcagcgatgagccaggtcagctcagcagagatcagtaagagatgggggtctgactgtgttgtctaggctgatctcaaactcctggcctcaagtgatcctcctgcctcagcctcccaaagtgctgggattacagatattgatgaccatgagatccctgctcagaacccccttcctgtgtggcctgctctgggccttttgtgccccaggcgccagggctgaggagcctgcagccagcttctcccaacccggcagcatgggcctggataagaacacagtgcacgaccaagagcatatcatggagcatctagaaggtgtcatcaacaaaccagaggcggagatgtcgccacaagaattgcagctccattacttcaaaatgcatgattatgatggcaataatttgcttgatggcttagaactctccacagccatcactcatgtccataaggaggaagggagtgaacaggcaccactaatgagtgaagatgaactgattaacataatagatggtgttttgagagatgatgacaagaacaatgatggatacattgactatgctgaatttgcaaaatcactgcag

SEQ ID NO: 18720 - DNA, 565 bp, Homo sapiens
  source 1..565: mol_type = unassigned DNA
agtaaggtaaatgagagccagaggagagagggtcctgactctcagagagggaggaaaagagaaaaatggaaaaggagaacaacctgtgatcgtatgttcaggtcaaatgagtgtgagaggctacagactgaggtcggatgagagagcaattggtcttggctggaagaatcctgaggtgacatttgaacctgtcctggaaggaagttggagatggacagatggaaccagtaggagcggaggctgtggtacaggaagaggctggcagagcaggaggggagcactgtgacagccaaggcactgggaggcgcactgctcctgatggtccagcactgccctcccaggactgaggctgcgccttgtgagggctgtctcaagatattgatgaccatgagatccctgctcagaacccccttcctgtgtggcctgctctgggccttttgtgccccaggcgccagggctgaggagcctgcagccagcttctcccaacccggcagcatgggcctggataagaacacagtgcacgaccaagagcatatcatggagcatctagaaggtgtcatcaaca

SEQ ID NO: 18721 - DNA, 4169 bp, Homo sapiens
  source 1..4169: mol_type = unassigned DNA
gctcttaagactagcacggtgggctggcaggcgcccgctgtcggccgaggactgtctgggcgcgcttcctggaggaggcggtgcgtttcgcgcgctcgctgccggcgagccagcctcttcccttactcaccggtgtccggaaaggtgaacgctgcgctcgggctgcctcgcctgttacctccgccgccgggcatgctcagcgtctgcagctgccggaccagctccggcatgcggtcccagtggccctcggcgcggcagcgctccagctcgctctccaccttcaggcatatcatggagcatctagaaggtgtcatcaacaaaccagaggcggagatgtcgccacaagaattgcagctccattacttcaaaatgcatgattatgatggcaataatttgcttgatggcttagaactctccacagccatcactcatgtccataaggaggaagggagtgaacaggcaccactaatgagtgaagatgaactgattaacataatagatggtgttttgagagatgatgacaagaacaatgatggatacattgactatgctgaatttgcaaaatcactgcagtagatgttatttggccatctcctggttatatacaaatgtgacccgtgataatgtgattgaacactttagtaatgcaaaataactcatttccaactactgctgcagcattttggtaaaaacctgtagcgattcgttacactggggtgagaagagataagagaaatgaaagagaagagaaatgggacatctaatagtccctaagtgctattaaataccttattggacaagggcttgcttcaagcatctgtattagtctgtattaatgctgctgataaagacgtacccgagactgggaagaaaaagaggtttacttggacttacagttccacatggctggggaggcctcagaatcatggcgggaggtgaaaggcacttcttacatggcagcaagagaaaatgaggaagaagcaaaagtggaaacccctgataagccatcagatcttgtgaaacttattcactatcacaagaatagcatgggaaagactggcccccatgattcaattacctccccttgggtctctcccacaacacgtgggaattctggtagatacaatttcaagttgagatttgggtggggacatagccaaaccatatcattctacccctggcccctccaaatctcatgtcctcactattcaaaaccaatcatgccttcctaacagtcccccaaagtcttaactcttttcagcattaacgcaaaaatccacagtccaaagtctcatctgagacaaggcaagtcccttccacctatgagcctgtaaaatcaaaagcaagctagttacttcctagataccaacaggggtacaggtattgattaaagacggctgttccaaatgggagaaattggccaaaataaaggggttacagggcccatgcaagtccgaaatccagcagggctgtcaaattttaaagttccagaataatctcctttgactccaggtctcacatccaggtcatactgatgcaagaagtgggttcccatggtcttgggcagctctgcccctgtggctttgtagggtacagcctccctcctggctgctttcacggctgttgttcagtgcctgcggcttttccaggtgcacggtgcaagctgttggtggatctaccattctggggtctggaggacggtggccctcttctcacagctccactaggcagtgccccagtagggactctgtgtgggggctcccacaccacatttcccttctgcactgccctagcagaggttctctcccctgccgctgagagggcctctcccctgcagcaaacgtttgcctgggcattgaggcatttccatacatcttctgaaaactaggcggaggtttccaaatctcaattcttgacttctgtgcacctgcaggcttaacagcacatagaagctgccaaggcttggggcttccactctgaagccacagcccgagctgtatgttggcccctttcagccatggctggagtggctgggacacaagacaccaagtccctaggctgcacacacatgtcaggggctgccctgacatggcctggagacattttccccatggtgttggggattaacattaggctccttgctacttatgcaaatttctgcagctggcttgaatttctccccagaaaatgggtttttcttttctattgcatagtcaggctgcaaatttccaaacttttatgctttgcttcccttatttataagggaatgcctttaaaagcacccaagtcacctgttgaacactttgctgcttagaaatttcttccgctagttaacctaaatcatctctctcaagttcaaagttccacaaatccctatggaaggggcaaaatgctgccagtctctttgctaaaacataacaagagtcacctttactccagttcccaacaagttcctcatcttcatctgaggccacctcagcctggactttgttgtccatattgctatcagcatttggggcaaagccattcaacaagtctgtaggaagttccaaactttcccacattttcctgttttcttctgagccctccaaactgttccagcctctgcctgttacccagttccaaagtcacttccacattttgggtatttcttcagcaggtcccaatctactggtaccaatttactgtattagtccgttttcacgctgctgataaagacatacccgagactgggaagaaaaagtggtttaattggacttaaagttccacatggctggggaggcctcagaatcatggtgggaggcaaaagacacttcttacattgtggcaagaaaaaatgaggaagaagcaaaagcagaaacccctgataaactgatcagatctcatgagacttattcactgtcacgagaatagcacgggaaagactggcccccatgattcaattacctccccctgggtctgtcccacaacacgtgggaattctgggagatacaattcaagttgagatttgtggggggacacaaccaaaccatatcagcatcctttcaagaatattagataattggagctgagtactcaggaacttgactgtagtagaatactgctagtttcttaattttaattcacatcacctgaaaagtaaaacaacaggctttgccaagtggatgcttttcagtaacagtgaagtggagtgaataccaaatgtttgccctggtggttcctatctcttcaggcaaacatggtcagtattctgtaaagttcccctggcctaaatgattacttgctctgggcaagtggatatttattaggctatttcaaagccacagcataagaatgtcagcctagccacagagtctgagattctgagttcagcctagccacagagtctaagattctgtatcctctgacattttggaaatgatacactactggcttaagtgatgactctttcagattttcagtattttatacaactactgccacatccttatactttattgcttttctgtcttcttcaacctgggagagaccctgaatttgagtgtgttctctaatcaatagtggtttagctttcttttctatttcactcgtttctagggttttttatttgcagtttaggaactattaggaatgtcaggactttatcagcaggggtaaaactaccacctggcctagcctaagtaggaagtgaaaagataattcaccaaacaatgattaatcagatagaagttctagtcaagagggatattgttgaagttacctcttttagcctagatacatggattcttttcaaatcaggaaagattagaaaaggaacccaaaaaaccctttaacagtgtgaatctttatagtatttgaaaatgagaagaagcagcagattgtaatttggtttattggatgtgatggacgttctgtaatagaaaacctgaaacgatgattgaatgggaaaaagagactacaaaatttgtcgtaggatgtatacagacttattttctttattacagtattataagaaaacatatgtatttgtaaaaatggtttcctgtgtcaagtatttgtgcagtcagagctgacttgtaaactattcttgtaatagctcattattttgaaagatttatatatgatgaattctggatatatgaccaataaaactgatgaagcaaaacctc

SEQ ID NO: 18722 - DNA, 7594 bp, Homo sapiens
  source 1..7594: mol_type = unassigned DNA
tgggaacgcgttgagacgttcctctttcccgcttctccacctttacgcctgaaagaagactcccaaagattgctttcttctgggacgctgcttggacgctaaccgcgttgattggaacagattttgtgtcttggctggctttgggtgaagaccggggagaaaaggttgcgctgcgattctcaagatctctggacctggattatcattgcaaatccattaaagaaggagaagcaagcggatttcagagaggttgttcttcagaaaaaaatggttatttctttgaactcatgcctgagctttatttgtttattgttatgccactggattgggacagcatcacctctgaatcttgaagaccctaatgtgtgtagccactgggaaagctactcagtgactgtgcaagagtcatacccacatccctttgatcaaatttactacacgagctgcactgacattctaaactggtttaaatgcacgcggcacagagtcagctatcggacagcctatcgacatggggagaagactatgtataggcgcaagtctcagtgttgtcctggattttatgaaagcggggaaatgtgtgtcccccactgtgctgataaatgtgtccatggtcgctgtattgctccaaacacctgtcagtgtgagcctggctggggagggaccaactgctccagtgcctgcgatggtgatcactggggtccccactgcaccagccggtgccagtgcaaaaatggggctctgtgcaaccccatcaccggggcttgccactgtgctgcgggcttccggggctggcgctgcgaggaccgctgtgagcagggcacctatggtaacgactgtcatcagagatgccagtgccagaatggagccacctgcgaccacgtcacgggggaatgccgctgcccaccaggatacaccggagccttctgtgaggatctttgtcctcctggtaaacatggtccacagtgtgagcagagatgcccttgtcaaaatggaggagtgtgtcatcacgtcactggagaatgctcttgcccttctggctggatgggcacagtgtgtggtcagccttgccccgagggtcgctttggaaagaactgttcccaagaatgccagtgccataatggagggacgtgtgatgctgccacaggccaatgtcattgcagtccaggatacacaggggaacggtgccaggatgagtgtcctgttgggacctatggcgttctctgtgctgagacctgccagtgtgtcaacggagggaagtgttaccacgtgagcggcgcatgcctctgtgaagcaggctttgctggcgagcgctgcgaagcacgcctgtgtcctgaggggctctacggcatcaaatgtgacaaacggtgtccctgccacctggaaaacactcatagctgtcaccccatgtctggagagtgtgcctgcaagccgggctggtcaggactctactgtaatgagacatgttctcctggattctacggggaagcttgccagcagatctgcagctgccaaaatggggcagactgtgacagtgtgactggaaagtgcacctgtgccccaggattcaaaggaattgactgctctaccccatgccctctgggaacctatgggataaactgttcctctcgctgtggctgtaaaaatgatgcagtctgctctcctgtggacgggtcttgtacttgcaaggcaggctggcacggggtggactgctccatcagatgtcccagtggcacatggggctttggctgtaacttaacatgccagtgcctcaacgggggagcctgcaacaccctggacgggacctgcacgtgtgcacctggatggcgcggggagaaatgcgaacttccctgccaggatggcacgtacgggctgaactgtgctgagcgctgcgactgcagccacgcagatggctgccaccctaccacgggccattgccgctgcctccccggatggtcaggtgtccactgtgacagcgtgtgtgctgagggacgctggggccccaactgctccctgccctgctactgtaaaaatggggcttcatgctcccctgatgatggcatctgcgagtgtgcaccaggcttccgaggcaccacttgtcagaggatctgctcccctggtttttatgggcatcgctgcagccagacatgcccacagtgcgttcacagcagcgggccctgccaccacatcaccggcctgtgtgactgcttgcctggcttcacaggcgccctctgcaatgaagtgtgtcccagtggcagatttgggaaaaactgtgcaggaatttgtacctgcaccaacaacggaacctgtaaccccattgacagatcttgtcagtgttaccccggttggattggcagtgactgctctcaaccatgtccacctgcccactggggcccaaactgcatccacacgtgcaactgccataatggagctttctgcagcgcctacgatggggaatgtaaatgcactcctggctggacagggctctactgcactcagagatgtcctctagggttttatggaaaagattgtgcactgatatgccaatgtcaaaacggagctgactgcgaccacatttctgggcagtgtacttgccgcactggattcatgggacggcactgtgagcagaagtgcccttcaggaacatatggctatggctgtcgccagatatgtgattgtctgaacaactccacctgcgaccacatcactgggacctgttactgcagccccggatggaagggagcgagatgtgatcaagctggtgttatcatagttggaaatctgaacagcttaagccgaaccagtactgctctccctgctgattcctaccagatcggggccattgcaggcatcatcattcttgtcctagttgttctcttcctactggcattgttcattatttatagacacaagcagaagggaaaggaatcaagcatgccagcagttacctacacccctgctatgagggtcgtcaatgcagattataccatttcaggaacccttcctcacagcaatggtggaaacgctaatagccactacttcaccaatcccagttaccacacgctcacccagtgtgccacatcccctcacgtcaacaacagggacaggatgactgtcacgaagtcaaaaaacaatcaactgtttgtgaatcttaaaaatgtgaaccctgggaagagaggccctgtgggggactgcactgggacattgccggctgactggaaacatggcggctacctcaacgagctcggtgcttttggacttgacagaagctatatgggaaaatccttaaaagacctgggaaagaattctgaatataattcaagtaactgctccctaagcagttctgagaacccatatgccactattaaagacccacctgtacttatcccgaaaagctcagagtgtggttatgtggagatgaaatcgccggcacgaagagattccccatatgcagagatcaataactcaacttcagccaacaggaatgtctatgaagttgaacctacagtgagtgttgtccaaggagtattcagcaataatgggcgtctctcccaggatccatatgacctcccaaagaacagtcacatcccttgtcattatgacctgctgccagtccgagacagttcatcctcccctaagcaagaggacagtggtggtagcagcagcaacagcagcagcagcagtgaatgacaccaaaggaccgcttggtagccactggaaccctttccagaactgctgtttggttcttctccatcctcaattttgccactttcatgtgaatgttagtcaattcggtgggcaatttttggacatgaaccagaaagctgaaagctgaggctgacacggactgtaggtgctttttgttcaggtggattcgaaggagttagagatgtgatttcccattgctgttagttttagaactatacccgtgaagcatgacttattgtaagatgttggctgaaagcatgaacttgcagaactccctcggagacgcaggttgcagtggacattgggattgttgcttgaaaaattaaaatttgaatattttctctctcatttgcatcatacagctctacctaggattgtacagtttaccataaaatttacttcatgaaagtgggaatcactgaacatgtagaagacaaggaacatattgttaactcctgattcttaactttattcaactggactcagaattgtagggataatatgaatgcaggaggaaacattctgtcaggcggtatgactggacagactttgaatatactctaaaagtggacagaaaatttacgaaaatcttagattttgtttagaatgagaaaatatacaattagaattattttagaaatagtaggaagtattgcagaagtcaatacacaaatgtgccaggcagaggtggttttctctgtttgactctcaaccaacttcagatctatgacattattctgatcactggctccatcatacatattcaccacttgagattcataacatatcaatagttatttcataaatatagaaatgaaataattttatttttgacagactggatggaatgagtgtgtaatgattgataaaggttgtaaattttaaatgcaagatgacgcttacgttctgtaaaccattagtaatacatgctgtaatatagaattagtggaacattttgattaatctttccctagaagtgactgaaatatttttgtgcatatttgagaaagggaactttccttttattaattgtcaatttagagaaactatgcttaagctggtcttttgcattgctaatgtgacatgtacccaacttttcattaatttgtatttccatttttaaattgcatattctatgttttgtagtgtttggattgttaatgaaaaaatattatatgttcgttattccttgtattattgccacttatcttttgcttgataaaaatgcgttgttcttttttcttttggagggacaagatgaaaatatataatttgaattgattaaaattggtcgttactaaaatagtatagtaaccacaagtgattggcttataaatgaagtagaaatgctttttaatattccaaaatagagttccttttgatctgttggtgctgagccttggttaaaccagggagaaggggagcagaaaggaaacgttgttactgatgagtaccacagactcatcttaaaaaaaactctcattatggtgatcatagaattgaccatccaaactgggacactcttgagagtaaatggagggcattattaataattatcttgtaatgaacttaaatctggactgttccaggcaaaccagacttatcttgcaatatgagaatgctgacacaatgcaggaaagccagtttcccttttgttgatctacttgaccaagcaaaggggctgaaaaactgaataaggaaacaactttataagagaaacagtggtcttcaatcttttaaagacatgaaatcctatatggcattctgtctcagtgagtcagttaacaaatacgtatgtgcaacccttctgctagtagtgcacataagtgattatccctgccaggtatcgagttggaatatccagttatttcatgtcacacatcggcacgtatgatggtggtttggtcagatggataatacagcagacacacttagaacactcactgcactggtggctgttcattttgaggaactccaaagtcaattcaaggaaataaggaatgacctggaacaggccttagaaacaattgatttattccaatagttaaccactggctggctcccaactctaggtgataggcatctaattgagacatgtgtgagtcaatagccatcggggtcctttttggtgagaagaaataagacattttctcccttttaaagatcatctcttcagagctgcatggtaaatttgaatttccccattgttctctagagctaggtcaaaaaaacaactgtttcttttcttattccactattaataaattgaaagcttgctgtacaaaggcaacagcaacttaaaaaagaaaatctggacaatagatgtggactccaaggggccactgccatcccttcctgtgtgctctttttgacaagtaaatcactccagttagctgatgtcctgaaatgacatttgtacctgaggcaattcttattagagcttactcaggacttttcaaacatcaggacacacatagcaatttggatgttgtaaaactacgtgttacatttggagaggtcttgttgagaaggcaaaattttctaaatattttgatatcaatttgggtaaagaaaggaatacttttgttagaatgagaattaaagagaaaacaaaagaatcttggcaaaattttccctctgaaattacaaactttaggaacttttccagatgtatcgaatttaatttgacattgatgtcactcttcataccaagtgaatctattctcatgaactttgaacccatgttaattttggaccctataactaatttcctttctgtatcccatggtggtcaaagcagtaaaggagtttagagatacttagcaaatgccattcatatagtattgttagccaaactattattccttccttagaagttgatgtatcagaaaatttataagttatttgtatttatatataagtacatcagaacttgcccacatgataactcatgtttgctttaataaggaaaatatgttatttgaggttaattatatgatagtgaggaacattttacaattatttacagtgtttgacattaattgctgtcctatgatacagtagtaatgttaacagagagtttaatatgtttagcattatctttatggaatttatattcaccaatttcaggaaaaccaaccatagaactttataataggacagttataacctgactgaaccaaatccatcagcataatgactgtgtgttctgagaaatgcaaacaactttatgaaagtgtggtcatcttgacccccaaagagccacagtagctgtcaattattgagatttttaaatggtaaatattgcaaaagttaaacaagggtaccacaatatcatttataattgatgtcaatattagtagtccactttatgcttaaaataaaatcataaaaaatcaagttttaaggttatattttttaaaataatgaattttctatctctaggcaacatgtctttattattcaagctgaatgtttaagagagattttggtcttaaaggcttcacatcatgaaagtgtacatgcatatgcaagtgtgaattacgtggtatggatgtttgcttgtttattaactaaagatgtacagcaaactgcccgtttagagtcctgttaatattgatgtcctaacactgggtctgcttatgctagttcagtatttggtctaggcttcattttgatatgactgaattgcaatctatatttttaaaaagaaaaatcaaaatacattagggtttacttggttgtggcaaacaaacaaaaaatgctttcagtgttgaaatatctctattttccaaagatgataaactttcatcgttcttagcctacattgtcatttatatcaccaaatgagtttatagattaatgcaataaactttctaataaaaaa

SEQ ID NO: 18723 - DNA, 2238 bp, Homo sapiens
  source 1..2238: mol_type = unassigned DNA
aaactgggcgactgggaacgcgttgagacgttcctctttcccgcttctccacctttacgcctgaaagaagactcccaaagattgctttcttctgggacgctgcttggacgctaaccgcgttgattggaacagattttgtgtcttggctggctttgggtgaagaccggggagaaaaggttgcgctgcgattctcaagatctctggacctggattatcattgcaaatccattaaagaaggagaagcaagcggatttcagagaggttgttcttcagaaaaaaatggttatttctttgaactcatgcctgagctttatttgtttattgttatgccactggattgggacagcatcacctctgaatcttgaagaccctaatgtgtgtagccactgggaaagctactcagtgactgtgcaagagtcatacccacatccctttgatcaaatttactacacgagctgcactgacattctaaactggtttaaatgcacgcggcacagagtcagctatcggacagcctatcgacatggggagaagactatgtataggcgcaagtctcagtgttgtcctggattttatgaaagcggggaaatgtgtgtcccccactgtgctgataaatgtgtccatggtcgctgtattgctccaaacacctgtcagtgtgagcctggctggggagggaccaactgctccagtgcctgcgatggtgatcactggggtccccactgcaccagccggtgccagtgcaaaaatggggctctgtgcaaccccatcaccggggcttgccactgtgctgcgggcttccggggctggcgctgcgaggaccgctgtgagcagggcacctatggtaacgactgtcatcagagatgccagtgccagaatggagccacctgcgaccacgtcacgggggaatgccgctgcccaccaggatacaccggagccttctgtgaggatctttgtcctcctggtaaacatggtccacagtgtgagcagagatgcccttgtcaaaatggaggagtgtgtcatcacgtcactggagaatgctcttgcccttctggctggatgggcacagtgtgtggtcagccttgccccgagggtcgctttggaaagaactgttcccaagaatgccagtgccataatggagggacgtgtgatgctgccacaggccaatgtcattgcagtccaggatacacaggggaacggtgccaggatgagtgtcctgttgggacctatggcgttctctgtgctgagacctgccagtgtgtcaacggagggaagtgttaccacgtgagcggcgcatgcctctgtgaagcaggctttgctggcgagcgctgcgaagcacgcctgtgtcctgaggggctctacggcatcaaatgtgacaaacggtgtccctgccacctggaaaacactcatagctgtcaccccatgtctggagagtgtgcctgcaagccgggctggtcaggactctactgtaatgagacatgttctcctggattctacggggaagcttgccagcagatctgcagctgccaaaatggggcagactgtgacagtgtgactggaaagtgcacctgtgccccaggattcaaaggaattgactgctctaccccatgccctctgggaacctatgggataaactgttcctctcgctgtggctgtaaaaatgatgcagtctgctctcctgtggacgggtcttgtacttgcaaggcaggctggcacggggtggactgctccatcagatgtcccagtggcacatggggctttggctgtaacttaacatgccagtgcctcaacgggggagcctgcaacaccctggacgggacctgcacgtgtgcacctggatggcgcggggagaaatgcgaacttccctgccaggatggcacgtacgggctgaactgtgctgagcgctgcgactgcagccacgcagatggctgccaccctaccacgggccattgccgctgcctccccggatggtcaggattgttttgactattctgggtccttgaatttccatgtgaatggtaacatcaatatgttaatttccacaaagaagcaaggtggaaatttaatggagattgaatctatagatcaatttggggaatactgtccacttaacaatatgaagtcttcagattcataaacatgggatgtcaccagcaacctcttcagtagtgtctctcagccccttggaaaatgttgagagcttctttggtttctaaaggagtaaactgagatgaactgtca

SEQ ID NO: 18724 - DNA, 7571 bp, Homo sapiens
  source 1..7571: mol_type = unassigned DNA
actttcccggtgcgcaaaactgggcgactgggaacgcgttgagacgttcctctttcccgcttctccacctttacgcctgaaagaagactcccaaagattgctttcttctgggacgctgcttggacgctaaccgcgttgattggaacagattttgtgtcttggctggctttgggtgaagaccggggagaaaaggttgcgctgcgattctcaagatctctggacctgggttgttcttcagaaaaaaatggttatttctttgaactcatgcctgagctttatttgtttattgttatgccactggattgggacagcatcacctctgaatcttgaagaccctaatgtgtgtagccactgggaaagctactcagtgactgtgcaagagtcatacccacatccctttgatcaaatttactacacgagctgcactgacattctaaactggtttaaatgcacgcggcacagagtcagctatcggacagcctatcgacatggggagaagactatgtataggcgcaagtctcagtgttgtcctggattttatgaaagcggggaaatgtgtgtcccccactgtgctgataaatgtgtccatggtcgctgtattgctccaaacacctgtcagtgtgagcctggctggggagggaccaactgctccagtgcctgcgatggtgatcactggggtccccactgcaccagccggtgccagtgcaaaaatggggctctgtgcaaccccatcaccggggcttgccactgtgctgcgggcttccggggctggcgctgcgaggaccgctgtgagcagggcacctatggtaacgactgtcatcagagatgccagtgccagaatggagccacctgcgaccacgtcacgggggaatgccgctgcccaccaggatacaccggagccttctgtgaggatctttgtcctcctggtaaacatggtccacagtgtgagcagagatgcccttgtcaaaatggaggagtgtgtcatcacgtcactggagaatgctcttgcccttctggctggatgggcacagtgtgtggtcagccttgccccgagggtcgctttggaaagaactgttcccaagaatgccagtgccataatggagggacgtgtgatgctgccacaggccaatgtcattgcagtccaggatacacaggggaacggtgccaggatgagtgtcctgttgggacctatggcgttctctgtgctgagacctgccagtgtgtcaacggagggaagtgttaccacgtgagcggcgcatgcctctgtgaagcaggctttgctggcgagcgctgcgaagcacgcctgtgtcctgaggggctctacggcatcaaatgtgacaaacggtgtccctgccacctggaaaacactcatagctgtcaccccatgtctggagagtgtgcctgcaagccgggctggtcaggactctactgtaatgagacatgttctcctggattctacggggaagcttgccagcagatctgcagctgccaaaatggggcagactgtgacagtgtgactggaaagtgcacctgtgccccaggattcaaaggaattgactgctctaccccatgccctctgggaacctatgggataaactgttcctctcgctgtggctgtaaaaatgatgcagtctgctctcctgtggacgggtcttgtacttgcaaggcaggctggcacggggtggactgctccatcagatgtcccagtggcacatggggctttggctgtaacttaacatgccagtgcctcaacgggggagcctgcaacaccctggacgggacctgcacgtgtgcacctggatggcgcggggagaaatgcgaacttccctgccaggatggcacgtacgggctgaactgtgctgagcgctgcgactgcagccacgcagatggctgccaccctaccacgggccattgccgctgcctccccggatggtcaggtgtccactgtgacagcgtgtgtgctgagggacgctggggccccaactgctccctgccctgctactgtaaaaatggggcttcatgctcccctgatgatggcatctgcgagtgtgcaccaggcttccgaggcaccacttgtcagaggatctgctcccctggtttttatgggcatcgctgcagccagacatgcccacagtgcgttcacagcagcgggccctgccaccacatcaccggcctgtgtgactgcttgcctggcttcacaggcgccctctgcaatgaagtgtgtcccagtggcagatttgggaaaaactgtgcaggaatttgtacctgcaccaacaacggaacctgtaaccccattgacagatcttgtcagtgttaccccggttggattggcagtgactgctctcaaccatgtccacctgcccactggggcccaaactgcatccacacgtgcaactgccataatggagctttctgcagcgcctacgatggggaatgtaaatgcactcctggctggacagggctctactgcactcagagatgtcctctagggttttatggaaaagattgtgcactgatatgccaatgtcaaaacggagctgactgcgaccacatttctgggcagtgtacttgccgcactggattcatgggacggcactgtgagcagaagtgcccttcaggaacatatggctatggctgtcgccagatatgtgattgtctgaacaactccacctgcgaccacatcactgggacctgttactgcagccccggatggaagggagcgagatgtgatcaagctggtgttatcatagttggaaatctgaacagcttaagccgaaccagtactgctctccctgctgattcctaccagatcggggccattgcaggcatcatcattcttgtcctagttgttctcttcctactggcattgttcattatttatagacacaagcagaagggaaaggaatcaagcatgccagcagttacctacacccctgctatgagggtcgtcaatgcagattataccatttcaggaacccttcctcacagcaatggtggaaacgctaatagccactacttcaccaatcccagttaccacacgctcacccagtgtgccacatcccctcacgtcaacaacagggacaggatgactgtcacgaagtcaaaaaacaatcaactgtttgtgaatcttaaaaatgtgaaccctgggaagagaggccctgtgggggactgcactgggacattgccggctgactggaaacatggcggctacctcaacgagctcggtgcttttggacttgacagaagctatatgggaaaatccttaaaagacctgggaaagaattctgaatataattcaagtaactgctccctaagcagttctgagaacccatatgccactattaaagacccacctgtacttatcccgaaaagctcagagtgtggttatgtggagatgaaatcgccggcacgaagagattccccatatgcagagatcaataactcaacttcagccaacaggaatgtctatgaagttgaacctacagtgagtgttgtccaaggagtattcagcaataatgggcgtctctcccaggatccatatgacctcccaaagaacagtcacatcccttgtcattatgacctgctgccagtccgagacagttcatcctcccctaagcaagaggacagtggtggtagcagcagcaacagcagcagcagcagtgaatgacaccaaaggaccgcttggtagccactggaaccctttccagaactgctgtttggttcttctccatcctcaattttgccactttcatgtgaatgttagtcaattcggtgggcaatttttggacatgaaccagaaagctgaaagctgaggctgacacggactgtaggtgctttttgttcaggtggattcgaaggagttagagatgtgatttcccattgctgttagttttagaactatacccgtgaagcatgacttattgtaagatgttggctgaaagcatgaacttgcagaactccctcggagacgcaggttgcagtggacattgggattgttgcttgaaaaattaaaatttgaatattttctctctcatttgcatcatacagctctacctaggattgtacagtttaccataaaatttacttcatgaaagtgggaatcactgaacatgtagaagacaaggaacatattgttaactcctgattcttaactttattcaactggactcagaattgtagggataatatgaatgcaggaggaaacattctgtcaggcggtatgactggacagactttgaatatactctaaaagtggacagaaaatttacgaaaatcttagattttgtttagaatgagaaaatatacaattagaattattttagaaatagtaggaagtattgcagaagtcaatacacaaatgtgccaggcagaggtggttttctctgtttgactctcaaccaacttcagatctatgacattattctgatcactggctccatcatacatattcaccacttgagattcataacatatcaatagttatttcataaatatagaaatgaaataattttatttttgacagactggatggaatgagtgtgtaatgattgataaaggttgtaaattttaaatgcaagatgacgcttacgttctgtaaaccattagtaatacatgctgtaatatagaattagtggaacattttgattaatctttccctagaagtgactgaaatatttttgtgcatatttgagaaagggaactttccttttattaattgtcaatttagagaaactatgcttaagctggtcttttgcattgctaatgtgacatgtacccaacttttcattaatttgtatttccatttttaaattgcatattctatgttttgtagtgtttggattgttaatgaaaaaatattatatgttcgttattccttgtattattgccacttatcttttgcttgataaaaatgcgttgttcttttttcttttggagggacaagatgaaaatatataatttgaattgattaaaattggtcgttactaaaatagtatagtaaccacaagtgattggcttataaatgaagtagaaatgctttttaatattccaaaatagagttccttttgatctgttggtgctgagccttggttaaaccagggagaaggggagcagaaaggaaacgttgttactgatgagtaccacagactcatcttaaaaaaaactctcattatggtgatcatagaattgaccatccaaactgggacactcttgagagtaaatggagggcattattaataattatcttgtaatgaacttaaatctggactgttccaggcaaaccagacttatcttgcaatatgagaatgctgacacaatgcaggaaagccagtttcccttttgttgatctacttgaccaagcaaaggggctgaaaaactgaataaggaaacaactttataagagaaacagtggtcttcaatcttttaaagacatgaaatcctatatggcattctgtctcagtgagtcagttaacaaatacgtatgtgcaacccttctgctagtagtgcacataagtgattatccctgccaggtatcgagttggaatatccagttatttcatgtcacacatcggcacgtatgatggtggtttggtcagatggataatacagcagacacacttagaacactcactgcactggtggctgttcattttgaggaactccaaagtcaattcaaggaaataaggaatgacctggaacaggccttagaaacaattgatttattccaatagttaaccactggctggctcccaactctaggtgataggcatctaattgagacatgtgtgagtcaatagccatcggggtcctttttggtgagaagaaataagacattttctcccttttaaagatcatctcttcagagctgcatggtaaatttgaatttccccattgttctctagagctaggtcaaaaaaacaactgtttcttttcttattccactattaataaattgaaagcttgctgtacaaaggcaacagcaacttaaaaaagaaaatctggacaatagatgtggactccaaggggccactgccatcccttcctgtgtgctctttttgacaagtaaatcactccagttagctgatgtcctgaaatgacatttgtacctgaggcaattcttattagagcttactcaggacttttcaaacatcaggacacacatagcaatttggatgttgtaaaactacgtgttacatttggagaggtcttgttgagaaggcaaaattttctaaatattttgatatcaatttgggtaaagaaaggaatacttttgttagaatgagaattaaagagaaaacaaaagaatcttggcaaaattttccctctgaaattacaaactttaggaacttttccagatgtatcgaatttaatttgacattgatgtcactcttcataccaagtgaatctattctcatgaactttgaacccatgttaattttggaccctataactaatttcctttctgtatcccatggtggtcaaagcagtaaaggagtttagagatacttagcaaatgccattcatatagtattgttagccaaactattattccttccttagaagttgatgtatcagaaaatttataagttatttgtatttatatataagtacatcagaacttgcccacatgataactcatgtttgctttaataaggaaaatatgttatttgaggttaattatatgatagtgaggaacattttacaattatttacagtgtttgacattaattgctgtcctatgatacagtagtaatgttaacagagagtttaatatgtttagcattatctttatggaatttatattcaccaatttcaggaaaaccaaccatagaactttataataggacagttataacctgactgaaccaaatccatcagcataatgactgtgtgttctgagaaatgcaaacaactttatgaaagtgtggtcatcttgacccccaaagagccacagtagctgtcaattattgagatttttaaatggtaaatattgcaaaagttaaacaagggtaccacaatatcatttataattgatgtcaatattagtagtccactttatgcttaaaataaaatcataaaaaatcaagttttaaggttatattttttaaaataatgaattttctatctctaggcaacatgtctttattattcaagctgaatgtttaagagagattttggtcttaaaggcttcacatcatgaaagtgtacatgcatatgcaagtgtgaattacgtggtatggatgtttgcttgtttattaactaaagatgtacagcaaactgcccgtttagagtcctgttaatattgatgtcctaacactgggtctgcttatgctagttcagtatttggtctaggcttcattttgatatgactgaattgcaatctatatttttaaaaagaaaaatcaaaatacattagggtttacttggttgtggcaaacaaacaaaaaatgctttcagtgttgaaatatctctattttccaaagatgataaactttcatcgttcttagcctacattgtcatttatatcaccaaatgagtttatagattaatgcaataaactttctaataaaaaa

SEQ ID NO: 18725 - DNA, 5707 bp, Homo sapiens
  source 1..5707: mol_type = unassigned DNA
gcccgctgcccgccgcccggctcccggctgctcgcggccccctgctcctgcctggcgctctggccaggctcgggctccggaggacaggaccgcgcgactggccggccgatccctgggccggccgcgggagcagctatgctgtgactgtccaggaatcgtatgcacaccccttcgatcagatctattacacacgatgcacagacatcctcaactggttcaagtgcaccaggcaccgccctgtgtacggaggagtgtgtgcacggccgctgcgtttccccggacacctgccactgcgagcctggctggggagggcccgactgctccagcggctgcgacagcgaccactgggggccccactgcagcaaccggtgccagtgccagaacggcgccctgtgtaaccccatcacaggcgcctgcgtgtgcgccgccggcttccgtggatggcgctgcgaggagctctgcgcacctggcacccacggcaagggatgccagctgccgtgccagtgccgacacggtgccagctgcgacccccgcgccggcgagtgcctctgcgcacctggctacaccggcgtctactgcgaggagctgtgccctcctgggagccatggagctcactgtgagctgcgctgcccctgtcagaatgggggcacctgccaccacatcactggcgagtgtgcctgccccccaggctggacgggagcagtgtgtgcccagccctgcccaccagggacatttggccagaactgcagccaggattgtccttgccaccatggagggcagtgtgaccacgtgactggacagtgccactgtacagctggatacatgggggacaggtgccaagaggagtgccccttcgggtccttcggcttccagtgctcacagcactgtgactgccacaatggggggcagtgttcacccaccacgggtgcctgcgagtgtgagcctggctacaagggcccacgctgccaggagcgactgtgcccggagggcctgcatggcccaggctgcaccctgccctgcccctgtgacgctgacaacaccatcagctgccacccagtaactggagcttgtacctgccagccaggctggtctggtcaccactgcaatgaatcctgccctgttggctactatggcgatggctgccagctgccttgcacctgtcagaatggcgccgactgccacagcatcactgggggctgcacttgtgctccgggcttcatgggagaggtctgtgccgtttcctgtgcagcagggacctatggccccaactgctcgtccatctgtagctgtaacaatggtggcacctgctccccagtagatggctcctgtacctgcaaggaagggtggcagggcctggactgcaccctgccatgtcccagtgggacgtggggcctgaactgcaacgagagctgcacctgtgccaatggggcagcctgcagccccatagacggctcctgctcctgcactcctggctggctgggagacacctgtgagctgccttgcccggatggcacatttgggctgaactgcagtgaacactgtgactgcagccatgctgatggatgtgaccccgtcacaggccactgctgctgcctggccggatggacaggcatccgctgtgacagcacgtgtccacctggccgctggggccccaactgctctgtctcctgcagctgtgagaatggaggctcctgctccccagaggatgggagctgcgagtgtgcccctggcttccgaggacccttatgccagagaatctgcccccctgggttctatggccacggctgcgcccagccatgccccctctgcgtgcacagcagcaggccctgccaccacatcagcggcatctgtgagtgcctcccaggattctctggagctctctgcaaccaagtgtgtgctggaggatactttgggcaggactgtgcccagctctgctcctgtgccaacaacgggacctgcagccctatcgatggctcctgccagtgctttcctggatggattggcaaggactgctcacaggcttgcccacccgggttctggggccccgcctgcttccacgcatgcagctgccacaacggggcgagctgcagcgccgaggacggggcctgccactgcacccctggctggactggactcttctgcacacagcgctgcccagcagcattttttgggaaggactgtgggcgcgtatgccagtgtcagaatggcgccagctgtgaccacatcagtggcaagtgcacctgccgcacaggcttcaccgggcaacactgtgagcagagatgtgccccaggaacctttggctatgggtgtcagcagctatgtgagtgcatgaacaactccacctgtgaccatgtcaccggcacctgttactgcagccctggcttcaaaggaatcaggtgtgaccaagctgccctcatgatggaggagctgaatccctacaccaagatcagcccagcactgggtgcagagcggcactcggtgggtgctgtcacaggcatcatgctcctgttattcctcattgtggtgctgctgggcctatttgcctggcatcggcggcggcagaaagagaagggccgagacctggctccccgtgtctcctacacacctgccatgaggatgaccagcaccgactactccctctcaggtgcttgtggaatggatagacgtcagaacacatacattatggacaaaggcttcaaagattacatgaaagaatccgtgtgcagttctagtacttgttccttgaatagcagtgaaaacccttacgccacaattaaggacccacccatcctcacctgcaagcttccagaaagcagctatgtagaaatgaagtcgcctgtgcacatggggtctccgtacacagatgtgccatccttgtcgacatctaataaaaatatatatgaagttgagcccacagtcagtgtggtccaagaaggttgcggtcataactccagctatatccagaatgcatacgacctacctaggaacagccatattcctggtcattatgacctcctcccagtaagacagagccctgccaatgggccgtcccaggacaagcaatcttaagagggataagcttctctcttgcagtgtgctctactgaatattctgactctgaaagaagacagtcccttgacttgaagtaatggtacagactggctccagctgcatgttagttattacgttcacctggaactaaagaagagcgtccaggtgggactgggataattgttcaaggaattgtgttctcaaaggcaaatcctatcacccactcagccccaaatgccctggattatatgatttttaaaacattttaagatacagctactcatcaacatcagctaaatatagctgatatatatatatatatttatctgaaacgtgatattttaaaaacatgtaggtttaacaaaccttcctaggacaaaaaggagactggggagggaagaggattactttaaagcacctgaaacgtatatgtacttttggttgctgttaccatcaacatctgttttattaccgaagacaattagtacacagacatgaactgttcttaaacagaacagtcttaaaatgtctgtacatatctgtctggtccatcaaattacaacagccaagattacagaatctatatagtctaatgctgacaacttctattttaaaaaacaagactttactttcttctgccccctaagtgataggtttaaacacacagagacacacacacacgtttccaaagtgcagcagtgtctctttcagtctacaataagattcctagggcagctttatcaaattttgccaattcaaagttcaaggacattacaagttagtcctggctttgtcatatctacttagtccatccgacacctgaatcattccatgtaaaacagagctctaagatgatcctttaagcaagcagtcatagactggtcgggattaagtaaaagacggctagttggcctcctcattttatttggtcagcatcccttgactcaagagtacttgctttcaagttcttcataaatcttgagattgacgtagtatgaaacctaaaagtatacaggaaattggacaaatgtggatacagcaagtttacactgcttaaagtacattatgctttttaatggaactaaatgatcaaaaaaagaatggactgtaaccagttgctgtaacgtgatgtaaaaacgttactgtaaacagcatgaggatatgaagtccttccaccttctatcttaaaactactacttactgagctagcccaatatgcattacaatgagctaatgctccagatcccagtattcagatgtgtctataccttccactatgaacacagataaactgaggctcagataagtccaaatgaaatgaaatcaactcccaagccctaaagagaaccttctcacaagaattaaaaacaaaaagggcaaacctaggaagctaacggctactcctgtaccactctattcactggtacagtccagccagtaaaaaacacttccaaaaagatacacagaagaggaactaaatgactgcgaagctggaatactgctacaggaagtatgagagttctgaaacccttgatagaaactggaagcctgccatggaacacaatactttgggcaataatcagaaaaagcaaaaaaataaataaatgagtacatctccccttcccacatcactcaaggcataagcagattttactgttagaggaaaatatgtaatacttacatgaatgttgcatgtgtgcatgggagcaactgagtagcaatagtaaatttactttccaaaaaagccttattaaaatataaatattagaaaattactttggagacccaagtaaatatttctcatacatatgtagaaagaaatataggtaagcagcttacctcagtatttcagggcagcaagtgtttgtgaagcaaggatgagcagcatgaagatgtcagatcagcaaggagaaacttcaactcaatcccaggttttctcttcttcccttatcctgcatgtacaataactgctgcctggcaaactgcaaacaagcagcatcactcaagtttgaagtttcgccgcttttgtcaactatcctctgggcaaaggtattcagcaagaggtggaatggctagacactgaatcaagagatttcagtgttactctggtcaagttagtcgccctctctgggctcccttttttcctatgcataaaaaggggagaagcagagagtgggaagacagctctactaacccttcagctctagcagtccatgactttttaaggaaatgtaatacaagtcaaaccaggcaatacagaggagaagggaaaggcagagggtgtgattatggtgacaatagctgccttcccctatcgaacagttatcagtaaaagacatttcaatcttacaaagcaactgttagaaacttctgtctaacaccatcacaaataggttcatggtcagcctaaacatgtatactgtgcattttatgggtgactttgaaagatctgttcaattatttttcagaaactaaattttcaaaaaattaatatgtgtacaattaaaatgaatgaaagaaaaaccattattgtacagaggtattaatgagactatgaaacggcaatacttttttaaatcacagatttgtaatatatgttcactgtgcagagggattgtaccttgtacaaaataaaacaaatttctcaaactaattt

SEQ ID NO: 18726 - DNA, 6144 bp, Homo sapiens
  source 1..6144: mol_type = unassigned DNA
gcccgctgcccgccgcccggctcccggctgctcgcggccccctgctcctgcctggcgctctggccaggctcgggctccggaggacaggaccgcgcgactggccggccgatccctgggccggccgcgggagcagggcccgggatggtgctctccctgacggggctcattgccttctccttcctgcaagccacccttgccctgaaccccgaggaccccaacgtgtgcagccactgggagagctatgctgtgactgtccaggaatcgtatgcacaccccttcgatcagatctattacacacgatgcacagacatcctcaactggttcaagtgcaccaggcaccggatcagttataagacggcgtatcggagaggcctccggaccatgtaccggcggaggtcccagtgctgccctggctactatgagagcggagacttctgcatacccctgtgtacggaggagtgtgtgcacggccgctgcgtttccccggacacctgccactgcgagcctggctggggagggcccgactgctccagcggctgcgacagcgaccactgggggccccactgcagcaaccggtgccagtgccagaacggcgccctgtgtaaccccatcacaggcgcctgcgtgtgcgccgccggcttccgtggatggcgctgcgaggagctctgcgcacctggcacccacggcaagggatgccagctgccgtgccagtgccgacacggtgccagctgcgacccccgcgccggcgagtgcctctgcgcacctggctacaccggcgtctactgcgaggagctgtgccctcctgggagccatggagctcactgtgagctgcgctgcccctgtcagaatgggggcacctgccaccacatcactggcgagtgtgcctgccccccaggctggacgggagcagtgtgtgcccagccctgcccaccagggacatttggccagaactgcagccaggattgtccttgccaccatggagggcagtgtgaccacgtgactggacagtgccactgtacagctggatacatgggggacaggtgccaagaggagtgccccttcgggtccttcggcttccagtgctcacagcactgtgactgccacaatggggggcagtgttcacccaccacgggtgcctgcgagtgtgagcctggctacaagggcccacgctgccaggagcgactgtgcccggagggcctgcatggcccaggctgcaccctgccctgcccctgtgacgctgacaacaccatcagctgccacccagtaactggagcttgtacctgccagccaggctggtctggtcaccactgcaatgaatcctgccctgttggctactatggcgatggctgccagctgccttgcacctgtcagaatggcgccgactgccacagcatcactgggggctgcacttgtgctccgggcttcatgggagaggtctgtgccgtttcctgtgcagcagggacctatggccccaactgctcgtccatctgtagctgtaacaatggtggcacctgctccccagtagatggctcctgtacctgcaaggaagggtggcagggcctggactgcaccctgccatgtcccagtgggacgtggggcctgaactgcaacgagagctgcacctgtgccaatggggcagcctgcagccccatagacggctcctgctcctgcactcctggctggctgggagacacctgtgagctgccttgcccggatggcacatttgggctgaactgcagtgaacactgtgactgcagccatgctgatggatgtgaccccgtcacaggccactgctgctgcctggccggatggacaggcatccgctgtgacagcacgtgtccacctggccgctggggccccaactgctctgtctcctgcagctgtgagaatggaggctcctgctccccagaggatgggagctgcgagtgtgcccctggcttccgaggacccttatgccagagaatctgcccccctgggttctatggccacggctgcgcccagccatgccccctctgcgtgcacagcagcaggccctgccaccacatcagcggcatctgtgagtgcctcccaggattctctggagctctctgcaaccaagtgtgtgctggaggatactttgggcaggactgtgcccagctctgctcctgtgccaacaacgggacctgcagccctatcgatggctcctgccagtgctttcctggatggattggcaaggactgctcacaggcttgcccacccgggttctggggccccgcctgcttccacgcatgcagctgccacaacggggcgagctgcagcgccgaggacggggcctgccactgcacccctggctggactggactcttctgcacacagcgtaagccccacctcctggcctcccagccacttagaataccatgctgcggcctactggccactgtgggcattgtccagaccagcagggagggaggaatgcaggcagccccaggactggtggtacctgactcctgccccacgagaactgaggagctctgcaggggcagctccagacctgactggattcaggggattgacaagcccaaagtcctggaaggtcagggctgcaaggctgcccagcagcattttttgggaaggactgtgggcgcgtatgccagtgtcagaatggcgccagctgtgaccacatcagtggcaagtgcacctgccgcacaggcttcaccgggcaacactgtgagcagagatgtgccccaggaacctttggctatgggtgtcagcagctatgtgagtgcatgaacaactccacctgtgaccatgtcaccggcacctgttactgcagccctggcttcaaaggaatcaggtgtgaccaagctgccctcatgatggaggagctgaatccctacaccaagatcagcccagcactgggtgcagagcggcactcggtgggtgctgtcacaggcatcatgctcctgttattcctcattgtggtgctgctgggcctatttgcctggcatcggcggcggcagaaagagaagggccgagacctggctccccgtgtctcctacacacctgccatgaggatgaccagcaccgactactccctctcaggtgcttgtggaatggatagacgtcagaacacatacattatggacaaaggcttcaaagattacatgaaagaatccgtgtgcagttctagtacttgttccttgaatagcagtgaaaacccttacgccacaattaaggacccacccatcctcacctgcaagcttccagaaagcagctatgtagaaatgaagtcgcctgtgcacatggggtctccgtacacagatgtgccatccttgtcgacatctaataaaaatatatatgaagttgagcccacagtcagtgtggtccaagaaggttgcggtcataactccagctatatccagaatgcatacgacctacctaggaacagccatattcctggtcattatgacctcctcccagtaagacagagccctgccaatgggccgtcccaggacaagcaatcttaagagggataagcttctctcttgcagtgtgctctactgaatattctgactctgaaagaagacagtcccttgacttgaagtaatggtacagactggctccagctgcatgttagttattacgttcacctggaactaaagaagagcgtccaggtgggactgggataattgttcaaggaattgtgttctcaaaggcaaatcctatcacccactcagccccaaatgccctggattatatgatttttaaaacattttaagatacagctactcatcaacatcagctaaatatagctgatatatatatatatatttatctgaaacgtgatattttaaaaacatgtaggtttaacaaaccttcctaggacaaaaaggagactggggagggaagaggattactttaaagcacctgaaacgtatatgtacttttggttgctgttaccatcaacatctgttttattaccgaagacaattagtacacagacatgaactgttcttaaacagaacagtcttaaaatgtctgtacatatctgtctggtccatcaaattacaacagccaagattacagaatctatatagtctaatgctgacaacttctattttaaaaaacaagactttactttcttctgccccctaagtgataggtttaaacacacagagacacacacacacgtttccaaagtgcagcagtgtctctttcagtctacaataagattcctagggcagctttatcaaattttgccaattcaaagttcaaggacattacaagttagtcctggctttgtcatatctacttagtccatccgacacctgaatcattccatgtaaaacagagctctaagatgatcctttaagcaagcagtcatagactggtcgggattaagtaaaagacggctagttggcctcctcattttatttggtcagcatcccttgactcaagagtacttgctttcaagttcttcataaatcttgagattgacgtagtatgaaacctaaaagtatacaggaaattggacaaatgtggatacagcaagtttacactgcttaaagtacattatgctttttaatggaactaaatgatcaaaaaaagaatggactgtaaccagttgctgtaacgtgatgtaaaaacgttactgtaaacagcatgaggatatgaagtccttccaccttctatcttaaaactactacttactgagctagcccaatatgcattacaatgagctaatgctccagatcccagtattcagatgtgtctataccttccactatgaacacagataaactgaggctcagataagtccaaatgaaatgaaatcaactcccaagccctaaagagaaccttctcacaagaattaaaaacaaaaagggcaaacctaggaagctaacggctactcctgtaccactctattcactggtacagtccagccagtaaaaaacacttccaaaaagatacacagaagaggaactaaatgactgcgaagctggaatactgctacaggaagtatgagagttctgaaacccttgatagaaactggaagcctgccatggaacacaatactttgggcaataatcagaaaaagcaaaaaaataaataaatgagtacatctccccttcccacatcactcaaggcataagcagattttactgttagaggaaaatatgtaatacttacatgaatgttgcatgtgtgcatgggagcaactgagtagcaatagtaaatttactttccaaaaaagccttattaaaatataaatattagaaaattactttggagacccaagtaaatatttctcatacatatgtagaaagaaatataggtaagcagcttacctcagtatttcagggcagcaagtgtttgtgaagcaaggatgagcagcatgaagatgtcagatcagcaaggagaaacttcaactcaatcccaggttttctcttcttcccttatcctgcatgtacaataactgctgcctggcaaactgcaaacaagcagcatcactcaagtttgaagtttcgccgcttttgtcaactatcctctgggcaaaggtattcagcaagaggtggaatggctagacactgaatcaagagatttcagtgttactctggtcaagttagtcgccctctctgggctcccttttttcctatgcataaaaaggggagaagcagagagtgggaagacagctctactaacccttcagctctagcagtccatgactttttaaggaaatgtaatacaagtcaaaccaggcaatacagaggagaagggaaaggcagagggtgtgattatggtgacaatagctgccttcccctatcgaacagttatcagtaaaagacatttcaatcttacaaagcaactgttagaaacttctgtctaacaccatcacaaataggttcatggtcagcctaaacatgtatactgtgcattttatgggtgactttgaaagatctgttcaattatttttcagaaactaaattttcaaaaaattaatatgtgtacaattaaaatgaatgaaagaaaaaccattattgtacagaggtattaatgagactatgaaacggcaatacttttttaaatcacagatttgtaatatatgttcactgtgcagagggattgtaccttgtacaaaataaaacaaatttctcaaactaattt

SEQ ID NO: 18727 - DNA, 2956 bp, Homo sapiens
  source 1..2956: mol_type = unassigned DNA
aggacaggaccgcgcgactggccggccgatccctgggccggccgcgggagcagggcccgggatggtgctctccctgacggggctcattgccttctccttcctgcaagccacccttgccctgaaccccgaggaccccaacgtgtgcagccactgggagagctatgctgtgactgtccaggaatcgtatgcacaccccttcgatcagatctattacacacgatgcacagacatcctcaactggttcaagtgcaccaggcaccggatcagttataagacggcgtatcggagaggcctccggaccatgtaccggcggaggtcccagtgctgccctggctactatgagagcggagacttctgcatacccctgtgtacggaggagtgtgtgcacggccgctgcgtttccccggacacctgccactgcgagcctggctggggagggcccgactgctccagcggctgcgacagcgaccactgggggccccactgcagcaaccggtgccagtgccagaacggcgccctgtgtaaccccatcacaggcgcctgcgtgtgcgccgccggcttccgtggatggcgctgcgaggagctctgcgcacctggcacccacggcaagggatgccagctgccgtgccagtgccgacacggtgccagctgcgacccccgcgccggcgagtgcctctgcgcacctggctacaccggcgtctactgcgaggagctgtgccctcctgggagccatggagctcactgtgagctgcgctgcccctgtcagaatgggggcacctgccaccacatcactggcgagtgtgcctgccccccaggctggacgggagcagtgtgtgcccagccctgcccaccagggacatttggccagaactgcagccaggattgtccttgccaccatggagggcagtgtgaccacgtgactggacagtgccactgtacagctggatacatgggggacaggtgccaagaggagtgccccttcgggtccttcggcttccagtgctcacagcactgtgactgccacaatggggggcagtgttcacccaccacgggtgcctgcgagtgtgagcctggctacaagggcccacgctgccaggagcgactgtgcccggagggcctgcatggcccaggctgcaccctgccctgcccctgtgacgctgacaacaccatcagctgccacccagtaactggagcttgtacctgccagccaggctggtctggtcaccactgcaatgaatcctgccctgttggctactatggcgatggctgccagctgccttgcacctgtcagaatggcgccgactgccacagcatcactgggggctgcacttgtgctccgggcttcatgggagaggtctgtgccgtttcctgtgcagcagggacctatggccccaactgctcgtccatctgtagctgtaacaatggtggcacctgctccccagtagatggctcctgtacctgcaaggaagggtggcagggcctggactgcaccctgccatgtcccagtgggacgtggggcctgaactgcaacgagagctgcacctgtgccaatggggcagcctgcagccccatagacggctcctgctcctgcactcctggctggctgggagacacctgtgagctgccttgcccggatggcacatttgggctgaactgcagtgaacactgtgactgcagccatgctgatggatgtgaccccgtcacaggccactgctgctgcctggccggatggacaggcatccgctgtgacagcacgtgtccacctggccgctggggccccaactgctctgtctcctgcagctgtgagaatggaggctcctgctccccagaggatgggagctgcgagtgtgcccctggcttccgaggacccttatgccagagaatctgcccccctgggttctatggccacggctgcgcccagccatgccccctctgcgtgcacagcagcaggccctgccaccacatcagcggcatctgtgagtgcctcccaggattctctggagctctctgcaaccaagtgtgtgctggaggatactttgggcaggactgtgcccagctctgctcctgtgccaacaacgggacctgcagccctatcgatggctcctgccagtgctttcctggatggattggcaaggactgctcacaggcttgcccacccgggttctggggccccgcctgcttccacgcatgcagctgccacaacggggcgagctgcagcgccgaggacggggcctgccactgcacccctggctggactggactcttctgcacacagcgctgcccagcagcattttttgggaaggactgtgggcgcgtatgccagtgtcagaatggcgccagctgtgaccacatcagtggcaagtgcacctgccgcacaggcttcaccgggcaacactgtgagcagagatgtgccccaggaacctttggctatgggtgtcagcagctatgtgagtgcatgaacaactccacctgtgaccatgtcaccggcacctgttactgcagccctggcttcaaaggaatcaggtgtgaccaagctgccctcatgatggaggagctgaatccctacaccaagatcagcccagcactgggtgcagagcggcactcggtgggtgctgtcacaggcatcatgctcctgttattcctcattgtggtgctgctgggcctatttgcctggcatcggcggcggcagaaagagaagggccgagacctggctccccgtgtctcctacacacctgccatgaggatgaccagcaccgactactccctctcagcatcaaccacaccatggtggcctgtcatggaacacctagctcgccctttctctcaacggcctaggacccagctcagtaacaagtcccttgacagagacacagcaggctggaccccctacagctatgtgaacgtgttagatcagtgccctggaggccaggtacccgcccgaggacttctacattga

SEQ ID NO: 18728 - DNA, 5813 bp, Homo sapiens
  source 1..5813: mol_type = unassigned DNA
gcccgctgcccgccgcccggctcccggctgctcgcggccccctgctcctgcctggcgctctggccaggctcgggctccggaggacaggaccgcgcgactggccggccgatccctgggccggccgcgggagcagggcccgggatggtgctctccctgacggggctcattgccttctccttcctgcaagccacccttgccctgaaccccgaggaccccaacgtgtgcagccactgggagagctatgctgtgactgtccaggaatcgtatgcacaccccttcgatcagatctattacacacgatgcacagacatcctcaactggttcaagtgcaccaggcaccgccctgtgtacggaggagtgtgtgcacggccgctgcgtttccccggacacctgccactgcgagcctggctggggagggcccgactgctccagcggctgcgacagcgaccactgggggccccactgcagcaaccggtgccagtgccagaacggcgccctgtgtaaccccatcacaggcgcctgcgtgtgcgccgccggcttccgtggatggcgctgcgaggagctctgcgcacctggcacccacggcaagggatgccagctgccgtgccagtgccgacacggtgccagctgcgacccccgcgccggcgagtgcctctgcgcacctggctacaccggcgtctactgcgaggagctgtgccctcctgggagccatggagctcactgtgagctgcgctgcccctgtcagaatgggggcacctgccaccacatcactggcgagtgtgcctgccccccaggctggacgggagcagtgtgtgcccagccctgcccaccagggacatttggccagaactgcagccaggattgtccttgccaccatggagggcagtgtgaccacgtgactggacagtgccactgtacagctggatacatgggggacaggtgccaagaggagtgccccttcgggtccttcggcttccagtgctcacagcactgtgactgccacaatggggggcagtgttcacccaccacgggtgcctgcgagtgtgagcctggctacaagggcccacgctgccaggagcgactgtgcccggagggcctgcatggcccaggctgcaccctgccctgcccctgtgacgctgacaacaccatcagctgccacccagtaactggagcttgtacctgccagccaggctggtctggtcaccactgcaatgaatcctgccctgttggctactatggcgatggctgccagctgccttgcacctgtcagaatggcgccgactgccacagcatcactgggggctgcacttgtgctccgggcttcatgggagaggtctgtgccgtttcctgtgcagcagggacctatggccccaactgctcgtccatctgtagctgtaacaatggtggcacctgctccccagtagatggctcctgtacctgcaaggaagggtggcagggcctggactgcaccctgccatgtcccagtgggacgtggggcctgaactgcaacgagagctgcacctgtgccaatggggcagcctgcagccccatagacggctcctgctcctgcactcctggctggctgggagacacctgtgagctgccttgcccggatggcacatttgggctgaactgcagtgaacactgtgactgcagccatgctgatggatgtgaccccgtcacaggccactgctgctgcctggccggatggacaggcatccgctgtgacagcacgtgtccacctggccgctggggccccaactgctctgtctcctgcagctgtgagaatggaggctcctgctccccagaggatgggagctgcgagtgtgcccctggcttccgaggacccttatgccagagaatctgcccccctgggttctatggccacggctgcgcccagccatgccccctctgcgtgcacagcagcaggccctgccaccacatcagcggcatctgtgagtgcctcccaggattctctggagctctctgcaaccaagtgtgtgctggaggatactttgggcaggactgtgcccagctctgctcctgtgccaacaacgggacctgcagccctatcgatggctcctgccagtgctttcctggatggattggcaaggactgctcacaggcttgcccacccgggttctggggccccgcctgcttccacgcatgcagctgccacaacggggcgagctgcagcgccgaggacggggcctgccactgcacccctggctggactggactcttctgcacacagcgctgcccagcagcattttttgggaaggactgtgggcgcgtatgccagtgtcagaatggcgccagctgtgaccacatcagtggcaagtgcacctgccgcacaggcttcaccgggcaacactgtgagcagagatgtgccccaggaacctttggctatgggtgtcagcagctatgtgagtgcatgaacaactccacctgtgaccatgtcaccggcacctgttactgcagccctggcttcaaaggaatcaggtgtgaccaagctgccctcatgatggaggagctgaatccctacaccaagatcagcccagcactgggtgcagagcggcactcggtgggtgctgtcacaggcatcatgctcctgttattcctcattgtggtgctgctgggcctatttgcctggcatcggcggcggcagaaagagaagggccgagacctggctccccgtgtctcctacacacctgccatgaggatgaccagcaccgactactccctctcaggtgcttgtggaatggatagacgtcagaacacatacattatggacaaaggcttcaaagattacatgaaagaatccgtgtgcagttctagtacttgttccttgaatagcagtgaaaacccttacgccacaattaaggacccacccatcctcacctgcaagcttccagaaagcagctatgtagaaatgaagtcgcctgtgcacatggggtctccgtacacagatgtgccatccttgtcgacatctaataaaaatatatatgaagttgagcccacagtcagtgtggtccaagaaggttgcggtcataactccagctatatccagaatgcatacgacctacctaggaacagccatattcctggtcattatgacctcctcccagtaagacagagccctgccaatgggccgtcccaggacaagcaatcttaagagggataagcttctctcttgcagtgtgctctactgaatattctgactctgaaagaagacagtcccttgacttgaagtaatggtacagactggctccagctgcatgttagttattacgttcacctggaactaaagaagagcgtccaggtgggactgggataattgttcaaggaattgtgttctcaaaggcaaatcctatcacccactcagccccaaatgccctggattatatgatttttaaaacattttaagatacagctactcatcaacatcagctaaatatagctgatatatatatatatatttatctgaaacgtgatattttaaaaacatgtaggtttaacaaaccttcctaggacaaaaaggagactggggagggaagaggattactttaaagcacctgaaacgtatatgtacttttggttgctgttaccatcaacatctgttttattaccgaagacaattagtacacagacatgaactgttcttaaacagaacagtcttaaaatgtctgtacatatctgtctggtccatcaaattacaacagccaagattacagaatctatatagtctaatgctgacaacttctattttaaaaaacaagactttactttcttctgccccctaagtgataggtttaaacacacagagacacacacacacgtttccaaagtgcagcagtgtctctttcagtctacaataagattcctagggcagctttatcaaattttgccaattcaaagttcaaggacattacaagttagtcctggctttgtcatatctacttagtccatccgacacctgaatcattccatgtaaaacagagctctaagatgatcctttaagcaagcagtcatagactggtcgggattaagtaaaagacggctagttggcctcctcattttatttggtcagcatcccttgactcaagagtacttgctttcaagttcttcataaatcttgagattgacgtagtatgaaacctaaaagtatacaggaaattggacaaatgtggatacagcaagtttacactgcttaaagtacattatgctttttaatggaactaaatgatcaaaaaaagaatggactgtaaccagttgctgtaacgtgatgtaaaaacgttactgtaaacagcatgaggatatgaagtccttccaccttctatcttaaaactactacttactgagctagcccaatatgcattacaatgagctaatgctccagatcccagtattcagatgtgtctataccttccactatgaacacagataaactgaggctcagataagtccaaatgaaatgaaatcaactcccaagccctaaagagaaccttctcacaagaattaaaaacaaaaagggcaaacctaggaagctaacggctactcctgtaccactctattcactggtacagtccagccagtaaaaaacacttccaaaaagatacacagaagaggaactaaatgactgcgaagctggaatactgctacaggaagtatgagagttctgaaacccttgatagaaactggaagcctgccatggaacacaatactttgggcaataatcagaaaaagcaaaaaaataaataaatgagtacatctccccttcccacatcactcaaggcataagcagattttactgttagaggaaaatatgtaatacttacatgaatgttgcatgtgtgcatgggagcaactgagtagcaatagtaaatttactttccaaaaaagccttattaaaatataaatattagaaaattactttggagacccaagtaaatatttctcatacatatgtagaaagaaatataggtaagcagcttacctcagtatttcagggcagcaagtgtttgtgaagcaaggatgagcagcatgaagatgtcagatcagcaaggagaaacttcaactcaatcccaggttttctcttcttcccttatcctgcatgtacaataactgctgcctggcaaactgcaaacaagcagcatcactcaagtttgaagtttcgccgcttttgtcaactatcctctgggcaaaggtattcagcaagaggtggaatggctagacactgaatcaagagatttcagtgttactctggtcaagttagtcgccctctctgggctcccttttttcctatgcataaaaaggggagaagcagagagtgggaagacagctctactaacccttcagctctagcagtccatgactttttaaggaaatgtaatacaagtcaaaccaggcaatacagaggagaagggaaaggcagagggtgtgattatggtgacaatagctgccttcccctatcgaacagttatcagtaaaagacatttcaatcttacaaagcaactgttagaaacttctgtctaacaccatcacaaataggttcatggtcagcctaaacatgtatactgtgcattttatgggtgactttgaaagatctgttcaattatttttcagaaactaaattttcaaaaaattaatatgtgtacaattaaaatgaatgaaagaaaaaccattattgtacagaggtattaatgagactatgaaacggcaatacttttttaaatcacagatttgtaatatatgttcactgtgcagagggattgtaccttgtacaaaataaaacaaatttctcaaactaattt

SEQ ID NO: 18729 - DNA, 5946 bp, Homo sapiens
  source 1..5946: mol_type = unassigned DNA
cgctcccggtgcccgctgcccgccgcccggctcccggctgctcgcggccccctgctcctgcctggcgctctggccaggctcgggctccggaggacaggaccgcgcgactggccggccgatccctgggccggccgcgggagcagcctcctttgttctcctgtgcagggcccgggatggtgctctccctgacggggctcattgccttctccttcctgcaagccacccttgccctgaaccccgaggaccccaacgtgtgcagccactgggagagctatgctgtgactgtccaggaatcgtatgcacaccccttcgatcagatctattacacacgatgcacagacatcctcaactggttcaagtgcaccaggcaccggatcagttataagacggcgtatcggagaggcctccggaccatgtaccggcggaggtcccagtgctgccctggctactatgagagcggagacttctgcatacccctgtgtacggaggagtgtgtgcacggccgctgcgtttccccggacacctgccactgcgagcctggctggggagggcccgactgctccagcggctgcgacagcgaccactgggggccccactgcagcaaccggtgccagtgccagaacggcgccctgtgtaaccccatcacaggcgcctgcgtgtgcgccgccggcttccgtggatggcgctgcgaggagctctgcgcacctggcacccacggcaagggatgccagctgccgtgccagtgccgacacggtgccagctgcgacccccgcgccggcgagtgcctctgcgcacctggctacaccggcgtctactgcgaggagctgtgccctcctgggagccatggagctcactgtgagctgcgctgcccctgtcagaatgggggcacctgccaccacatcactggcgagtgtgcctgccccccaggctggacgggagcagtgtgtgcccagccctgcccaccagggacatttggccagaactgcagccaggattgtccttgccaccatggagggcagtgtgaccacgtgactggacagtgccactgtacagctggatacatgggggacaggtgccaagaggagtgccccttcgggtccttcggcttccagtgctcacagcactgtgactgccacaatggggggcagtgttcacccaccacgggtgcctgcgagtgtgagcctggctacaagggcccacgctgccaggagcgactgtgcccggagggcctgcatggcccaggctgcaccctgccctgcccctgtgacgctgacaacaccatcagctgccacccagtaactggagcttgtacctgccagccaggctggtctggtcaccactgcaatgaatcctgccctgttggctactatggcgatggctgccagctgccttgcacctgtcagaatggcgccgactgccacagcatcactgggggctgcacttgtgctccgggcttcatgggagaggtctgtgccgtttcctgtgcagcagggacctatggccccaactgctcgtccatctgtagctgtaacaatggtggcacctgctccccagtagatggctcctgtacctgcaaggaagggtggcagggcctggactgcaccctgccatgtcccagtgggacgtggggcctgaactgcaacgagagctgcacctgtgccaatggggcagcctgcagccccatagacggctcctgctcctgcactcctggctggctgggagacacctgtgagctgccttgcccggatggcacatttgggctgaactgcagtgaacactgtgactgcagccatgctgatggatgtgaccccgtcacaggccactgctgctgcctggccggatggacaggcatccgctgtgacagcacgtgtccacctggccgctggggccccaactgctctgtctcctgcagctgtgagaatggaggctcctgctccccagaggatgggagctgcgagtgtgcccctggcttccgaggacccttatgccagagaatctgcccccctgggttctatggccacggctgcgcccagccatgccccctctgcgtgcacagcagcaggccctgccaccacatcagcggcatctgtgagtgcctcccaggattctctggagctctctgcaaccaagtgtgtgctggaggatactttgggcaggactgtgcccagctctgctcctgtgccaacaacgggacctgcagccctatcgatggctcctgccagtgctttcctggatggattggcaaggactgctcacaggcttgcccacccgggttctggggccccgcctgcttccacgcatgcagctgccacaacggggcgagctgcagcgccgaggacggggcctgccactgcacccctggctggactggactcttctgcacacagcgctgcccagcagcattttttgggaaggactgtgggcgcgtatgccagtgtcagaatggcgccagctgtgaccacatcagtggcaagtgcacctgccgcacaggcttcaccgggcaacactgtgagcagagatgtgccccaggaacctttggctatgggtgtcagcagctatgtgagtgcatgaacaactccacctgtgaccatgtcaccggcacctgttactgcagccctggcttcaaaggaatcaggtgtgaccaagctgccctcatgatggaggagctgaatccctacaccaagatcagcccagcactgggtgcagagcggcactcggtgggtgctgtcacaggcatcatgctcctgttattcctcattgtggtgctgctgggcctatttgcctggcatcggcggcggcagaaagagaagggccgagacctggctccccgtgtctcctacacacctgccatgaggatgaccagcaccgactactccctctcaggtgcttgtggaatggatagacgtcagaacacatacattatggacaaaggcttcaaagattacatgaaagaatccgtgtgcagttctagtacttgttccttgaatagcagtgaaaacccttacgccacaattaaggacccacccatcctcacctgcaagcttccagaaagcagctatgtagaaatgaagtcgcctgtgcacatggggtctccgtacacagatgtgccatccttgtcgacatctaataaaaatatatatgaagttgagcccacagtcagtgtggtccaagaaggttgcggtcataactccagctatatccagaatgcatacgacctacctaggaacagccatattcctggtcattatgacctcctcccagtaagacagagccctgccaatgggccgtcccaggacaagcaatcttaagagggataagcttctctcttgcagtgtgctctactgaatattctgactctgaaagaagacagtcccttgacttgaagtaatggtacagactggctccagctgcatgttagttattacgttcacctggaactaaagaagagcgtccaggtgggactgggataattgttcaaggaattgtgttctcaaaggcaaatcctatcacccactcagccccaaatgccctggattatatgatttttaaaacattttaagatacagctactcatcaacatcagctaaatatagctgatatatatatatatatttatctgaaacgtgatattttaaaaacatgtaggtttaacaaaccttcctaggacaaaaaggagactggggagggaagaggattactttaaagcacctgaaacgtatatgtacttttggttgctgttaccatcaacatctgttttattaccgaagacaattagtacacagacatgaactgttcttaaacagaacagtcttaaaatgtctgtacatatctgtctggtccatcaaattacaacagccaagattacagaatctatatagtctaatgctgacaacttctattttaaaaaacaagactttactttcttctgccccctaagtgataggtttaaacacacagagacacacacacacgtttccaaagtgcagcagtgtctctttcagtctacaataagattcctagggcagctttatcaaattttgccaattcaaagttcaaggacattacaagttagtcctggctttgtcatatctacttagtccatccgacacctgaatcattccatgtaaaacagagctctaagatgatcctttaagcaagcagtcatagactggtcgggattaagtaaaagacggctagttggcctcctcattttatttggtcagcatcccttgactcaagagtacttgctttcaagttcttcataaatcttgagattgacgtagtatgaaacctaaaagtatacaggaaattggacaaatgtggatacagcaagtttacactgcttaaagtacattatgctttttaatggaactaaatgatcaaaaaaagaatggactgtaaccagttgctgtaacgtgatgtaaaaacgttactgtaaacagcatgaggatatgaagtccttccaccttctatcttaaaactactacttactgagctagcccaatatgcattacaatgagctaatgctccagatcccagtattcagatgtgtctataccttccactatgaacacagataaactgaggctcagataagtccaaatgaaatgaaatcaactcccaagccctaaagagaaccttctcacaagaattaaaaacaaaaagggcaaacctaggaagctaacggctactcctgtaccactctattcactggtacagtccagccagtaaaaaacacttccaaaaagatacacagaagaggaactaaatgactgcgaagctggaatactgctacaggaagtatgagagttctgaaacccttgatagaaactggaagcctgccatggaacacaatactttgggcaataatcagaaaaagcaaaaaaataaataaatgagtacatctccccttcccacatcactcaaggcataagcagattttactgttagaggaaaatatgtaatacttacatgaatgttgcatgtgtgcatgggagcaactgagtagcaatagtaaatttactttccaaaaaagccttattaaaatataaatattagaaaattactttggagacccaagtaaatatttctcatacatatgtagaaagaaatataggtaagcagcttacctcagtatttcagggcagcaagtgtttgtgaagcaaggatgagcagcatgaagatgtcagatcagcaaggagaaacttcaactcaatcccaggttttctcttcttcccttatcctgcatgtacaataactgctgcctggcaaactgcaaacaagcagcatcactcaagtttgaagtttcgccgcttttgtcaactatcctctgggcaaaggtattcagcaagaggtggaatggctagacactgaatcaagagatttcagtgttactctggtcaagttagtcgccctctctgggctcccttttttcctatgcataaaaaggggagaagcagagagtgggaagacagctctactaacccttcagctctagcagtccatgactttttaaggaaatgtaatacaagtcaaaccaggcaatacagaggagaagggaaaggcagagggtgtgattatggtgacaatagctgccttcccctatcgaacagttatcagtaaaagacatttcaatcttacaaagcaactgttagaaacttctgtctaacaccatcacaaataggttcatggtcagcctaaacatgtatactgtgcattttatgggtgactttgaaagatctgttcaattatttttcagaaactaaattttcaaaaaattaatatgtgtacaattaaaatgaatgaaagaaaaaccattattgtacagaggtattaatgagactatgaaacggcaatacttttttaaatcacagatttgtaatatatgttcactgtgcagagggattgtaccttgtacaaaataaaacaaatttctcaaactaattt

SEQ ID NO: 18730 - DNA, 5914 bp, Homo sapiens
  source 1..5914: mol_type = unassigned DNA
gcccgctgcccgccgcccggctcccggctgctcgcggccccctgctcctgcctggcgctctggccaggctcgggctccggaggacaggaccgcgcgactggccggccgatccctgggccggccgcgggagcagggcccgggatggtgctctccctgacggggctcattgccttctccttcctgcaagccacccttgccctgaaccccgaggaccccaacgtgtgcagccactgggagagctatgctgtgactgtccaggaatcgtatgcacaccccttcgatcagatctattacacacgatgcacagacatcctcaactggttcaagtgcaccaggcaccggatcagttataagacggcgtatcggagaggcctccggaccatgtaccggcggaggtcccagtgctgccctggctactatgagagcggagacttctgcatacccctgtgtacggaggagtgtgtgcacggccgctgcgtttccccggacacctgccactgcgagcctggctggggagggcccgactgctccagcggctgcgacagcgaccactgggggccccactgcagcaaccggtgccagtgccagaacggcgccctgtgtaaccccatcacaggcgcctgcgtgtgcgccgccggcttccgtggatggcgctgcgaggagctctgcgcacctggcacccacggcaagggatgccagctgccgtgccagtgccgacacggtgccagctgcgacccccgcgccggcgagtgcctctgcgcacctggctacaccggcgtctactgcgaggagctgtgccctcctgggagccatggagctcactgtgagctgcgctgcccctgtcagaatgggggcacctgccaccacatcactggcgagtgtgcctgccccccaggctggacgggagcagtgtgtgcccagccctgcccaccagggacatttggccagaactgcagccaggattgtccttgccaccatggagggcagtgtgaccacgtgactggacagtgccactgtacagctggatacatgggggacaggtgccaagaggagtgccccttcgggtccttcggcttccagtgctcacagcactgtgactgccacaatggggggcagtgttcacccaccacgggtgcctgcgagtgtgagcctggctacaagggcccacgctgccaggagcgactgtgcccggagggcctgcatggcccaggctgcaccctgccctgcccctgtgacgctgacaacaccatcagctgccacccagtaactggagcttgtacctgccagccaggctggtctggtcaccactgcaatgaatcctgccctgttggctactatggcgatggctgccagctgccttgcacctgtcagaatggcgccgactgccacagcatcactgggggctgcacttgtgctccgggcttcatgggagaggtctgtgccgtttcctgtgcagcagggacctatggccccaactgctcgtccatctgtagctgtaacaatggtggcacctgctccccagtagatggctcctgtacctgcaaggaagggtggcagggcctggactgcaccctgccatgtcccagtgggacgtggggcctgaactgcaacgagagctgcacctgtgccaatggggcagcctgcagccccatagacggctcctgctcctgcactcctggctggctgggagacacctgtgagctgccttgcccggatggcacatttgggctgaactgcagtgaacactgtgactgcagccatgctgatggatgtgaccccgtcacaggccactgctgctgcctggccggatggacaggcatccgctgtgacagcacgtgtccacctggccgctggggccccaactgctctgtctcctgcagctgtgagaatggaggctcctgctccccagaggatgggagctgcgagtgtgcccctggcttccgaggacccttatgccagagaatctgcccccctgggttctatggccacggctgcgcccagccatgccccctctgcgtgcacagcagcaggccctgccaccacatcagcggcatctgtgagtgcctcccaggattctctggagctctctgcaaccaagtgtgtgctggaggatactttgggcaggactgtgcccagctctgctcctgtgccaacaacgggacctgcagccctatcgatggctcctgccagtgctttcctggatggattggcaaggactgctcacaggcttgcccacccgggttctggggccccgcctgcttccacgcatgcagctgccacaacggggcgagctgcagcgccgaggacggggcctgccactgcacccctggctggactggactcttctgcacacagcgctgcccagcagcattttttgggaaggactgtgggcgcgtatgccagtgtcagaatggcgccagctgtgaccacatcagtggcaagtgcacctgccgcacaggcttcaccgggcaacactgtgagcagagatgtgccccaggaacctttggctatgggtgtcagcagctatgtgagtgcatgaacaactccacctgtgaccatgtcaccggcacctgttactgcagccctggcttcaaaggaatcaggtgtgaccaagctgccctcatgatggaggagctgaatccctacaccaagatcagcccagcactgggtgcagagcggcactcggtgggtgctgtcacaggcatcatgctcctgttattcctcattgtggtgctgctgggcctatttgcctggcatcggcggcggcagaaagagaagggccgagacctggctccccgtgtctcctacacacctgccatgaggatgaccagcaccgactactccctctcaggtgcttgtggaatggatagacgtcagaacacatacattatggacaaaggcttcaaagattacatgaaagaatccgtgtgcagttctagtacttgttccttgaatagcagtgaaaacccttacgccacaattaaggacccacccatcctcacctgcaagcttccagaaagcagctatgtagaaatgaagtcgcctgtgcacatggggtctccgtacacagatgtgccatccttgtcgacatctaataaaaatatatatgaagttgagcccacagtcagtgtggtccaagaaggttgcggtcataactccagctatatccagaatgcatacgacctacctaggaacagccatattcctggtcattatgacctcctcccagtaagacagagccctgccaatgggccgtcccaggacaagcaatcttaagagggataagcttctctcttgcagtgtgctctactgaatattctgactctgaaagaagacagtcccttgacttgaagtaatggtacagactggctccagctgcatgttagttattacgttcacctggaactaaagaagagcgtccaggtgggactgggataattgttcaaggaattgtgttctcaaaggcaaatcctatcacccactcagccccaaatgccctggattatatgatttttaaaacattttaagatacagctactcatcaacatcagctaaatatagctgatatatatatatatatttatctgaaacgtgatattttaaaaacatgtaggtttaacaaaccttcctaggacaaaaaggagactggggagggaagaggattactttaaagcacctgaaacgtatatgtacttttggttgctgttaccatcaacatctgttttattaccgaagacaattagtacacagacatgaactgttcttaaacagaacagtcttaaaatgtctgtacatatctgtctggtccatcaaattacaacagccaagattacagaatctatatagtctaatgctgacaacttctattttaaaaaacaagactttactttcttctgccccctaagtgataggtttaaacacacagagacacacacacacgtttccaaagtgcagcagtgtctctttcagtctacaataagattcctagggcagctttatcaaattttgccaattcaaagttcaaggacattacaagttagtcctggctttgtcatatctacttagtccatccgacacctgaatcattccatgtaaaacagagctctaagatgatcctttaagcaagcagtcatagactggtcgggattaagtaaaagacggctagttggcctcctcattttatttggtcagcatcccttgactcaagagtacttgctttcaagttcttcataaatcttgagattgacgtagtatgaaacctaaaagtatacaggaaattggacaaatgtggatacagcaagtttacactgcttaaagtacattatgctttttaatggaactaaatgatcaaaaaaagaatggactgtaaccagttgctgtaacgtgatgtaaaaacgttactgtaaacagcatgaggatatgaagtccttccaccttctatcttaaaactactacttactgagctagcccaatatgcattacaatgagctaatgctccagatcccagtattcagatgtgtctataccttccactatgaacacagataaactgaggctcagataagtccaaatgaaatgaaatcaactcccaagccctaaagagaaccttctcacaagaattaaaaacaaaaagggcaaacctaggaagctaacggctactcctgtaccactctattcactggtacagtccagccagtaaaaaacacttccaaaaagatacacagaagaggaactaaatgactgcgaagctggaatactgctacaggaagtatgagagttctgaaacccttgatagaaactggaagcctgccatggaacacaatactttgggcaataatcagaaaaagcaaaaaaataaataaatgagtacatctccccttcccacatcactcaaggcataagcagattttactgttagaggaaaatatgtaatacttacatgaatgttgcatgtgtgcatgggagcaactgagtagcaatagtaaatttactttccaaaaaagccttattaaaatataaatattagaaaattactttggagacccaagtaaatatttctcatacatatgtagaaagaaatataggtaagcagcttacctcagtatttcagggcagcaagtgtttgtgaagcaaggatgagcagcatgaagatgtcagatcagcaaggagaaacttcaactcaatcccaggttttctcttcttcccttatcctgcatgtacaataactgctgcctggcaaactgcaaacaagcagcatcactcaagtttgaagtttcgccgcttttgtcaactatcctctgggcaaaggtattcagcaagaggtggaatggctagacactgaatcaagagatttcagtgttactctggtcaagttagtcgccctctctgggctcccttttttcctatgcataaaaaggggagaagcagagagtgggaagacagctctactaacccttcagctctagcagtccatgactttttaaggaaatgtaatacaagtcaaaccaggcaatacagaggagaagggaaaggcagagggtgtgattatggtgacaatagctgccttcccctatcgaacagttatcagtaaaagacatttcaatcttacaaagcaactgttagaaacttctgtctaacaccatcacaaataggttcatggtcagcctaaacatgtatactgtgcattttatgggtgactttgaaagatctgttcaattatttttcagaaactaaattttcaaaaaattaatatgtgtacaattaaaatgaatgaaagaaaaaccattattgtacagaggtattaatgagactatgaaacggcaatacttttttaaatcacagatttgtaatatatgttcactgtgcagagggattgtaccttgtacaaaataaaacaaatttctcaaactaattt

SEQ ID NO: 18731 - DNA, 4501 bp, Homo sapiens
  source 1..4501: mol_type = unassigned DNA
gagaacttaaaggcgaggggcggggcgcgcccggcccagagcggctcccgggcggcgccgagcggagcggatcccggggctgggattgcgcgcccgcccggaacccagaaccagcccgagccgcctgccccgtcgcccggccgccggcttagggcgcagcgcggttggtcctcgccccctcccgcccgccggcctaccaggccatgggggcgtcccgggaccgcgggctggccgcgctctggtgccttgggctcctggggggcctggcgcgcgtcgcgggcacgcactaccgctacctctggaggggctgctacccatgtcacctgggccaggccggctaccccgtgagcgccggtgaccagaggccagatgtggacgaatgccgaacccacaacggtggctgccagcaccggtgcgtgaacaccccaggctcctacctctgtgagtgcaagcccggcttccggctccacactgacagcaggacctgcctggccattaactcctgcgccctgggcaatggcggctgccagcaccactgtgtccagctcacaatcactcggcatcgctgccagtgccggcccgggttccagctccaggaggacggcaggcattgtgtccgtagaagcccgtgtgccaacaggaacggcagctgcatgcacaggtgccaggtggtccggggcctcgcccgctgtgagtgccacgtgggctatcagctagcagcggacggcaaggcctgtgaagatgtggacgaatgtgccgcagggctggcccagtgtgcccatggctgcctcaacacccaggggtccttcaagtgcgtgtgtcacgcgggctatgagctgggcgccgatggccggcagtgctaccggattgagatggaaatcgtgaacagctgtgaggccaacaacggcggctgctcccatggctgcagccacaccagtgctgggcccctgtgcacatgtccccgcggctacgagctggacacagatcagaggacctgcatcgatgtcgacgactgtgcagacagcccgtgctgccagcaggtgtgcaccaacaaccctggcgggtacgagtgcggctgctacgccggctaccggctcagtgccgatggctgcggctgtgaggatgtggatgagtgcgcctccagccgtggcggctgcgagcaccactgcaccaacctggccggctccttccagtgctcctgcgaggccggctaccggctgcacgaggaccgtaggggctgcagccccctggaggagccgatggtggacctggacggcgagctgcctttcgtgcggcccctgccccacattgccgtgctccaggacgagctgccgcaactcttccaggatgacgacgtcggggccgatgaggaagaggcagagttgcggggcgaacacacgctcacagagaagtttgtctgcctggatgactcctttggccatgactgcagcttgacctgtgatgactgcaggaacggagggacctgcctcctgggcctggatggctgtgattgccccgagggctggactgggctcatctgcaatgagacttgtcctccggacacctttgggaagaactgcagcttctcctgcagctgtcagaatggtgggacctgcgactctgtcacgggggcctgccgctgccccccgggtgtcagtggaactaactgtgaggatggctgccccaagggctactatggcaagcactgtcgcaagaaatgcaactgtgccaaccggggccggtgccaccgcctctacggggcctgcctctgcgacccagggctctacggccgcttctgccacctcacctgcccgccgtgggcctttgggccgggctgctcggaggagtgccagtgtgtgcagccccacacgcagtcctgtgacaagagggatggcagctgctcctgcaaggctggcttccggggcgagcgctgtcaggcagagtgtgagctgggctactttgggccggggtgctggcaggcatgcacctgcccagtgggcgtggcctgtgactccgtgagcggcgagtgtgggaagcggtgtcctgctggcttccagggagaggactgtggccaagagtgcccggtggggacgtttggcgtgaactgctcgagctcctgctcctgtgggggggccccctgccacggggtcacggggcagtgccggtgtccgccggggaggactggggaagactgtgaggcagattgtcccgagggccgctgggggctgggctgccaggagatctgcccagcatgccagcacgctgcccgctgcgaccctgagaccggagcctgcctgtgcctccctggcttcgtcggcagccgctgccaggacgtgtgcccagcaggctggtatggtcccagctgccagacaaggtgctcttgtgccaatgatgggcactgccacccagccaccggacactgcagctgtgcccccgggtggaccggctttagctgccagagagcctgtgatactgggcactggggacctgactgcagccacccctgcaactgcagcgctggccacgggagctgtgatgccatcagcggcctgtgtctgtgtgaggctggctacgtgggcccgcggtgcgagcagcagtgtccccagggccactttgggcccggctgtgagcagcggtgccagtgtcagcatggagcagcctgtgaccacgtcagcggggcctgcacctgcccggccggctggaggggcaccttctgcgagcatgcctgcccggccggcttctttggattggactgtcgcagtgcctgcaactgcaccgccggagctgcctgtgatgccgtgaatggctcctgcctctgccccgctggccgccggggcccccgctgtgccgagaagtgcctcccccgggacgtcagagctggctgccggcacagcggcggttgcctcaacgggggcctgtgtgacccgcacacgggccgctgcctctgcccagccggctggactggggacaagtgtcagagcccctgcctgcggggctggtttggagaggcctgtgcccagcgctgcagctgcccgcctggcgctgcctgccaccacgtcactggggcctgccgctgtccccctggcttcactggctccggctgcgagcagggatgtccgcccgggcggtatgggccaggctgtgaacagctgtgtgggtgtctcaacgggggctcctgtgatgcggccacgggggcctgccgctgccccactgggttcctcgggacggactgcaacctcacctgtccgcagggccgcttcggccccaactgcacccacgtgtgtgggtgtgggcagggggcggcctgcgaccctgtgaccggcacctgcctctgccccccggggagagccggcgtccgctgtgagcgaggctgcccccagaaccggtttggcgtgggctgcgagcacacctgctcctgcagaaatgggggcctgtgccacgccagcaacggcagctgctcctgtggcctgggctggacggggcggcactgcgagctggcctgtccccctgggcgctacggagccgcctgccatctggagtgctcctgccacaacaacagcacgtgtgagcctgccacgggcacctgccgctgcggccccggcttctatggccaggcctgcgagcaccggcgctcaggagccacctgtaacctggattgcagaaggggccagtttgggcccagctgcaccctgcactgtgactgcgggggtggggctgactgcgaccctgtcagtgggcagtgtcactgtgtggatggctacatggggcccacgtgccgggaaggtgggcccctccggctccccgagaacccgtccttagcccagggctcagcgggcacactgcccgcctccagcagacccacatcccggagcggtggaccagcgaggcactagtagaggcagtcccgtggagcccgcctctccagtcccagccagaggggaccctggcctttggtgaccactgagaaggacacttcacgggcccagagctcctggtactgcccttcctttgagggccgtggagggctgtggacagcccagcaacctgtcgctcttggaggctggtgtggccttgaggagggaagcctcgcatggccgctggaagagaggcgcctcctggcctggctctgcagaacccaggggcacgctctgggcctgggctgaggaagtcccgctctccccgcggctctgagttggactgaggacaggtgtgggcgccagtgtgggtgcaggcgcaggtgcaggcacagggccactgtcctccaggcaggctttttggtgctaggccctgggactggaagtcgcccagcccgtatttatgtaaaggtatttatgggccactgcacatgcccgctgcagccctgggatcagctggaagctgcctgtcatctcctgcccaatccccagaaaccctgattcaggtctgcaggctcctgcgggctcaccaggctgctggctccggtaccatgtaaacctaggaaggtaaaggagcaggcaacctc

SEQ ID NO: 18732 - DNA, 5455 bp, Homo sapiens
  source 1..5455: mol_type = unassigned DNA
cgccggggcgagttcctgcagggtggacccggcgatcaggtctccgcggtgccactttgggcgcgggcgggaagccgggacgctccgcacctgcagcgaccttgggctccgcggagcgggcgcgggcacctgtggctgcgtcctatggcgcacgtggaggcggaggctccggggagccgccggggccgcctgtgagccggagagcggaggaggcaccggcgcgcacgatgtcgttccttgaagaggcgagggcagcggggcgcgcggtggtcctggcgttggtgctgctgctgctccccgccgtgcccgtgggcgccagcgttccgccgcggcccctgctcccgctgcagcccggcatgccccacgtgtgtgctgagcaggagctgaccctggtgggccgccgccagccgtgcgtgcaggccttaagccacacggtgccggtgtggaaggccggctgtgggtggcaggcgtggtgcgtgggtcatgagcggagaaccgtctactacatgggctacaggcaggtgtataccacggaggcccggaccgtgctcaggtgctgccgagggtggatgcagcagcccgacgaggagggctgcctctcggctgaatgcagcgccagcctctgttttcacggtggccgttgtgtgccaggctcagcccagccgtgtcactgtccccccggcttccagggaccccgctgtcagtatgatgtggacgaatgccgaacccacaacggtggctgccagcaccggtgcgtgaacaccccaggctcctacctctgtgagtgcaagcccggcttccggctccacactgacagcaggacctgcctggccattaactcctgcgccctgggcaatggcggctgccagcaccactgtgtccagctcacaatcactcggcatcgctgccagtgccggcccgggttccagctccaggaggacggcaggcattgtgtccgtagaagcccgtgtgccaacaggaacggcagctgcatgcacaggtgccaggtggtccggggcctcgcccgctgtgagtgccacgtgggctatcagctagcagcggacggcaaggcctgtgaagatgtggacgaatgtgccgcagggctggcccagtgtgcccatggctgcctcaacacccaggggtccttcaagtgcgtgtgtcacgcgggctatgagctgggcgccgatggccggcagtgctaccggattgagatggaaatcgtgaacagctgtgaggccaacaacggcggctgctcccatggctgcagccacaccagtgctgggcccctgtgcacatgtccccgcggctacgagctggacacagatcagaggacctgcatcgatgtcgacgactgtgcagacagcccgtgctgccagcaggtgtgcaccaacaaccctggcgggtacgagtgcggctgctacgccggctaccggctcagtgccgatggctgcggctgtgaggatgtggatgagtgcgcctccagccgtggcggctgcgagcaccactgcaccaacctggccggctccttccagtgctcctgcgaggccggctaccggctgcacgaggaccgtaggggctgcagccccctggaggagccgatggtggacctggacggcgagctgcctttcgtgcggcccctgccccacattgccgtgctccaggacgagctgccgcaactcttccaggatgacgacgtcggggccgatgaggaagaggcagagttgcggggcgaacacacgctcacagagaagtttgtctgcctggatgactcctttggccatgactgcagcttgacctgtgatgactgcaggaacggagggacctgcctcctgggcctggatggctgtgattgccccgagggctggactgggctcatctgcaatgagacttgtcctccggacacctttgggaagaactgcagcttctcctgcagctgtcagaatggtgggacctgcgactctgtcacgggggcctgccgctgccccccgggtgtcagtggaactaactgtgaggatggctgccccaagggctactatggcaagcactgtcgcaagaaatgcaactgtgccaaccggggccggtgccaccgcctctacggggcctgcctctgcgacccagggctctacggccgcttctgccacctcacctgcccgccgtgggcctttgggccgggctgctcggaggagtgccagtgtgtgcagccccacacgcagtcctgtgacaagagggatggcagctgctcctgcaaggctggcttccggggcgagcgctgtcaggcagagtgtgagctgggctactttgggccggggtgctggcaggcatgcacctgcccagtgggcgtggcctgtgactccgtgagcggcgagtgtgggaagcggtgtcctgctggcttccagggagaggactgtggccaagagtgcccggtggggacgtttggcgtgaactgctcgagctcctgctcctgtgggggggccccctgccacggggtcacggggcagtgccggtgtccgccggggaggactggggaagactgtgaggcagattgtcccgagggccgctgggggctgggctgccaggagatctgcccagcatgccagcacgctgcccgctgcgaccctgagaccggagcctgcctgtgcctccctggcttcgtcggcagccgctgccaggacgtgtgcccagcaggctggtatggtcccagctgccagacaaggtgctcttgtgccaatgatgggcactgccacccagccaccggacactgcagctgtgcccccgggtggaccggctttagctgccagagagcctgtgatactgggcactggggacctgactgcagccacccctgcaactgcagcgctggccacgggagctgtgatgccatcagcggcctgtgtctgtgtgaggctggctacgtgggcccgcggtgcgagcagcagtgtccccagggccactttgggcccggctgtgagcagcggtgccagtgtcagcatggagcagcctgtgaccacgtcagcggggcctgcacctgcccggccggctggaggggcaccttctgcgagcatgcctgcccggccggcttctttggattggactgtcgcagtgcctgcaactgcaccgccggagctgcctgtgatgccgtgaatggctcctgcctctgccccgctggccgccggggcccccgctgtgccgagacctgcccagcccacacctacgggcacaattgcagccaggcctgtgcctgctttaacggggcctcctgtgaccctgtccacgggcagtgccactgtgcccctggctggatggggccctcctgcctgcaggcctgccctgccggcctgtacggcgacaactgtcggcattcctgcctctgccagaacggagggacctgtgaccctgtctcaggccactgtgcgtgcccagagggctgggccggcctggcctgtgagaaggagtgcctcccccgggacgtcagagctggctgccggcacagcggcggttgcctcaacgggggcctgtgtgacccgcacacgggccgctgcctctgcccagccggctggactggggacaagtgtcagagcccctgcctgcggggctggtttggagaggcctgtgcccagcgctgcagctgcccgcctggcgctgcctgccaccacgtcactggggcctgccgctgtccccctggcttcactggctccggctgcgagcaggcctgcccacccggcagctttggggaggactgtgcgcagatgtgccagtgtcccggtgagaacccggcctgccaccctgccaccgggacctgctcatgtgctgctggctaccacggccccagctgccagcaacgatgtccgcccgggcggtatgggccaggctgtgaacagctgtgtgggtgtctcaacgggggctcctgtgatgcggccacgggggcctgccgctgccccactgggttcctcgggacggactgcaacctcacctgtccgcagggccgcttcggccccaactgcacccacgtgtgtgggtgtgggcagggggcggcctgcgaccctgtgaccggcacctgcctctgccccccggggagagccggcgtccgctgtgagcgaggctgcccccagaaccggtttggcgtgggctgcgagcacacctgctcctgcagaaatgggggcctgtgccacgccagcaacggcagctgctcctgtggcctgggctggacggggcggcactgcgagctggcctgtccccctgggcgctacggagccgcctgccatctggagtgctcctgccacaacaacagcacgtgtgagcctgccacgggcacctgccgctgcggccccggcttctatggccaggcctgcgagcacccctgtccccctggcttccacggggctggctgccaggggttgtgctggtgtcaacatggagccccctgcgaccccatcagtggccgatgcctctgccctgccggcttccacggccacttctgtgagagggggtgtgagccaggttcatttggagagggctgccaccagcgctgtgactgtgacgggggggcaccctgtgaccctgtcaccggtctctgcctttgcccaccagggcgctcaggagccacctgtaacctggattgcagaaggggccagtttgggcccagctgcaccctgcactgtgactgcgggggtggggctgactgcgaccctgtcagtgggcagtgtcactgtgtggatggctacatggggcccacgtgccgggaaggtgggcccctccggctccccgagaacccgtccttagcccagggctcagcgggcacactgcccgcctccagcagacccacatcccggagcggtggaccagcgaggcactagtagaggcagtcccgtggagcccgcctctccagtcccagccagaggggaccctggcctttggtgaccactgagaaggacacttcacgggcccagagctcctggtactgcccttcctttgagggccgtggagggctgtggacagcccagcaacctgtcgctcttggaggctggtgtggccttgaggagggaagcctcgcatggccgctggaagagaggcgcctcctggcctggctctgcagaacccaggggcacgctctgggcctgggctgaggaagtcccgctctccccgcggctctgagttggactgaggacaggtgtgggcgccagtgtgggtgcaggcgcaggtgcaggcacagggccactgtcctccaggcaggctttttggtgctaggccctgggactggaagtcgcccagcccgtatttatgtaaaggtatttatgggccactgcacatgcccgctgcagccctgggatcagctggaagctgcctgtcatctcctgcccaatccccagaaaccctgattcaggtctgcaggctcctgcgggctcaccaggctgctggctccggtaccatgtaaacctaggaaggtaaaggagcaggc

SEQ ID NO: 18733 - DNA, 10184 bp, Homo sapiens
  source 1..10184: mol_type = unassigned DNA
ggccgctctggcccaagcgtcccctcgtctctctgatctggcccatccggcttcggagggaggcgagggtgggtgagcaaagggattgggtctgtggggtccaggcccgaacccctgaagacgggctccgcccccggcacccgctcgcgccccgcccccggctggaggagtctctcctggaccatccgaacctagcctgtcccggcccgcagcctctatggaggctcctgccgggccgtagagcccttcgccccctggggacccacccgtctataaggtccgtttggcctgcagcagcctgagtccgtaatgctgggcactgttcatgggatcggccccctatggagccctgtgtctataggggactcctacggtccctagggttcggccccgtccataatgactccatatacagggccttccatcgctctatagggctcagccctcggcttccagagcctgtcagcagtggccgtacccttcgccgggactgccgggtctccgggacctcttcgatctacaaggtcatgttatgcctatagaggtcgcatttgcagggcctcaccccgggtagagggtcctctccaggtttttacggcctgtccccgctctaagggtcagtgcaggaggcggcgatggccctgggcaaggttctggccatggcactggttttggccttggccgtgctggggtcgctgtcccctggggcccgggcgggggactgcaaggggcagcggcaggtgctgcgggaggcgccaggcttcgtgacggatggtgcgggcaactacagcgtcaatggcaactgcgagtggctcatcgaggccccaagcccccagcaccggatcctgctggacttccttttcctggacacagagtgcacgtatgactacctgttcgtgtatgacggtgactccccgcgagggccgctgcttgccagtctaagtgggagcacccgacctccgcccatcgaagcttcctcaggcaagatgctgctgcacctcttcagtgatgccaactacaacctgctgggctttaacgcctcattccgcttctccctgtgcccgggtggctgccagagccacgggcagtgccagccaccgggtgtgtgtgcctgcgagccgggctgggggggtcctgactgtggcctgcaggagtgctcagcctactgtggcagccacggcacctgcgcctcgcccctgggaccatgccgctgtgagcctggcttcttgggacgtgcctgtgacctgcacctgtgggagaaccagggggctgggtggtggcacaacgtgagtgccagggaccctgccttctctgcccgtattggggcagctggcgccttcctgtccccaccagggctgctggcagttttcggaggccaggacctcaacaatgccctgggtgacctcgtcctatacaacttctccgccaacacctgggagtcttgggacctgagtcctgccccggctgcccgtcactcccatgtggccgtggcctgggccggctccctggtactgatgggtggtgagctggctgacggctcgctcaccaacgacgtgtgggccttcagtccactgggcaggggccactgggagctcctggcaccacctgcctccagctcctcggggcccccaggcctggcaggtcacgcggctgccctggtggatgatgtctggctatatgtgtctggaggccgcaccccgcacgacctcttctcctctggcctcttccgtttccgccttgacagcaccagcgggggctattgggagcaggtgattccggcaggcggacggccccctgctgccactggccactccatggtgttccatgccccctcccgtgccctgctggtccatggtggacaccggccctccactgcccggttctctgtgcgagtgaactccactgagcttttccacgtggatcggcatgtgtggacgacgctgaaggggcgggatgggcttcagggcccaagggagcgagccttccacacagccagtgttctgggcaattacatggtggtctatgggggcaatgtgcacacccattaccaggaggaaaagtgctacgaagatggcatcttcttctaccaccttggctgccatcaatgggtgtcaggagctgagcttgccccgccaggaacccctgagggccgagcagcgcctcccagtggtcggtactcacatgtagctgcggtgcttggtggcagcgtcctgttggtggctggggggtacagcggccggccccgtggggacttgatggcgtacaaggtgcccccctttgtgttccaggcacctgcccctgactaccacttggactactgctccatgtacacagaccacagcgtctgctcccgggacccggaatgcagttggtgccaaggagcctgccaagctgcaccccctcctgggacccccttgggggcttgtccagccgccagctgcctgggcctgggccgcctcctgggtgactgccaggcctgcctggccttcagcagccccacagcccctccacggggacctggcaccctgggctggtgcgtgcacaatgagagctgcctccctaggcctgagcaggcccgctgccgaggggagcagatctcaggcactgtgggctggtgggggcctgcgcctgtcttcgtcacgtccctggaggcctgcgtcacccagagcttcctgcctggcctgcacttgctcacctttcagcagccgcccaatacctcccagcctgacaaggtctcaattgtccgcagcacgaccatcaccctaacacccagcgcagagacagatgtgtccctggtctaccgtggcttcatctacccaatgctgcctggagggccaggtggaccaggggctgaggacgtggccgtgtggacgcgggcccagcgcctacacgtcctggcccggatggcccgtggccctgacacggagaacatggaggaggtggggcgctgggtggctcatcaggagaaggagacgcggcggctgcagcgccctgggtctgctcgcctcttccctctgcctgggcgggaccacaagtatgcagtagagatccagggccagctcaatggctcggcaggccctgggcacagcgagctaactctgctgtgggatcggactggtgtgccaggaggcagcgagatctccttcttcttcctggagccctaccgctcgtcgtcctgcacctcctattcttcctgcctgggctgcttggcagaccagggctgtggctggtgcctgaccagtgccacctgccacctgcgccagggcggagcccattgcggggatgacggggctggtgggtccctgctggtgctggtgcctaccctctgcccactctgcgaggagcatcgggactgccacgcctgcacccaggaccccttctgtgagtggcatcagagcaccagccgcaaaggggacgcggcatgcagccggcggggccggggtcggggtgccctgaagagtccagaggagtgtcccccgctctgcagccagcgactgacctgtgaggactgcctggccaactctagccagtgcgcctggtgccagtccacccacacctgcttcctgtttgctgcctacttggcccggtacccacacgggggctgtcgaggctgggacgacagtgtacactcggagccacggtgccggagctgcgatggcttcctgacctgccatgagtgtctgcagagccacgagtgtggctggtgtggcaatgaggacaaccccacactgggacggtgcctacagggggacttctcagggcccctcggtgggggtaactgctccctgtgggtgggggagggcctggggcttcccgtggccctccctgcccgctgggcatacgcccgctgtcctgacgtggatgagtgtcgcctgggcctggcccggtgccacccgcgggcgacctgcctgaacacgcccctcagctacgagtgtcactgccagcggggctaccagggtgatggcatctcacactgcaaccgcacgtgcttggaggactgtggccatggtgtgtgcagtggccccccggactttacctgcgtgtgtgacctaggctggacatcagacctgccccctcccacacccgccccgggtccgccagccccccgctgctcccgggactgtggctgcagcttccacagccactgccgcaagcggggccctggcttctgcgacgagtgccaggactggacatggggggagcactgcgaacgatgccggcccggcagcttcggcaacgccacaggctctaggggctgccggccctgccagtgcaacgggcacggggacccacgccgtggccactgcgacaacctcagtgggctctgcttctgccaggaccacaccgagggtgcccactgccagctctgctccccaggctattatggggatccccgggccggtggttcctgctttcgggagtgtgggggtcgcgccctcctcaccaacgtgtcctcagtggcactgggctcacgccgggtcggggggctgctgcctccaggtggcggggctgcaagagccgggcctggcctgtcctactgtgtgtgggttgtctcggccactgaggagctacagccctgtgctcccgggaccctctgtcccccactcaccctcaccttctcccccgacagcagcaccccctgcacgctgagctacgtcctggcgtttgatggattcccacgcttcctggacactggtgttgtccagtcggaccgcagcctcatagctgccttctgcggccagcgacgggacaggcccctcactgttcaggccctgtctgggctgctcgtgctgcactgggaggccaatggctcctcatcctggggcttcaatgcttcggtgggctctgcccgctgtgggtcagggggccccgggagctgtcccgtcccccaggaatgcgtgccccaggacggtgctgcaggtgcggggctctgccgatgtcctcagggctgggctggcccacactgccgcatggctctgtgtcctgagaactgcaatgcccacactggggcaggaacttgtaaccagagcctgggtgtgtgcatctgtgccgagggcttcgggggccccgactgcgccaccaagctggatggcgggcagctggtctgggagaccctcatggacagccgcctctcagccgacactgccagccgcttcctgcaccgcctgggccacaccatggtggatggacccgatgccaccttgtggatgtttgggggcctgggcctgccccaggggctgctgggaaacctgtacaggtactcagtgagtgagcggcggtggacacagatgctggcgggagccgaggacgggggcccaggcccatcgccccgctccttccatgcagccgcatatgtgcccgctggccgtggtgccatgtatctgctggggggacttaccgctggaggcgtcacccgtgatttctgggtcctcaacctcaccaccctgcaatggcggcaggagaaggccccccagaccgtggagctgccagccgttgctggtcacacccttactgcccgccgaggcctgtctctgctcctggtgggcggttactccccggaaaatggcttcaaccagcagctgctggagtaccagctggcaaccggcacctgggtgtcaggagcccagagtgggacaccccccacaggtctctatggtcactctgctgtctaccacgaggccaccgactccctctacgtgtttggggggttccgattccatgtggagctggcggccccatcccccgagctctactccctgcactgtcctgaccgcacctggagtctgctggccccttctcagggggcaaagcgagatcgtatgaggaatgtgcgtggctcatctcggggtctgggccaagttcctggggagcagcctgggtcatgggggttccgggaagtcaggaagaagatggctctgtgggctgctcttgctggtacaggaggtttcctggaggaaatctcacctcacctgaaggagccccgcccccggcttttccacgcctcagccctgttaggggacaccatggtggttcttggggggcgctcggaccctgacgagttcagcagcgacgttctgctctaccaggtcaactgcaatgcctggcttctgcccgacctcacccgctcggcctctgtggggcccccaatggaggagtctgtggcccatgctgtggcagcagtcgggagccgcctgtatatctctgggggtttcgggggagtggccctgggccgcctgctggcactgaccctgccccctgacccctgccgcctgctgtcctcacctgaagcttgtaaccagtctggggcctgcacctggtgccatggggcctgcttgtccggggatcaggcccacaggctgggctgcgggggctccccctgctccccaatgcctcgctccccggaggaatgtcgacgtctccggacctgcagtgagtgcctggcccgccatcctcggaccctgcaacctggagatggagaggcgtccaccccccgctgtaagtggtgtaccaactgccccgaaggtgcttgcattggacgcaatgggtcctgcacctctgagaatgactgtcggatcaaccagcgagaggtcttctgggcagggaactgctccgaggctgcgtgcggggctgctgactgcgagcagtgcacgcgggagggcaagtgcatgtggacgcggcagttcaagaggacaggggagacccgccgcatcctctccgtgcagcccacctatgactggacgtgcttcagccactctctgctgaatgtgtcccccatgccggtggaatcatcacccccactgccctgccccaccccttgtcacctcctacccaactgtacctcctgcctggactctaagggagcagatgggggctggcagcactgtgtttggagcagcagcctgcagcagtgtctgagcccttcctacctgcccctgcgatgtatggccggaggctgtgggcggctgctccggggacctgagagctgctccctgggctgtgctcaggcaactcagtgcgccttgtgcctgcggcgcccccattgcggctggtgtgcctgggggggccaggatgggggtggccgctgcatggagggtggactcagcggcccccgtgatgggctgacatgtgggcgtccgggggcctcctgggccttcctgtcctgcccccctgaggacgagtgtgcaaacgggcaccacgactgcaacgagacgcagaattgccacgaccagccccacggctatgagtgcagctgcaagaccggctataccatggacaacatgacagggctgtgccgccctgtgtgcgcccagggctgcgtgaacggctcatgtgtggagcccgaccactgccgctgccactttggctttgtgggccgcaactgctccacggaatgccgctgcaaccgccacagtgaatgcgctggtgttggggcgcgtgaccactgcttgctctgccgcaaccacaccaagggcagccactgtgagcagtgcctcccgctgtttgtgggttcagctgtcggaggcgggacctgccggccctgccacgccttttgtcgtggaaatagccacatctgcatctccaggaaggagttacaaatgtccaagggagagccaaagaagtactcactggacccagaggagattgaaaactgggtgacagagggtcctagtgaagacgaggccgtgtgcgtgaactgccagaataacagctatggggagaaatgcgagagctgcctgcagggctacttcctcctggacgggaagtgcaccaaatgccagtgtaatggccacgcggacacatgtaacgagcaggatgggacgggctgtccatgtcagaataacacagagacgggcacatgccagggcagctcccccagtgaccgtcgagactgctacaagtaccagtgcgccaagtgccgggaatcatttcacgggagtccgctgggcggccagcagtgctaccgcctcatctcggtggagcaggagtgctgcctggaccccacgtcccagaccaactgcttccatgagcccaaacgccgggcgctaggccccggccgcactgtcctctttggcgtgcagcccaaattcaccaacgtggacatccgcctgacgctggacgtgaccttcggggccgtggacctctatgtctccacctcctatgacaccttcgtggtccgtgtggcccctgacactggcgtccatactgtacacatccagccacccccagccccaccacctccaccaccccctgcagatggtgggccccggggggctggggatccaggaggagcaggggccagcagtgggccgggcgccccagcagagccacgggtacgggaggtatggccgcggggcctgattacctacgtgacggtgacggagccgtcggcagtgctggtggtccgcggcgtgcgggaccggctggtcatcacctacccacacgagcaccatgccctcaagtcgagccgcttctacctgctgctgctgggcgtgggagacccaagtgggcccggcgccaacggctcagccgactcgcagggcctgctcttcttccggcaggaccaggcccacattgacctgtttgtcttcttctccgtcttcttctcctgcttcttcctcttcctctcactctgtgtgctcctctggaaggccaagcaggctctggaccagcggcaggagcagcgccggcacttgcaggagatgaccaagatggccagccgccccttcgccaaggtcaccgtctgcttcccacctgaccctactgccccggcctccgcctggaagccggctgggctcccacctcccgccttccgccgctctgagcccttcctggcacccctgctgctgacaggggccggtgggccctggggacccatgggagggggctgctgcccaccagccatccccgccaccactgctgggctgcgagctgggcccatcactctcgagcccacagaagatggcatggctggcgtggccacactgctgctccagctgcctggcgggccccatgcacccaacggcgcctgcctggggtcagccctcgtcacactgcggcacaggctgcacgagtactgtgggggtggtgggggtgctgggggcagtgggcatgggactggtgcgggccggaagggactgttgagccaggacaacctcaccagcatgtccctctgacatgcccagggttctcatccacagcagctgggtcacctgatagggccgccctggacttggggtccctccacctgggggcccctggacactgtctacttggagaccactggcccccttcccccagggttgcccagatggggcctcctttgttctgcattcagcagctatttatcgagtacctactctgtcaggcactgtcataggcgtggggcaaagcaggaaccaagagacgaggttccctgatctcatgggacttaggttctggtgaagggagacaatcagtgcacatgcacacaccccacacgcatacacacatgaacacatgcacatgtgcacacacaagtaagatggcttcagagagggagaagcactgtgaggcctccagaggatgtggcagtgagggacgatggggtgaagtcagctgggcattcaaagaagctagactgagaacgcctgagaagaaccagctacgggaagagctttgggaagcaaaggcagaggccctggggtgggagcaggcttgttttattggaaggaccagaaaactggtaagtgtgacccagatcaagtgtgaggagatgaggctggggatagtcaggggctggatcacccagggccttgtgggccccacatagggttttgggttttattctcagggcaatgggaagctgttggatggtttgatgaaggggagtgacaggatccgatgtacctatttaagaatttaagagggtcgggtgcggtggctcatgcctataatcctagcactttgagaggccaaggtgggctgatcacaaggtcaagagttcgtgaccagcctggccaatatggtgaaaccccatgtctactaaaaatacaaaaattagctgggcatggtggcacacacttgtagtccgagctactcgggaggctgaggcagaagaatcgcttgaacccaggaggcggaggttgcagtgagctcagattgcgtcactgcactccaacctgggtgacagagcgagactccacctc

SEQ ID NO: 18734 - DNA, 10966 bp, Homo sapiens
  source 1..10966: mol_type = unassigned DNA
ggccgctctggcccaagcgtcccctcgtctctctgatctggcccatccggcttcggagggaggcgagggtgggtgagcaaagggattgggtctgtggggtccaggcccgaacccctgaagacgggctccgcccccggcacccgctcgcgccccgcccccggctggaggagtctctcctggaccatccgaacctagcctgtcccggcccgcagcctctatggaggctcctgccgggccgtagagcccttcgccccctggggacccacccgtctataaggtccgtttggcctgcagcagcctgagtccgtaatgctgggcactgttcatgggatcggccccctatggagccctgtgtctataggggactcctacggtccctagggttcggccccgtccataatgactccatatacagggccttccatcgctctatagggctcagccctcggcttccagagcctgtcagcagtggccgtacccttcgccgggactgccgggtctccgggacctcttcgatctacaaggtcatgttatgcctatagaggtcgcatttgcagggcctcaccccgggtagagggtcctctccaggtttttacggcctgtccccgctctaagggtcagtgcaggaggcggcgatggccctgggcaaggttctggccatggcactggttttggccttggccgtgctggggtcgctgtcccctggggcccgggcgggggactgcaaggggcagcggcaggtgctgcgggaggcgccaggcttcgtgacggatggtgcgggcaactacagcgtcaatggcaactgcgagtggctcatcgaggccccaagcccccagcaccggatcctgctggacttccttttcctggacacagagtgcacgtatgactacctgttcgtgtatgacggtgactccccgcgagggccgctgcttgccagtctaagtgggagcacccgacctccgcccatcgaagcttcctcaggcaagatgctgctgcacctcttcagtgatgccaactacaacctgctgggctttaacgcctcattccgcttctccctgtgcccgggtggctgccagagccacgggcagtgccagccaccgggtgtgtgtgcctgcgagccgggctgggggggtcctgactgtggcctgcaggagtgctcagcctactgtggcagccacggcacctgcgcctcgcccctgggaccatgccgctgtgagcctggcttcttgggacgtgcctgtgacctgcacctgtgggagaaccagggggctgggtggtggcacaacgtgagtgccagggaccctgccttctctgcccgtattggggcagctggcgccttcctgtccccaccagggctgctggcagttttcggaggccaggacctcaacaatgccctgggtgacctcgtcctatacaacttctccgccaacacctgggagtcttgggacctgagtcctgccccggctgcccgtcactcccatgtggccgtggcctgggccggctccctggtactgatgggtggtgagctggctgacggctcgctcaccaacgacgtgtgggccttcagtccactgggcaggggccactgggagctcctggcaccacctgcctccagctcctcggggcccccaggcctggcaggtcacgcggctgccctggtggatgatgtctggctatatgtgtctggaggccgcaccccgcacgacctcttctcctctggcctcttccgtttccgccttgacagcaccagcgggggctattgggagcaggtgattccggcaggcggacggccccctgctgccactggccactccatggtgttccatgccccctcccgtgccctgctggtccatggtggacaccggccctccactgcccggttctctgtgcgagtgaactccactgagcttttccacgtggatcggcatgtgtggacgacgctgaaggggcgggatgggcttcagggcccaagggagcgagccttccacacagccagtgttctgggcaattacatggtggtctatgggggcaatgtgcacacccattaccaggaggaaaagtgctacgaagatggcatcttcttctaccaccttggctgccatcaatgggtgtcaggagctgagcttgccccgccaggaacccctgagggccgagcagcgcctcccagtggtcggtactcacatgtagctgcggtgcttggtggcagcgtcctgttggtggctggggggtacagcggccggccccgtggggacttgatggcgtacaaggtgcccccctttgtgttccaggcacctgcccctgactaccacttggactactgctccatgtacacagaccacagcgtctgctcccgggacccggaatgcagttggtgccaaggagcctgccaagctgcaccccctcctgggacccccttgggggcttgtccagccgccagctgcctgggcctgggccgcctcctgggtgactgccaggcctgcctggccttcagcagccccacagcccctccacggggacctggcaccctgggctggtgcgtgcacaatgagagctgcctccctaggcctgagcaggcccgctgccgaggggagcagatctcaggcactgtgggctggtgggggcctgcgcctgtcttcgtcacgtccctggaggcctgcgtcacccagagcttcctgcctggcctgcacttgctcacctttcagcagccgcccaatacctcccagcctgacaaggaggaggtggggcgctgggtggctcatcaggagaaggagacgcggcggctgcagcgccctgggtctgctcgcctcttccctctgcctgggcgggaccacaagtatgcagtagagatccagggccagctcaatggctcggcaggccctgggcacagcgagctaactctgctgtgggatcggactggtgtgccaggaggcagcgagatctccttcttcttcctggagccctaccgctcgtcgtcctgcacctcctattcttcctgcctgggctgcttggcagaccagggctgtggctggtgcctgaccagtgccacctgccacctgcgccagggcggagcccattgcggggatgacggggctggtgggtccctgctggtgctggtgcctaccctctgcccactctgcgaggagcatcgggactgccacgcctgcacccaggaccccttctgtgagtggcatcagagcaccagccgcaaaggggacgcggcatgcagccggcggggccggggtcggggtgccctgaagagtccagaggagtgtcccccgctctgcagccagcgactgacctgtgaggactgcctggccaactctagccagtgcgcctggtgccagtccacccacacctgcttcctgtttgctgcctacttggcccggtacccacacgggggctgtcgaggctgggacgacagtgtacactcggagccacggtgccggagctgcgatggcttcctgacctgccatgagtgtctgcagagccacgagtgtggctggtgtggcaatgaggacaaccccacactgggacggtgcctacagggggacttctcagggcccctcggtgggggtaactgctccctgtgggtgggggagggcctggggcttcccgtggccctccctgcccgctgggcatacgcccgctgtcctgacgtggatgagtgtcgcctgggcctggcccggtgccacccgcgggcgacctgcctgaacacgcccctcagctacgagtgtcactgccagcggggctaccagggtgatggcatctcacactgcaaccgcacgtgcttggaggactgtggccatggtgtgtgcagtggccccccggactttacctgcgtgtgtgacctaggctggacatcagacctgccccctcccacacccgccccgggtccgccagccccccgctgctcccgggactgtggctgcagcttccacagccactgccgcaagcggggccctggcttctgcgacgagtgccaggactggacatggggggagcactgcgaacgatgccggcccggcagcttcggcaacgccacaggctctaggggctgccggccctgccagtgcaacgggcacggggacccacgccgtggccactgcgacaacctcagtgggctctgcttctgccaggaccacaccgagggtgcccactgccagctctgctccccaggctattatggggatccccgggccggtggttcctgctttcgggagtgtgggggtcgcgccctcctcaccaacgtgtcctcagtggcactgggctcacgccgggtcggggggctgctgcctccaggtggcggggctgcaagagccgggcctggcctgtcctactgtgtgtgggttgtctcggccactgaggagctacagccctgtgctcccgggaccctctgtcccccactcaccctcaccttctcccccgacagcagcaccccctgcacgctgagctacgtcctggcgtttgatggattcccacgcttcctggacactggtgttgtccagtcggaccgcagcctcatagctgccttctgcggccagcgacgggacaggcccctcactgttcaggccctgtctgggctgctcgtgctgcactgggaggccaatggctcctcatcctggggcttcaatgcttcggtgggctctgcccgctgtgggtcagggggccccgggagctgtcccgtcccccaggaatgcgtgccccaggacggtgctgcaggtgcggggctctgccgatgtcctcagggctgggctggcccacactgccgcatggctctgtgtcctgagaactgcaatgcccacactggggcaggaacttgtaaccagagcctgggtgtgtgcatctgtgccgagggcttcgggggccccgactgcgccaccaagctggatggcgggcagctggtctgggagaccctcatggacagccgcctctcagccgacactgccagccgcttcctgcaccgcctgggccacaccatggtggatggacccgatgccaccttgtggatgtttgggggcctgggcctgccccaggggctgctgggaaacctgtacaggtactcagtgagtgagcggcggtggacacagatgctggcgggagccgaggacgggggcccaggcccatcgccccgctccttccatgcagccgcatatgtgcccgctggccgtggtgccatgtatctgctggggggacttaccgctggaggcgtcacccgtgatttctgggtcctcaacctcaccaccctgcaatggcggcaggagaaggccccccagaccgtggagctgccagccgttgctggtcacacccttactgcccgccgaggcctgtctctgctcctggtgggcggttactccccggaaaatggcttcaaccagcagctgctggagtaccagctggcaaccggcacctgggtgtcaggagcccagagtgggacaccccccacaggtctctatggtcactctgctgtctaccacgaggccaccgactccctctacgtgtttggggggttccgattccatgtggagctggcggccccatcccccgagctctactccctgcactgtcctgaccgcacctggagtctgctggccccttctcagggggcaaagcgagatcgtatgaggaatgtgcgtggctcatctcggggtctgggccaagttcctggggagcagcctgggtcatgggggttccgggaagtcaggaagaagatggctctgtgggctgctcttgctggtacaggaggtttcctggaggaaatctcacctcacctgaaggagccccgcccccggcttttccacgcctcagccctgttaggggacaccatggtggttcttggggggcgctcggaccctgacgagttcagcagcgacgttctgctctaccaggtcaactgcaatgcctggcttctgcccgacctcacccgctcggcctctgtggggcccccaatggaggagtctgtggcccatgctgtggcagcagtcgggagccgcctgtatatctctgggggtttcgggggagtggccctgggccgcctgctggcactgaccctgccccctgacccctgccgcctgctgtcctcacctgaagcttgtaaccagtctggggcctgcacctggtgccatggggcctgcttgtccggggatcaggcccacaggctgggctgcgggggctccccctgctccccaatgcctcgctccccggaggaatgtcgacgtctccggacctgcagtgagtgcctggcccgccatcctcggaccctgcaacctggagatggagaggcgtccaccccccgctgtaagtggtgtaccaactgccccgaaggtgcttgcattggacgcaatgggtcctgcacctctgagaatgactgtcggatcaaccagcgagaggtcttctgggcagggaactgctccgaggctgcgtgcggggctgctgactgcgagcagtgcacgcgggagggcaagtgcatgtggacgcggcagttcaagaggacaggggagacccgccgcatcctctccgtgcagcccacctatgactggacgtgcttcagccactctctgctgaatgtgtcccccatgccggtggaatcatcacccccactgccctgccccaccccttgtcacctcctacccaactgtacctcctgcctggactctaagggagcagatgggggctggcagcactgtgtttggagcagcagcctgcagcagtgtctgagcccttcctacctgcccctgcgatgtatggccggaggctgtgggcggctgctccggggacctgagagctgctccctgggctgtgctcaggcaactcagtgcgccttgtgcctgcggcgcccccattgcggctggtgtgcctgggggggccaggatgggggtggccgctgcatggagggtggactcagcggcccccgtgatgggctgacatgtgggcgtccgggggcctcctgggccttcctgtcctgcccccctgaggacgagtgtgcaaacgggcaccacgactgcaacgagacgcagaattgccacgaccagccccacggctatgagtgcagctgcaagaccggctataccatggacaacatgacagggctgtgccgccctgtgtgcgcccagggctgcgtgaacggctcatgtgtggagcccgaccactgccgctgccactttggctttgtgggccgcaactgctccacggaatgccgctgcaaccgccacagtgaatgcgctggtgttggggcgcgtgaccactgcttgctctgccgcaaccacaccaagggcagccactgtgagcagtgcctcccgctgtttgtgggttcagctgtcggaggcgggacctgccggccctgccacgccttttgtcgtggaaatagccacatctgcatctccaggaaggagttacaaatgtccaagggagagccaaagaagtactcactggacccagaggagattgaaaactgggtgacagagggtcctagtgaagacgaggccgtgtgcgtgaactgccagaataacagctatggggagaaatgcgagagctgcctgcagggctacttcctcctggacgggaagtgcaccaaatgccagtgtaatggccacgcggacacatgtaacgagcaggatgggacgggctgtccatgtcagaataacacagagacgggcacatgccagggcagctcccccagtgaccgtcgagactgctacaagtaccagtgcgccaagtgccgggaatcatttcacgggagtccgctgggcggccagcagtgctaccgcctcatctcggtggagcaggagtgctgcctggaccccacgtcccagaccaactgcttccatgagcccaaacgccgggcgctaggccccggccgcactgtcctctttggcgtgcagcccaaattcaccaacgtggacatccgcctgacgctggacgtgaccttcggggccgtggacctctatgtctccacctcctatgacaccttcgtggtccgtgtggcccctgacactggcgtccatactgtacacatccagccacccccagccccaccacctccaccaccccctgcagatggtgggccccggggggctggggatccaggaggagcaggggccagcagtgggccgggcgccccagcagagccacgggtacgggaggtatggccgcggggcctgattacctacgtgacggtgacggagccgtcggcagtgctggtggtccgcggcgtgcgggaccggctggtcatcacctacccacacgagcaccatgccctcaagtcgagccgcttctacctgctgctgctgggcgtgggagacccaagtgggcccggcgccaacggctcagccgactcgcagggcctgctcttcttccggcaggaccaggcccacattgacctgtttgtcttcttctccgtcttcttctcctgcttcttcctcttcctctcactctgtgtgctcctctggaaggccaagcaggctctggaccagcggcaggagcagcgccggcacttgcaggagatgaccaagatggccagccgccccttcgccaaggtcaccgtctgcttcccacctgaccctactgccccggcctccgcctggaagccggctgggctcccacctcccgccttccgccgctctgagcccttcctggcacccctgctgctgacaggggccggtgggccctggggacccatgggagggggctgctgcccaccagccatccccgccaccactgctgggctgcgagctgggcccatcactctcgagcccacagaagatggcatggctggcgtggccacactgctgctccagctgcctggcgggccccatgcacccaacggcgcctgcctggggtcagccctcgtcacactgcggcacaggctgcacgagtactgtgggggtggtgggggtgctgggggcagtgggcatgggactggtgcgggccggaagggactgttgagccaggacaacctcaccagcatgtccctctgacatgcccagggttctcatccacagcagctgggtcacctgatagggccgccctggacttggggtccctccacctgggggcccctggacactgtctacttggagaccactggcccccttcccccagggttgcccagatggggcctcctttgttctgcattcagcagctatttatcgagtacctactctgtcaggcactgtcataggcgtggggcaaagcaggaaccaagagacgaggttccctgatctcatgggacttaggttctggtgaagggagacaatcagtgcacatgcacacaccccacacgcatacacacatgaacacatgcacatgtgcacacacaagtaagatggcttcagagagggagaagcactgtgaggcctccagaggatgtggcagtgagggacgatggggtgaagtcagctgggcattcaaagaagctagactgagaacgcctgagaagaaccagctacgggaagagctttgggaagcaaaggcagaggccctggggtgggagcaggcttgttttattggaaggaccagaaaactggtaagtgtgacccagatcaagtgtgaggagatgaggctggggatagtcaggggctggatcacccagggccttgtgggccccacatagggttttgggttttattctcagggcaatgggaagctgttggatggtttgatgaaggggagtgacaggatccgatgtacctatttaagaatttaagagggtcgggtgcggtggctcatgcctataatcctagcactttgagaggccaaggtgggctgatcacaaggtcaagagttcgtgaccagcctggccaatatggtgaaaccccatgtctactaaaaatacaaaaattagctgggcatggtggcacacacttgtagtccgagctactcgggaggctgaggcagaagaatcgcttgaacccaggaggcggaggttgcagtgagctcagattgcgtcactgcactccaacctgggtgacagagcgagactccacctcaaaaaaaaaaaaaaaatttaagaggtcactcagttgtgctgtggagaatggaccggagggacaagaggggcagcagggatggtgggctggagtagggtgctggcaatgagggagtctggctcagatgtgggatgtgtatggaagaatataaatgatggtgtggatgtcagggtgagggaggagacaaaaccacgatgacccctagctttgtggcctgaactgtgggtggctgaggggatcgttaattgaatggggcagactgaggcttgtgaggaagatcagagtctggttcttgacatgagatgcccttcagacatctcttcactcaggtccaactagggatacagaaacactgaatatttcaacagcagaaattgaatggggggattgatagcgctggcgagggaagcagctggaaagagacagatggcaccctgagacagcccagaggtgaataggacccccaggctgcagggataaagctcagtggtggtgttacctcaccggggaccagggtcacacagcaaagctggaacaacagaggcgtgttgtgggggagcctcagaggggacaaaacctctgcctgagatcccaccccaggtgggcatgggggccactgaggttggggatgaaaatgccggtaccgtcagtgcacagccctgttccagacagtgctgcctggaagatttctgggctctcctgaggcgccaccccgcacctgagccacctccttggactcctgtcctctaccccttgaggacctccctcccttctaccctagctgtcttcttgaacttgggactctcctttcccaagacttccatcactagctcctggagggactggactttgcatcttcccttcgcgtggagcctcagtgtgagaggccctagccaatgcgtgcatgtcagaggtggtggggaccacatcagaagaagaggggggtgatgaaattaacaaataaaaagtatggggaaaaccca

SEQ ID NO: 18735 - DNA, 2675 bp, Homo sapiens
  source 1..2675: mol_type = unassigned DNA
aactgctccacggaatgccgctgcaaccgccacagtgaatgcgctggtgttggggcgcgtgaccactgcttgctctgccgcaaccacaccaagggcagccactgtgagcagtgcctcccgctgtttgtgggttcagctgtcggaggcgggacctgccggccctgccacgccttttgtcgtggaaatagccacatctgcatctccaggaaggagttacaaatgtccaagggagagccaaagaagtactcactggacccagaggagattgaaaactgggtgacagagggtcctagtgaagacgaggccgtgtgcgtgaactgccagaataacagctatggggagaaatgcgagagctgcctgcagggctacttcctcctggacgggaagtgcaccaatgcgccaagtgccgggaatcatttcacgggagtccgctgggcggccagcagtgctaccgcctcatctcggtggagcaggagtgctgcctggaccccacgtcccagaccaactgcttccatgagcccaaacgccgggcgctaggccccggccgcactgtcctctttggcgtgcagcccaaattcaccaacgtggacatccgcctgacgctggacgtgaccttcggggccgtggacctctatgtctccacctcctatgacaccttcgtggtccgtgtggcccctgacactggcgtccatactgtacacatccagccacccccagccccaccacctccaccaccccctgcagatggtgggccccggggggctggggatccaggaggagcaggggccagcagtgggccgggcgccccagcagagccacgggtacgggaggtatggccgcggggcctgattacctacgtgacggtgacggagccgtcggcagtgctggtggtccgcggcgtgcgggaccggctggtcatcacctacccacacgagcaccatgccctcaagtcgagccgcttctacctgctgctgctgggcgtgggagacccaagtgggcccggcgccaacggctcagccgactcgcagggcctgctcttcttccggcaggaccaggcccacattgacctgtttgtcttcttctccgtcttcttctcctgcttcttcctcttcctctcactctgtgtgctcctctggaaggccaagcaggctctggaccagcggcaggagcagcgccggcacttgcaggagatgaccaagatggccagccgccccttcgccaaggtcaccgtctgcttcccacctgaccctactgccccggcctccgcctggaagccggctgggctcccacctcccgccttccgccgctctgagcccttcctggcacccctgctgctgacaggggccggtgggccctggggacccatgggagggggctgctgcccaccagccatccccgccaccactgctgggctgcgagctgggcccatcactctcgagcccacagaagatggcatggctggcgtggccacactgctgctccagctgcctggcgggccccatgcacccaacggcgcctgcctggggtcagccctcgtcacactgcggcacaggctgcacgagtactgtgggggtggtgggggtgctgggggcagtgggcatgggactggtgcgggccggaagggactgttgagccaggacaacctcaccagcatgtccctctgacatgcccagggttctcatccacagcagctgggtcacctgatagggccgccctggacttggggtccctccacctgggggcccctggacactgtctacttggagaccactggcccccttcccccagggttgcccagatggggcctcctttgttctgcattcagcagctatttatcgagtacctactctgtcaggcactgtcataggcgtggggcaaagcaggaaccaagagacgaggttccctgatctcatgggacttaggttctggtgaagggagacaatcagtgcacatgcacacaccccacacgcatacacacatgaacacatgcacatgtgcacacacaagtaagatggcttcagagagggagaagcactgtgaggcctccagaggatgtggcagtgagggacgatggggtgaagtcagctgggcattcaaagaagctagactgagaacgcctgagaagaaccagctacgggaagagctttgggaagcaaaggcagaggccctggggtgggagcaggcttgttttattggaaggaccagaaaactggtaagtgtgacccagatcaagtgtgaggagatgaggctggggatagtcaggggctggatcacccagggccttgtgggccccacatagggttttgggttttattctcagggcaatgggaagctgttggatggtttgatgaaggggagtgacaggatccgatgtacctatttaagaatttaagagggtcgggtgcggtggctcatgcctataatcctagcactttgagaggccaaggtgggctgatcacaaggtcaagagttcgtgaccagcctggccaatatggtgaaaccccatgtctactaaaaatacaaaaattagctgggcatggtggcacacacttgtagtccgagctactcgggaggctgaggcagaagaatcgcttgaacccaggaggcggaggttgcagtgagctcagattgcgtcactgcactccaacctgggtgacagagcgagactccacctc

SEQ ID NO: 18736 - DNA, 6298 bp, Homo sapiens
  source 1..6298: mol_type = unassigned DNA
agagggaggtggcgatggtgcgcccggtggcggtggcggcggcggttgcggaggcttccttggtcggattgcaacgaggagaagatgactgaccaaccgactggctgaatgaatgaatggcggagccgagcgcgccatgaggagcctgccgagcctgggcggcctcgccctgttgtgctgcgccgccgccgccgccgccgccgccgtcgcctcagccgcctcggcggggaatgtcaccggtggcggcggggccgcggggcaggtggacgcgtcgccgggccccgggttgcggggcgagcccagccaccccttccctagggcgacggctcccacggcccaggccccgaggaccgggcccccgcgcgccaccgtccaccgacccctggctgcgacttctccagcccagtccccggagaccacccctctttgggcgactgctggaccctcttccaccacctttcaggcgccgctcggcccctcgccgaccacccctccggcggcggaacgcacttcgaccacctctcaggcgccgaccagacccgcgccgaccaccctttcgacgaccactggcccggcgccgaccacccctgtagcgaccaccgtaccggcgcccacgactccccggaccccgacccccgatctccccagcagcagcaacagcagcgtcctccccaccccacctgccaccgaggccccctcttcgcctcctccagagtatgtatgtaactgctctgtggttggaagcctgaatgtgaatcgctgcaaccagaccacagggcagtgtgagtgtcggccaggttatcaggggcttcactgtgaaacctgcaaagagggcttttacctaaattacacttctgggctctgtcagccatgtgactgtagtccacatggagctctcagcataccgtgcaacagttctgggaaatgccagtgcaaagtgggtgtcattggctctatatgtgaccgatgccaagatggatattatggctttagtaagaatggctgcttgccctgccaatgcaataatcggtctgccagttgcgatgccctcacaggtgcttgtttaaactgccaggaaaatagcaaaggaaatcactgtgaagaatgtaaagaaggattttatcagagtcctgatgccactaaagaatgtcttcgctgcccttgttcagcagtgacatctacaggcagctgctctataaaatcgagtgaattggaacctgaatgtgaccagtgtaaagatggttacataggcccgaactgcaataaatgtgaaaatggctattacaattttgacagcatctgtagaaagtgccaatgtcacggccatgtggacccagttaaaactccaaagatttgtaagcccgagagtggtgagtgcatcaactgcctccataacaccactgggttttggtgtgagaactgcctagaaggttatgttcacgacctcgagggaaattgcatcaagaaagaagttattcttccaacacctgaaggttctaccattttggtttccaatgcctctttgaccacatcagtgcccacccctgttataaatagtacttttacccctacaaccctgcagactatcttttcagtaagcacttctgaaaacagcacttcagctttagctgatgtatcatggacccaatttaacatcatcattttgacagtcatcatcattgttgtggtgctgctaatgggatttgtgggggctgtatatatgtaccgcgagtaccaaaaccggaaactcaatgcccccttttggaccatcgagctgaaagaagacaatatcagtttcagcagctaccatgacagcattcccaatgcagatgtttcgggattgttggaagatgatggcaatgaagtggctcccaatgggcagctgaccctgacgacgcccatacataactacaaagcctaaggagctagaactgttctgaattgttaaaccacagtgcttgctaagacagagtcagcccctgggccagacaaagcctggctagagtttgctgagaaagcaaaggcaaatagtgcatctgaaattttcaggtacaaatttgtaatgcgcttagcctatctattgctcttagttttcccatgaagatctgaagcgttcactgtcattaggacttgaagtaaagtatatttttgtaccaaaccacatgggagtatggaaaggctgaaccccatagtgcagcccaaaaccactttgacctccagatagactcctggggaagcattcaccaagccagtggtaacaagatgatgaatgtggagggggaaaagactgctggaagacttcatctccattcctgaaacattttttttaaaacagtgtcagggattatattcgttttactatacaaaaggacatcattgaggaaaagcttgtttctaggctgtatcacagtaaataatcttgattgtttctagaacaggggtagaaaagtcccaagatcttcagaagggcttggttttttcctcccaggattcttgctcagtgatgagttgaaagcacaggataagcttctaagggaggaaggcagcattggggagcaggaggctgatggtcctcctcagggtctcagtgtaaatgataaattgtctaaaaataaggaatattcctgcctctagagaaataaggtgtacatagttaatgtagcatatctggtcgacgttgtatttgtatctatttgtaaaaaaaaaatcatgtcatattttatcatctggaatttatttgtacagcagttaatggtgttgtaaaaagaaaaatatggggattgcttaaaatactgtaaaatagatggcaatattgctagagctgggactctggtgagcatccgtcatttttagtccttcttgaggacattgctgaaatttataagaggtcgaatgtttctttctttcctttctcagtctaaaagtagagttatatgctctttgacttactatgattcaagcaatagattttgaagtcagtaatcgttaagctgggacataggatgcattctccaaaaacattaatctaattagacattagccaccctatatattttacatagattaatataaaacatatcctcattaaaaaatgtttttcttgaatgtaaaagatagtcttccaaaggatagaaatattttagttccaagagaaaagccatcatattacttgggatctgtagttttcatgcctatgaaatatttataatcctccctcaccccaaataaaaaatctcctacatgtgaacatagcctgtcactcatttgccatgaggtatgtgccatctccctgcagtgctatagttctcccattgtcttcctgtctggttaatgagcagctttgtagatgggtgtgtctagttagttcttgctttttgatggagttttttcctagaggccaactactgttgctctcgtttattatgatattgacattttgggttaagcaaggtgggtgggaaaggtggtcagatgttaaatataacttattaggaggaacagtgaactgtgaagtggttagaaaaaaaataaaaacttcttattagattagacctaggaaattcaagctgacccctttgcctaacttccctagagaaaaacctagaacttggtcatccctttataggagacccctaagttgttctcagggtttggagatgatgttctggagggagtacaagcaaataatctacttctggtaatctgagggtgctttgcgtatttggccattgctcagaagaatagaggttacattatattacattatatgaaaattatttagtttttctatagccctttgtagtttgcaaagcacttttccatatgtgtgtcctctcttccacaccatagccccctgaggaagtaattgttgtccccattttatagatgaaaaggctgaggcacagaggagctaaatatcttgttcaaggctatacaatgtgtgtgattattaggcttggaatcagggcctctaactctaaagcacatgttttttcaactatatgcagaaattgcctagccatggacacaagaaagctgggaggaagagttctacttgtggatgtttttaattttttttaaatatcaggagcaatccagggccatacagctatgaagcacttagtgaaaagaacacaagaagatttactaactgaagttagtattagtgattagaaaacaaaactgccagtttgtgcttcattaaggtgaactcatctctccaagcaggaagggaaaatttgctttccctagcagttgctgcatatgtgtgtacagactgcacaattctaagaaattgtgcaaaatggcatacctgtctttctcccagatacaccgccccctgccccccccaaaaaaggtcaggattaaaggtggtgagaagtgaacatttattaaacagaagttaaaccaatagagagaaaggaggtttgttggagtctaagaggattttgaccatgtagaaattccttgaaacagaccttaaaaggtattgaaaaattgaatcacaaagaaagtttacctttaaatacttgttaatggctcctagatcatggttataatttttctcaatgggaaaaaaagtcttaaaatttgttttaaataagatcctctaatgtctcgagctttttgattctggaaataatttgctttaaaatataaatcaatcagaaagtgatctaccactgaaatcattctaggaaactagcatgggatgcactgcacaatgttctttcctctaaaggcatgggccccataaactgtggcatctggcagcaggatgccatcagtcctttagaaagcctaattttgggccgggtgcggtggctcacgcctgtaatcccagcactttgggaggccgaggcgggtggatcacaaggtcaggagttcgagaccagcctggtcaacatggcgaaatcccgtctctactaaaaacacaaaaattagccgggtgtacgtgcctgtagtctcagctacttgggaggctgaggcaggagaatcacttgaacctgggaggcagaggttacagtgagccgagatggcgccatttcactccagcctgggcgacagagcaagactctgtctcaaaaaaaaggaagaaaaagaaagcctaatattgggagaatgtttgtgtaaggattggaaatctgtttatttttaaataagatagcactgatgtgaatcttatttggaaattacagatactgccattaagcgatgcttttatcttcattaattcattttggtaagcgcctatgcatttctgatggttaggtgccctaggtagtgttaagtatgtccgtgtcctcccttactcccctctcgctccctctaccctctatcccctagggttcttttattaatggaatttctccagttatagagaaaaaaatgacatttgaaaactaaagctcatttatattaatactaaggtcctgtgggcctagtgcgttactcttcccagtgatacctagattttaagagtagagaacagaggaaacatgggatgagaggagagaggttttttagacaacatttgtagacacctcaaattatatcactgttctctagcgccaatattcccaggtaaattgaccattaaagcaatactcactgacctactagtttattttggtcagctgagtaccatcaggatatttaaccctttaagtgctgttttgggagtagaaaactaaagcaacaatacttcctcttgacagctttgattggaatggggttattagatcattcaccttggtcctacactttttaggatgcttggtgaacataacaccacttataatgaacatccctggttcctatattttgggctatgtgggtaggaattgttacttgttactgcagcagcagccctagaaagtaagcccagggcttcagatctaagttagtccaaaagctaaatgatttaaagtcaagttgtaatgctaggcataagcactctataatacattaaattataggccgagcaattagggaatgtttctgaaacattaaacttgtatttatgtcactaaaattctaacacaaacttaaaaaatgtgtctcatacatatgctgtactaggcttcatcatgcatttctaaatttgtgtatgatttgaatatatgaaagaatttatacaagagtgttatttaaaattattaaaaataaatgtatataatttgtacctattgtagatttgttgtttacttttttgtgtggtcagagttgtttcatgtcttcaaatacatgccaaggatcatttactttcagcccacttcataaaaatctttgaactctt

SEQ ID NO: 18737 - DNA, 6297 bp, Homo sapiens
  source 1..6297: mol_type = unassigned DNA
atgaggagcctgccgagcctgggcggcctcgccctgttgtgctgcgccgccgccgccgccgccgccgccgtcgcctcagccgcctcggcggggaatgtcaccggtggcggcggggccgcggggcaggtggacgcgtcgccgggccccgggttgcggggcgagcccagccaccccttccctagggcgacggctcccacggcccaggccccgaggaccgggcccccgcgcgccaccgtccaccgacccctggctgcgacttctccagcccagtccccggagaccacccctctttgggcgactgctggaccctcttccaccacctttcaggcgccgctcggcccctcgccgaccacccctccggcggcggaacgcacttcgaccacctctcaggcgccgaccagacccgcgccgaccaccctttcgacgaccactggcccggcgccgaccacccctgtagcgaccaccgtaccggcgcccacgactccccggaccccgacccccgatctccccagcagcagcaacagcagcgtcctccccaccccacctgccaccgaggccccctcttcgcctcctccagggcatcagtggcctgtggcaaagatgccccaaaagtatctaggaaaatatgcctgtgagagtaacctgaaaagcaagtacttgcctcttacacagccagtcatgaatcttagagtctcagaagctgttaaaacggagtatgtatgtaactgctctgtggttggaagcctgaatgtgaatcgctgcaaccagaccacagggcagtgtgagtgtcggccaggttatcaggggcttcactgtgaaacctgcaaagagggcttttacctaaattacacttctgggctctgtcagccatgtgactgtagtccacatggagctctcagcataccgtgcaacagttctgggaaatgccagtgcaaagtgggtgtcattggctctatatgtgaccgatgccaagatggatattatggctttagtaagaatggctgcttgccctgccaatgcaataatcggtctgccagttgcgatgccctcacaggtgcttgtttaaactgccaggaaaatagcaaaggaaatcactgtgaagaatgtaaagaaggattttatcagagtcctgatgccactaaagaatgtcttcgctgcccttgttcagcagtgacatctacaggcagctgctctataaaatcgagtgaattggaacctgaatgtgaccagtgtaaagatggttacataggcccgaactgcaataaatgtgaaaatggctattacaattttgacagcatctgtagaaagtgccaatgtcacggccatgtggacccagttaaaactccaaagatttgtaagcccgagagtggtgagtgcatcaactgcctccataacaccactgggttttggtgtgagaactgcctagaaggttatgttcacgacctcgagggaaattgcatcaagaaagaagttattcttccaacacctgaaggttctaccattttggtttccaatgcctctttgaccacatcagtgcccacccctgttataaatagtacttttacccctacaaccctgcagactatcttttcagtaagcacttctgaaaacagcacttcagctttagctgatgtatcatggacccaatttaacatcatcattttgacagtcatcatcattgttgtggtgctgctaatgggatttgtgggggctgtatatatgtaccgcgagtaccaaaaccggaaactcaatgcccccttttggaccatcgagctgaaagaagacaatatcagtttcagcagctaccatgacagcattcccaatgcagatgtttcgggattgttggaagatgatggcaatgaagtggctcccaatgggcagctgaccctgacgacgcccatacataactacaaagcctaaggagctagaactgttctgaattgttaaaccacagtgcttgctaagacagagtcagcccctgggccagacaaagcctggctagagtttgctgagaaagcaaaggcaaatagtgcatctgaaattttcaggtacaaatttgtaatgcgcttagcctatctattgctcttagttttcccatgaagatctgaagcgttcactgtcattaggacttgaagtaaagtatatttttgtaccaaaccacatgggagtatggaaaggctgaaccccatagtgcagcccaaaaccactttgacctccagatagactcctggggaagcattcaccaagccagtggtaacaagatgatgaatgtggagggggaaaagactgctggaagacttcatctccattcctgaaacattttttttaaaacagtgtcagggattatattcgttttactatacaaaaggacatcattgaggaaaagcttgtttctaggctgtatcacagtaaataatcttgattgtttctagaacaggggtagaaaagtcccaagatcttcagaagggcttggttttttcctcccaggattcttgctcagtgatgagttgaaagcacaggataagcttctaagggaggaaggcagcattggggagcaggaggctgatggtcctcctcagggtctcagtgtaaatgataaattgtctaaaaataaggaatattcctgcctctagagaaataaggtgtacatagttaatgtagcatatctggtcgacgttgtatttgtatctatttgtaaaaaaaaaatcatgtcatattttatcatctggaatttatttgtacagcagttaatggtgttgtaaaaagaaaaatatggggattgcttaaaatactgtaaaatagatggcaatattgctagagctgggactctggtgagcatccgtcatttttagtccttcttgaggacattgctgaaatttataagaggtcgaatgtttctttctttcctttctcagtctaaaagtagagttatatgctctttgacttactatgattcaagcaatagattttgaagtcagtaatcgttaagctgggacataggatgcattctccaaaaacattaatctaattagacattagccaccctatatattttacatagattaatataaaacatatcctcattaaaaaatgtttttcttgaatgtaaaagatagtcttccaaaggatagaaatattttagttccaagagaaaagccatcatattacttgggatctgtagttttcatgcctatgaaatatttataatcctccctcaccccaaataaaaaatctcctacatgtgaacatagcctgtcactcatttgccatgaggtatgtgccatctccctgcagtgctatagttctcccattgtcttcctgtctggttaatgagcagctttgtagatgggtgtgtctagttagttcttgctttttgatggagttttttcctagaggccaactactgttgctctcgtttattatgatattgacattttgggttaagcaaggtgggtgggaaaggtggtcagatgttaaatataacttattaggaggaacagtgaactgtgaagtggttagaaaaaaaataaaaacttcttattagattagacctaggaaattcaagctgacccctttgcctaacttccctagagaaaaacctagaacttggtcatccctttataggagacccctaagttgttctcagggtttggagatgatgttctggagggagtacaagcaaataatctacttctggtaatctgagggtgctttgcgtatttggccattgctcagaagaatagaggttacattatattacattatatgaaaattatttagtttttctatagccctttgtagtttgcaaagcacttttccatatgtgtgtcctctcttccacaccatagccccctgaggaagtaattgttgtccccattttatagatgaaaaggctgaggcacagaggagctaaatatcttgttcaaggctatacaatgtgtgtgattattaggcttggaatcagggcctctaactctaaagcacatgttttttcaactatatgcagaaattgcctagccatggacacaagaaagctgggaggaagagttctacttgtggatgtttttaattttttttaaatatcaggagcaatccagggccatacagctatgaagcacttagtgaaaagaacacaagaagatttactaactgaagttagtattagtgattagaaaacaaaactgccagtttgtgcttcattaaggtgaactcatctctccaagcaggaagggaaaatttgctttccctagcagttgctgcatatgtgtgtacagactgcacaattctaagaaattgtgcaaaatggcatacctgtctttctcccagatacaccgccccctgccccccccaaaaaaggtcaggattaaaggtggtgagaagtgaacatttattaaacagaagttaaaccaatagagagaaaggaggtttgttggagtctaagaggattttgaccatgtagaaattccttgaaacagaccttaaaaggtattgaaaaattgaatcacaaagaaagtttacctttaaatacttgttaatggctcctagatcatggttataatttttctcaatgggaaaaaaagtcttaaaatttgttttaaataagatcctctaatgtctcgagctttttgattctggaaataatttgctttaaaatataaatcaatcagaaagtgatctaccactgaaatcattctaggaaactagcatgggatgcactgcacaatgttctttcctctaaaggcatgggccccataaactgtggcatctggcagcaggatgccatcagtcctttagaaagcctaattttgggccgggtgcggtggctcacgcctgtaatcccagcactttgggaggccgaggcgggtggatcacaaggtcaggagttcgagaccagcctggtcaacatggcgaaatcccgtctctactaaaaacacaaaaattagccgggtgtacgtgcctgtagtctcagctacttgggaggctgaggcaggagaatcacttgaacctgggaggcagaggttacagtgagccgagatggcgccatttcactccagcctgggcgacagagcaagactctgtctcaaaaaaaaggaagaaaaagaaagcctaatattgggagaatgtttgtgtaaggattggaaatctgtttatttttaaataagatagcactgatgtgaatcttatttggaaattacagatactgccattaagcgatgcttttatcttcattaattcattttggtaagcgcctatgcatttctgatggttaggtgccctaggtagtgttaagtatgtccgtgtcctcccttactcccctctcgctccctctaccctctatcccctagggttcttttattaatggaatttctccagttatagagaaaaaaatgacatttgaaaactaaagctcatttatattaatactaaggtcctgtgggcctagtgcgttactcttcccagtgatacctagattttaagagtagagaacagaggaaacatgggatgagaggagagaggttttttagacaacatttgtagacacctcaaattatatcactgttctctagcgccaatattcccaggtaaattgaccattaaagcaatactcactgacctactagtttattttggtcagctgagtaccatcaggatatttaaccctttaagtgctgttttgggagtagaaaactaaagcaacaatacttcctcttgacagctttgattggaatggggttattagatcattcaccttggtcctacactttttaggatgcttggtgaacataacaccacttataatgaacatccctggttcctatattttgggctatgtgggtaggaattgttacttgttactgcagcagcagccctagaaagtaagcccagggcttcagatctaagttagtccaaaagctaaatgatttaaagtcaagttgtaatgctaggcataagcactctataatacattaaattataggccgagcaattagggaatgtttctgaaacattaaacttgtatttatgtcactaaaattctaacacaaacttaaaaaatgtgtctcatacatatgctgtactaggcttcatcatgcatttctaaatttgtgtatgatttgaatatatgaaagaatttatacaagagtgttatttaaaattattaaaaataaatgtatataatttgtacctattgtagatttgttgtttacttttttgtgtggtcagagttgtttcatgtcttcaaatacatgccaaggatcatttactttcagcccacttcataaaaatctttgaactctt

SEQ ID NO: 18738 - DNA, 2183 bp, Homo sapiens
  source 1..2183: mol_type = unassigned DNA
atctgcagctggctcggcgcactccactgaccgtcccgacgatgctacgcgcgcccggctgcctcctccggacctccgtagcgcctgccgcggccctggctgcggcgctgctctcgtcgcttgcgcgctgctctcttctagagccgagggacccggtggcctcgtcgctcagcccctatttcggcaccaagactcgctacgaggatgtcaaccccgtgctattgtcgggccccgaggctccgtggcgggaccctgagctgctggaggggacctgcaccccggtgcagctggtcgccctcattcgccacggcacccgctaccccacggtcaaacagatccgcaagctgaggcagctgcacgggttgctgcaggcccgcgggtccagggatggcggggctagtagtaccggcagccgcgacctgggtgcagcgctggccgactggcctttgtggtacgcggactggatggacgggcagctagtagagaagggacggcaggatatgcgacagctggcgctgcgtctggcctcgctcttcccggcccttttcagccgtgagaactacggccgcctgcggctcatcaccagttccaagcaccgctgcatggatagcagcgccgccttcctgcaggggctgtggcagcactaccaccctggcttgccgccgccggacgtcgcagatatggagtttggacctccaacagttaatgataaactaatgagattttttgatcactgtgagaagtttttaactgaagtagaaaaaaatgctacagctctttatcacgtggaagccttcaaaactggaccagaaatgcagaacattttaaaaaaagttgcagctactttgcaagtgccagtaaatgatttaaatgcaggtctcagccaatttcttctccagtcatcctccagtttggtcatgcagagactcttcttccactgctttctctcatgggctacttcaaagacaaggaacccctaacagcgtacaattacaaaaaacaaatgcatcggaagttccgaagtggtctcattgtaccttatgcctcgaacctgatatttgtgctttaccactgtgaaaatgctaagactcctaaagaacaattccgagtgcagatgttattaaatgaaaaggtgttacctttggcttactcacaagaaactgtttcattttatgaagatctgaagaaccactacaaggacatccttcagagttgtcaaaccagtgaagaatgtgaattagcaagggctaacagtacatctgatgaactatgagtaactgaagaacatttttaattctttaggaatctgcaatgagtgattacatgcttgtaataggtaggcaattccttgattacaggaagcttttatattacttgagtatttctgtcttttcacagaaaaacattgggtttctctctgggtttggacatgaaatgtaagaaaagatttttcactggagcagctctcttaaggagaaacaaatctatttagagaaacagctggccctgcaaatgtttacagaaatgaaattcttcctacttatataagaaatctcacactgagatagaattgtgatttcataataacacttgaaaagtgctggagtaacaaaatatctcagttggaccatccttaacttgattgaactgtctaggaactttacagattgttctgcagttctctcttcttttcctcaggtaggacagctctagcattttcttaatcaggaatattgtggtaagctgggagtatcactctggaagaaagtaacatctccagatgagaatttgaaacaagaaacagagtgttgtaaaaggacaccttcactgaagcaagtcggaaagtacaatgaaaataaatatttttggtatttatttatgaaatatttgaacattttttcaataattcctttttacttctaggaagtctcaaaagaccatcttaaattattatatgtttggacaattagcaacaagtcagatagttagaatcgaagtttttcaaatccattgcttagctaactttttcattctgtcacttggcttcgatttttatattttcctattatatgaaatgtatcttttggttgtttgatttttctttctttctttgtaaatagttctgagttctgtcaaatgccgtgaaagtatttgctataataaagaaaattcttgtgacttta

SEQ ID NO: 18739 - DNA, 2415 bp, Homo sapiens
  source 1..2415: mol_type = unassigned DNA
atctgcagctggctcggcgcactccactgaccgtcccgacgatgctacgcgcgcccggctgcctcctccggacctccgtagcgcctgccgcggccctggctgcggcgctgctctcgtcgcttgcgcgctgctctcttctagagccgagggacccggtggcctcgtcgctcagcccctatttcggcaccaagactcgctacgaggatgtcaaccccgtgctattgtcgggccccgaggctccgtggcgggaccctgagctgctggaggggacctgcaccccggtgcagctggtcgccctcattcgccacggcacccgctaccccacggtcaaacagatccgcaagctgaggcagctgcacgggttgctgcaggcccgcgggtccagggatggcggggctagtagtaccggcagccgcgacctgggtgcagcgctggccgactggcctttgtggtacgcggactggatggacgggcagctagtagagaagggacggcaggatatgcgacagctggcgctgcgtctggcctcgctcttcccggcccttttcagccgtgagaactacggccgcctgcggctcatcaccagttccaagcaccgctgcatggatagcagcgccgccttcctgcaggggctgtggcagcactaccaccctggcttgccgccgccggacgtcgcagatatggagtttggacctccaacagttaatgataaactaatgagattttttgatcactgtgagaagtttttaactgaagtagaaaaaaatgctacagctctttatcacgtggaagccttcaaaactggaccagaaatgcagaacattttaaaaaaagttgcagctactttgcaagtgccagtaaatgatttaaatgcagatttaattcaagtagcctttttcacctgttcatttgacctggcaattaaaggtgttaaatctccttggtgtgatgtttttgacatagatgatgcaaaggtattagaatatttaaatgatctgaaacaatattggaaaagaggatatgggtatactattaacagtcgatccagctgcaccttgtttcaggatatctttcagcacttggacaaagcagttgaacagaaacaaaggtctcagccaatttcttctccagtcatcctccagtttggtcatgcagagactcttcttccactgctttctctcatgggctacttcaaagacaaggaacccctaacagcgtacaattacaaaaaacaaatgcatcggaagttccgaagtggtctcattgtaccttatgcctcgaacctgatatttgtgctttaccactgtgaaaatgctaagactcctaaagaacaattccgagtgcagatgttattaaatgaaaaggtgttacctttggcttactcacaagaaactgtttcattttatgaagatctgaagaaccactacaaggacatccttcagagttgtcaaaccagtgaagaatgtgaattagcaagggctaacagtacatctgatgaactatgagtaactgaagaacatttttaattctttaggaatctgcaatgagtgattacatgcttgtaataggtaggcaattccttgattacaggaagcttttatattacttgagtatttctgtcttttcacagaaaaacattgggtttctctctgggtttggacatgaaatgtaagaaaagatttttcactggagcagctctcttaaggagaaacaaatctatttagagaaacagctggccctgcaaatgtttacagaaatgaaattcttcctacttatataagaaatctcacactgagatagaattgtgatttcataataacacttgaaaagtgctggagtaacaaaatatctcagttggaccatccttaacttgattgaactgtctaggaactttacagattgttctgcagttctctcttcttttcctcaggtaggacagctctagcattttcttaatcaggaatattgtggtaagctgggagtatcactctggaagaaagtaacatctccagatgagaatttgaaacaagaaacagagtgttgtaaaaggacaccttcactgaagcaagtcggaaagtacaatgaaaataaatatttttggtatttatttatgaaatatttgaacattttttcaataattcctttttacttctaggaagtctcaaaagaccatcttaaattattatatgtttggacaattagcaacaagtcagatagttagaatcgaagtttttcaaatccattgcttagctaactttttcattctgtcacttggcttcgatttttatattttcctattatatgaaatgtatcttttggttgtttgatttttctttctttctttgtaaatagttctgagttctgtcaaatgccgtgaaagtatttgctataataaagaaaattcttgtgacttta

SEQ ID NO: 18740 - DNA, 2215 bp, Homo sapiens
  source 1..2215: mol_type = unassigned DNA
gcgttttgtgctgctgtcagtagtttttgtccaaagcagaatctttgtaaagtaatacagagttgggaaggttaattgagaaaataaaatactctgtttagactttggcttagagtgaaaaaatagattccatatgttgaattctctctcaccttgtaagtagaaactttgctgatttttagtttgctttctaaagttttccgtgcctgacagaaacagtacttattaatgtatgatgcaatttcattgcgtagcatctctacaacacatttaatcttcaatctctatttctttagccttttctagctattctcatgcgttacagccattataaatggggaataattttaccccaagagtttcctgaccaatatgtgcttatttcagctgtgcggattagtaagatatatggagtttggacctccaacagttaatgataaactaatgagattttttgatcactgtgagaagtttttaactgaagtagaaaaaaatgctacagctctttatcacgtggaagccttcaaaactggaccagaaatgcagaacattttaaaaaaagttgcagctactttgcaagtgccagtaaatgatttaaatgcagatttaattcaagtagcctttttcacctgttcatttgacctggcaattaaaggtgttaaatctccttggtgtgatgtttttgacatagatgatgcaaaggtattagaatatttaaatgatctgaaacaatattggaaaagaggatatgggtatactattaacagtcgatccagctgcaccttgtttcaggatatctttcagcacttggacaaagcagttgaacagaaacaaaggtctcagccaatttcttctccagtcatcctccagtttggtcatgcagagactcttcttccactgctttctctcatgggctacttcaaagacaaggaacccctaacagcgtacaattacaaaaaacaaatgcatcggaagttccgaagtggtctcattgtaccttatgcctcgaacctgatatttgtgctttaccactgtgaaaatgctaagactcctaaagaacaattccgagtgcagatgttattaaatgaaaaggtgttacctttggcttactcacaagaaactgtttcattttatgaagatctgaagaaccactacaaggacatccttcagagttgtcaaaccagtgaagaatgtgaattagcaagggctaacagtacatctgatgaactatgagtaactgaagaacatttttaattctttaggaatctgcaatgagtgattacatgcttgtaataggtaggcaattccttgattacaggaagcttttatattacttgagtatttctgtcttttcacagaaaaacattgggtttctctctgggtttggacatgaaatgtaagaaaagatttttcactggagcagctctcttaaggagaaacaaatctatttagagaaacagctggccctgcaaatgtttacagaaatgaaattcttcctacttatataagaaatctcacactgagatagaattgtgatttcataataacacttgaaaagtgctggagtaacaaaatatctcagttggaccatccttaacttgattgaactgtctaggaactttacagattgttctgcagttctctcttcttttcctcaggtaggacagctctagcattttcttaatcaggaatattgtggtaagctgggagtatcactctggaagaaagtaacatctccagatgagaatttgaaacaagaaacagagtgttgtaaaaggacaccttcactgaagcaagtcggaaagtacaatgaaaataaatatttttggtatttatttatgaaatatttgaacattttttcaataattcctttttacttctaggaagtctcaaaagaccatcttaaattattatatgtttggacaattagcaacaagtcagatagttagaatcgaagtttttcaaatccattgcttagctaactttttcattctgtcacttggcttcgatttttatattttcctattatatgaaatgtatcttttggttgtttgatttttctttctttctttgtaaatagttctgagttctgtcaaatgccgtgaaagtatttgctataataaagaaaattcttgtgactttactaccaggacttttctcttccccatgtcaaaatacaatcaataattgatggtaaaagtttggaaattcaagc

SEQ ID NO: 18741 - DNA, 1713 bp, Homo sapiens
  source 1..1713: mol_type = unassigned DNA
atctgcagctggctcggcgcactccactgaccgtcccgactggcctttgtggtacgcggactggatggacgggcagctagtagagaagggacggcaggatatgcgacagctggcgctgcgtctggcctcgctcttcccggcccttttcagccgtgagaactacggccgcctgcggctcatcaccagttccaagcaccgctgcatggatagcagcgccgccttcctgcaggggctgtggcagcactaccaccctggcttgccgccgccggacgtcgcagatatggagtttggacctccaacagttaatgataaactaatgagattttttgatcactgtgagaagtttttaactgaagtagaaaaaaatgctacagctctttatcacgtggaagccttcaaaactggaccagaaatgcagaacattttaaaaaaagttgcagctactttgcaagtgccagtaaatgatttaaatgcagatttaattcaagtagcctttttcacctgttcatttgacctggcaattaaaggtgttaaatctccttggtgtgatgtttttgacatagatgatgcaaaggtattagaatatttaaatgatctgaaacaatattggaaaagaggatatgggtatactattaacagtcgatccagctgcaccttgtttcaggatatctttcagcacttggacaaagcagttgaacagaaacaaaggtctcagccaatttcttctccagtcatcctccagtttggtcatgcagagactcttcttccactgctttctctcatgggctacttcaaagacaaggaacccctaacagcgtacaattacaaaaaacaaatgcatcggaagttccgaagtggtctcattgtaccttatgcctcgaacctgatatttgtgctttaccactgtgaaaatgctaagactcctaaagaacaattccgagtgcagatgttattaaatgaaaaggtgttacctttggcttactcacaagaaactgtttcattttatgaagatctgaagaaccactacaaggacatccttcagagttgtcaaaccagtgaagaatgtgaattagcaagggctaacagtacatctgatgaactatgagtaactgaagaacatttttaattctttaggaatctgcaatgagtgattacatgcttgtaataggtaggcaattccttgattacaggaagcttttatattacttgagtatttctgtcttttcacagaaaaacattgggtttctctctgggtttggacatgaaatgtaagaaaagatttttcactggagcagctctcttaaggagaaacaaatctatttagagaaacagctggccctgcaaatgtttacagaaatgaaattcttcctacttatataagaaatctcacactgagatagaattgtgatttcataataacacttgaaaagtgctggagtaacaaaatatctcagttggaccatccttaacttgattgaactgtctaggaactttacagattgttctgcagttctctcttcttttcctcaggtaggacagctctagcattttcttaatcaggaatattgtggtaagctgggagtatcactctggaagaaagtaacatctccagatgagaatttgaaacaagaaacagagtgttgtaaaaggacaccttcactgaagcaagtcggaaagtacaatgaaaataaatatttttggtatttatttatg

SEQ ID NO: 18742 - DNA, 7722 bp, Homo sapiens
  source 1..7722: mol_type = unassigned DNA
ccgcgggattaagtttctcagtcacgcgtgagtgtctgtgcgttttgatccgaagctcctcgccgggtcgttacttcagaagagaagacagtgagcgtgggcgaggcgaggcatccagaggccccggcgacccctgctccccagtcctccgccccctcgcgtcgcggccctgggcgggcgccgcgagccggagttccattttaattgctgttaatcatttcagagaagaacactgaactttgaaaaaaatgttggaagccattgacaaaaatcgggccctgcatgcagcagagcgcttgcaaaccaagctgcgagaacgtggggatgtagcaaatgaagacaaactgagccttctgaagtcagtcctgcagagccctctcttcagtcagattctgagccttcagacttctgtacagcagctgaaagaccaggtaaatattgcaacttcagcaacttcaaatattgaatatgcccacgttcctcatctcagcccagctgtgattcctactctgcaaaatgaatcgtttttattatccccaaacaatgggaatctggaagcacttacaggacctggtattccacacattaatgggaaacctgcttgtgatgaatttgatcagcttatcaaaaatatggcccagggtcgccatgtagaagtttttgagctcctcaaacctccatctggaggccttgggtttagtgttgtgggactaagaagtgaaaacagaggagagctgggaatatttgttcaagagatacaagagggcagtgtggcccatagagatggaagattgaaagaaactgatcaaattcttgctatcaatggacaggctcttgatcagacaattacacatcagcaggctatcagcatcctgcagaaagccaaagatactgtccagctagttattgccagaggctcattgcctcagcttgtcagccccatagtttcccgttctccatctgcagccagcacaatttcagctcactctaatccggttcactggcaacacatggaaacgattgaattggtgaatgatggatctggtttgggatttggcatcataggaggaaaagcaactggtgtgatagtaaaaaccattctgcctggaggagtagctgatcagcatgggcgtttatgcagtggagaccacattctaaagattggtgacacagatctagcaggaatgagcagtgagcaagtagcacaagtccttaggcaatgtggaaatagagttaagttgatgattgcaagaggtgccatagaagaacgtacagcacccactgctttgggcatcaccctctcctcatccccaacttcaacaccagagttgcgggttgatgcttctactcagaaaggtgaagaaagtgagacatttgatgtagaactcactaaaaatgtccaaggattaggaattaccattgctggctacattggagataaaaaattggaaccttcaggaatctttgtaaagagcattacaaaaagcagtgccgttgagcatgatggaagaatccaaattggagaccaaattatagcagtagatggcacaaaccttcagggttttactaatcagcaagcagtagaggtattgcgacatacaggacaaactgtgctcctgacactaatgaggagaggaatgaagcaggaagccgagctcatgtcaagggaagacgtcacaaaagatgcagatttgtctcctgttaatgccagcataatcaaagaaaattatgaaaaagatgaagattttttatcttcgacgagaaacaccaacatattaccaactgaagaagaagggtatccattactgtcagctgagatagaagaaatagaagatgcacaaaaacaagaagctgctctgctgacaaaatggcaaaggattatgggaattaactatgaaatagtggtggcccatgtgagcaagtttagtgagaacagtggattggggataagcctggaagcgacagtgggacatcattttatccgatctgttctaccagagggtcctgttggacacagcgggaagctcttcagtggagacgagctattggaagtaaatggcataactttacttggggaaaatcaccaagatgtggtgaatatcttaaaagaactgcctatagaagtgacaatggtgtgctgtcgtcgaactgtgccacccaccacccaatcagaattggatagcctggacttatgtgatattgagctaacagaaaagcctcacgtagatctaggtgagttcatcgggtcatcagagacagaggatccagtgctggcgatgactgatgcgggtcagagtacagaagaggttcaagcacctttggccatgtgggaggctggcattcagcacatagagctggagaaagggagcaaaggacttggttttagcattttagattatcaggatccaattgatccagcaagcactgtgattataattcgttctttggtgcctggcggcattgctgaaaaggatggacgacttcttcctggtgaccgactcatgtttgtaaacgatgttaacttggaaaacagcagtcttgaggaagctgtagaagcactgaagggagcaccgtcagggactgtgagaataggagttgctaagcctttacccctttcaccagaagaaggttatgtttctgctaaggaggattcctttctctacccaccacactcctgtgaggaagcagggctggctgacaaacccctcttcagggctgacttggctctggtgggcacaaatgatgctgacttagtagatgaatccacatttgagtctccatactctcctgaaaatgacagcatctactctactcaagcctctattttatctcttcatggcagttcttgtggtgatggcctgaactatggttcttcccttccatcatctcctcctaaggatgttattgaaaattcttgtgatccagtacttgatctgcatatgtctctggaggaactatatacccagaatctcctgcaaagacaggatgagaatacaccttcggtggacataagtatggggcctgcttctggctttactataaatgactacacacctgcaaatgctattgaacaacaatatgaatgtgaaaacacaatagtgtggactgaatctcatttaccaagtgaagttatatcaagtgcagaacttccttctgtgctacccgattcagctggaaagggctctgagtacctgcttgaacagagctccctggcctgtaatgctgagtgtgtcatgcttcaaaatgtatctaaagaatcttttgaaaggactattaatatagcaaaaggcaattctagcctaggaatgacagttagtgctaataaagatggcttggggatgatcgttcgaagcattattcatggaggtgccattagtcgagatggccggattgccattggggactgcatcttgtccattaatgaagagtctaccatcagtgtaaccaatgcccaggcacgagctatgttgagaagacattctctcattggccctgacataaaaattacttatgtgcctgcagaacatttggaagagttcaaaataagcttgggacaacaatctggaagagtaatggcactggatattttttcttcatacactggcagagacattccagaattaccagagcgagaagagggagagggtgaagaaagcgaacttcaaaacacagcatatagcaattggaatcagcccaggcgggtggaactctggagagaaccaagcaaatccttaggcatcagcattgttggtggacgagggatggggagtcggctaagcaatggagaagtgatgaggggcattttcatcaaacatgttctggaagatagtccagctggcaaaaatggaaccttgaaacctggagatagaatcgtagaggtggatggaatggacctcagagatgcaagccatgaacaagctgtggaagccattcggaaagcaggcaaccctgtagtctttatggtacagagcattataaacagaccaaggaaatcccctttgccttccttgctgcacaacctttaccctaagtacaacttcagcagcactaacccatttgctgactctctacaaatcaacgccgacaaggcacccagtcagtcagagtcagagccagagaaggctccattgtgcagtgtgcccccaccccctccttcagcctttgccgaaatgggtagtgatcacacacagtcatctgcaagcaaaatctcacaagatgtggacaaagaggatgagtttggttacagctggaaaaatatcagagagcgttatggaaccctaacaggcgagctgcatatgattgaactggagaaaggtcatagtggtttgggcctaagtcttgctgggaacaaagaccgatccaggatgagtgtcttcatagtggggattgatccaaatggagctgcaggaaaagatggtcgattgcaaattgcagatgagcttctagagatcaatggtcagattttatatggaagaagtcatcagaatgcctcatcaatcattaaatgtgccccttctaaagtgaaaataatttttatcagaaataaagatgcagtgaatcagatggccgtatgtcctggaaatgcagtagaacctttgccttctaactcagaaaatcttcaaaataaggagacagagccaactgttactacttctgatgcagctgtggacctcagttcatttaaaaatgtgcaacatctggagcttcccaaggatcaggggggtttgggtattgctatcagcgaagaagatacactcagtggagtcatcataaagagcttaacagagcatggggtagcagccacggatggacgactcaaagtcggagatcagatactggctgtagatgatgaaattgttgttggttaccctattgaaaagtttattagccttctgaagacagcaaagatgacagtaaaacttaccatccatgctgagaatccagattcccaggctgttccttcagcagctggtgcagccagtggagaaaaaaagaacagctcccagtctctgatggtcccacagtctggctccccagaaccggagtccatccgaaatacaagcagatcatcaacaccagcaatttttgcttctgatcctgcaacctgccccattatccctggctgcgaaacaaccatcgagatttccaaagggcgaacagggctgggcctgagcatcgttgggggttcagacacgctgctgggtgccattattatccatgaagtttatgaagaaggagcagcatgtaaagatggaagactctgggctggagatcagatcttagaggtgaatggaattgacttgagaaaggccacacatgatgaagcaatcaatgtcctgagacagacgccacagagagtgcgcctgacactctacagagatgaggccccatacaaagaggaggaagtgtgtgacaccctcactattgagctgcagaagaagccgggaaaaggcctaggattaagtattgttggtaaaagaaacgatactggagtatttgtgtcagacattgtcaaaggaggaattgcagatgccgatggaagactgatgcagggagaccagatattaatggtgaatggggaagacgttcgtaatgccacccaagaagcggttgccgctttgctaaagtgttccctaggcacagtaaccttggaagttggaagaatcaaagctggtccattccattcagagaggaggccatctcaaagcagccaggtgagtgaaggcagcctgtcatctttcacttttccactctctggatccagtacatctgagtcactggaaagtagctcaaagaagaatgcattggcatctgaaatacagggattaagaacagtcgaaatgaaaaagggccctactgactcactgggaatcagcattgctggaggagtaggcagcccacttggtgatgtgcctatatttattgcaatgatgcacccaactggagttgcagcacagacccaaaaactcagagttggggataggattgtcaccatctgtggcacatccactgagggcatgactcacacccaagcagttaacctactgaaaaatgcatctggctccattgaaatgcaggtggttgctggaggagacgtgagtgtggtcacaggtcatcagcaggagcctgcaagttccagtctttctttcactgggctgacgtcaagcagtatatttcaggatgatttaggacctcctcaatgtaagtctattacactagagcgaggaccagatggcttaggcttcagtatagttggaggatatggcagccctcatggagacttacccatttatgttaaaacagtgtttgcaaagggagcagcctctgaagacggacgtctgaaaaggggcgatcagatcattgctgtcaatgggcagagtctagaaggagtcacccatgaagaagctgttgccatccttaaacggacaaaaggcactgtcactttgatggttctctcttgaattggctgccagaattgaaccaacccaacccctagctcacctcctactgtaaagagaatgcactggtcctgacaatttttatgctgtgttcagccgggtcttcaaaactgtaggggggaaataacacttaagtttctttttctcatctagaaatgctttccttactgacaacctaacatcatttttcttttcttcttgcattttgtgaacttaaagagaaggaatatttgtgtaggtgaatctcgtttttatttgtggagatatctaatgttttgtagtcacatgggcaagaattattacatgctaagctggttagtataaagaaagataattctaaagctaaccaaagaaaatggcttcagtaaattaggatgaaaaatgaaaatataaaataaagaagaaaatctcggggagtttaaaaaaaatgcctcaatttggcaatctacctcctctccccaccccaaactaaaaaaagaaaaaaaggttttctaatgaaaatctttaaaaatactgtcagtattttaaaattttcaacagtattataaaaacattgcatctccccacctctaatatgcatatatatttttcctgctaaaattggtttctacaattgagtaaatggcaaatacatgaagcaatgtccctaaattttataaagaaattatatttaatgcacatttcaattttcattcttatttttgaccttttgtaaaatattttcatgttgctataagtaaatgatgatgccaccccatgttgactatggtttttctagaaagcaactatgctgctaaccatagaggaacatagaagggttccagaatctttagtgctggttttaacaaccgatgcaacattaaaaatgtgttagtgtgctgtgcaattggttttcaattcatattaatcttaatgacagagaacaatgtgttactaattattttggttgtatgccattagtaaattgatagaaaaattaaggggattaacataacttcatttcattgacttatattaacatcttataatacaatagtttaagactaagggaaacagatggagctgtttattgagacaactggtgaggaattatcatgtgttcattcccattttagagcgtgaaactcctacattagaatatataaagtcactttaaatatctatatttgtaacagaagtagtgtacagatattttattacagcatttttgtgtaaatgcagaattaaagtgaataaataagaattttcagtggtgcacaaataa

SEQ ID NO: 18743 - DNA, 6361 bp, Homo sapiens
  source 1..6361: mol_type = unassigned DNA
tgctgttaatcatttcagagaagaacactgaactttgaaaaaaatgttggaagccattgacaaaaatcgggccctgcatgcagcagagcgcttgcaaaccaagctgcgagaacgtggggatgtagcaaatgaagacaaactgagccttctgaagtcagtcctgcagagccctctcttcagtcagattctgagccttcagacttctgtacagcagctgaaagaccaggtaaatattgcaacttcagcaacttcaaatattgaatatgcccacgttcctcatctcagcccagctgtgattcctactctgcaaaatgaatcgtttttattatccccaaacaatgggaatctggaagcacttacaggacctggtattccacacattaatgggaaacctgcttgtgatgaatttgatcagcttatcaaaaatatggcccagggtcgccatgtagaagtttttgagctcctcaaacctccatctggaggccttgggtttagtgttgtgggactaagaagtgaaaacagaggagagctgggaatatttgttcaagagatacaagagggcagtgtggcccatagagatggaagattgaaagaaactgatcaaattcttgctatcaatggacaggctcttgatcagacaattacacatcagcaggctatcagcatcctgcagaaagccaaagatactgtccagctagttattgccagaggctcattgcctcagcttgtcagccccatagtttcccgttctccatctgcagccagcacaatttcagctcactctaatccggttcactggcaacacatggaaacgattgaattggtgaatgatggatctggtttgggatttggcatcataggaggaaaagcaactggtgtgatagtaaaaaccattctgcctggaggagtagctgatcagcatgggcgtttatgcagtggagaccacattctaaagattggtgacacagatctagcaggaatgagcagtgagcaagtagcacaagtccttaggcaatgtggaaatagagttaagttgatgattgcaagaggtgccatagaagaacgtacagcacccactgctttgggcatcaccctctcctcatccccaacttcaacaccagagttgcgggttgatgcttctactcagaaaggtgaagaaagtgagacatttgatgtagaactcactaaaaatgtccaaggattaggaattaccattgctggctacattggagataaaaaattggaaccttcaggaatctttgtaaagagcattacaaaaagcagtgccgttgagcatgatggaagaatccaaattggagaccaaattatagcagtagatggcacaaaccttcagggttttactaatcagcaagcagtagaggtattgcgacatacaggacaaactgtgctcctgacactaatgaggagaggaatgaagcaggaagccgagctcatgtcaagggaagacgtcacaaaagatgcagatttgtctcctgttaatgccagcataatcaaagaaaattatgaaaaagatgaagattttttatcttcgacgagaaacaccaacatattaccaactgaagaagaagggtatccattactgtcagctgagatagaagaaatagaagatgcacaaaaacaagaagctgctctgctgacaaaatggcaaaggattatgggaattaactatgaaatagtggtggcccatgtgagcaagtttagtgagaacagtggattggggataagcctggaagcgacagtgggacatcattttatccgatctgttctaccagagggtcctgttggacacagcgggaagctcttcagtggagacgagctattggaagtaaatggcataactttacttggggaaaatcaccaagatgtggtgaatatcttaaaagaactgcctatagaagtgacaatggtgtgctgtcgtcgaactgtgccacccaccacccaatcagaattggatagcctggacttatgtgatattgagctaacagaaaagcctcacgtagatctaggtgagttcatcgggtcatcagagacagaggatccagtgctggcgatgactgatgcgggtcagagtacagaagaggttcaagcacctttggccatgtgggaggctggcattcagcacatagagctggagaaagggagcaaaggacttggttttagcattttagattatcaggatccaattgatccagcaagcactgtgattataattcgttctttggtgcctggcggcattgctgaaaaggatggacgacttcttcctggtgaccgactcatgtttgtaaacgatgttaacttggaaaacagcagtcttgaggaagctgtagaagcactgaagggagcaccgtcagggactgtgagaataggagttgctaagcctttacccctttcaccagaagaaggttatgtttctgctaaggaggattcctttctctacccaccacactcctgtgaggaagcagggctggctgacaaacccctcttcagggctgacttggctctggtgggcacaaatgatgctgacttagtagatgaatccacatttgagtctccatactctcctgaaaatgacagcatctactctactcaagcctctattttatctcttcatggcagttcttgtggtgatggcctgaactatggttcttcccttccatcatctcctcctaaggatgttattgaaaattcttgtgatccagtacttgatctgcatatgtctctggaggaactatatacccagaatctcctgcaaagacaggatgagaatacaccttcggtggacataagtatggggcctgcttctggctttactataaatgactacacacctgcaaatgctattgaacaacaatatgaatgtgaaaacacaatagtgtggactgaatctcatttaccaagtgaagttatatcaagtgcagaacttccttctgtgctacccgattcagctggaaagggctctgagtacctgcttgaacagagctccctggcctgtaatgctgagtgtgtcatgcttcaaaatgtatctaaagaatcttttgaaaggactattaatatagcaaaaggcaattctagcctaggaatgacagttagtgctaataaagatggcttggggatgatcgttcgaagcattattcatggaggtgccattagtcgagatggccggattgccattggggactgcatcttgtccattaatgaagagtctaccatcagtgtaaccaatgcccaggcacgagctatgttgagaagacattctctcattggccctgacataaaaattacttatgtgcctgcagaacatttggaagagttcaaaataagcttgggacaacaatctggaagagtaatggcactggatattttttcttcatacactggcagagacattccagaattaccagagcgagaagagggagagggtgaagaaagcgaacttcaaaacacagcatatagcaattggaatcagcccaggcgggtggaactctggagagaaccaagcaaatccttaggcatcagcattgttggtggacgagggatggggagtcggctaagcaatggagaagtgatgaggggcattttcatcaaacatgttctggaagatagtccagctggcaaaaatggaaccttgaaacctggagatagaatcgtagaggtggatggaatggacctcagagatgcaagccatgaacaagctgtggaagccattcggaaagcaggcaaccctgtagtctttatggtacagagcattataaacagaccaaggaaatcccctttgccttccttgctgcacaacctttaccctaagtacaacttcagcagcactaacccatttgctgactctctacaaatcaacgccgacaaggcacccagtcagtcagagtcagagccagagaaggctccattgtgcagtgtgcccccaccccctccttcagcctttgccgaaatgggtagtgatcacacacagtcatctgcaagcaaaatctcacaagatgtggacaaagaggatgagtttggttacagctggaaaaatatcagagagcgttatggaaccctaacaggcgagctgcatatgattgaactggagaaaggtcatagtggtttgggcctaagtcttgctgggaacaaagaccgatccaggatgagtgtcttcatagtggggattgatccaaatggagctgcaggaaaagatggtcgattgcaaattgcagatgagcttctagagatcaatggtcagattttatatggaagaagtcatcagaatgcctcatcaatcattaaatgtgccccttctaaagtgaaaataatttttatcagaaataaagatgcagtgaatcagatggccgtatgtcctggaaatgcagtagaacctttgccttctaactcagaaaatcttcaaaataaggagacagagccaactgttactacttctgatgcagctgtggacctcagttcatttaaaaatgtgcaacatctggagcttcccaaggatcaggggggtttgggtattgctatcagcgaagaagatacactcagtggagtcatcataaagagcttaacagagcatggggtagcagccacggatggacgactcaaagtcggagatcagatactggctgtagatgatgaaattgttgttggttaccctattgaaaagtttattagccttctgaagacagcaaagatgacagtaaaacttaccatccatgctgagaatccagattcccaggctgttccttcagcagctggtgcagccagtggagaaaaaaagaacagctcccagtctctgatggtcccacagtctggctccccagaaccggagtccatccgaaatacaagcagatcatcaacaccagcaatttttgcttctgatcctgcaacctgccccattatccctggctgcgaaacaaccatcgagatttccaaagggcgaacagggctgggcctgagcatcgttgggggttcagacacgctgctgggtgccattattatccatgaagtttatgaagaaggagcagcatgtaaagatggaagactctgggctggagatcagatcttagaggtgaatggaattgacttgagaaaggccacacatgatgaagcaatcaatgtcctgagacagacgccacagagagtgcgcctgacactctacagagatgaggccccatacaaagaggaggaagtgtgtgacaccctcactattgagctgcagaagaagccgggaaaaggcctaggattaagtattgttggtaaaagaaacgatactggagtatttgtgtcagacattgtcaaaggaggaattgcagatgccgatggaagactgatgcagggagaccagatattaatggtgaatggggaagacgttcgtaatgccacccaagaagcggttgccgctttgctaaagtgttccctaggcacagtaaccttggaagttggaagaatcaaagctggtccattccattcagagaggaggccatctcaaagcagccaggtgagtgaaggcagcctgtcatctttcacttttccactctctggatccagtacatctgagtcactggaaagtagctcaaagaagaatgcattggcatctgaaatacagggattaagaacagtcgaaatgaaaaagggccctactgactcactgggaatcagcattgctggaggagtaggcagcccacttggtgatgtgcctatatttattgcaatgatgcacccaactggagttgcagcacagacccaaaaactcagagttggggataggattgtcaccatctgtggcacatccactgagggcatgactcacacccaagcagttaacctactgaaaaatgcatctggctccattgaaatgcaggtggttgctggaggagacgtgagtgtggtcacaggtcatcagcaggagcctgcaagttccagtctttctttcactgggctgacgtcaagcagtatatttcaggatgatttaggacctcctcaatgtaagtctattacactagagcgaggaccagatggcttaggcttcagtatagttggaggatatggcagccctcatggagacttacccatttatgttaaaacagtgtttgcaaagggagcagcctctgaagacggacgtctgaaaaggggcgatcagatcattgctgtcaatgggcagagtctagaaggagtcacccatgaagaagctgttgccatccttaaacggacaaaaggcactgtcactttgatggttctctcttgaattggctgccagaattgaaccaacccaacccctagctcacctcctactgtaaagagaatgcactggtcctgacaatttttatgctgtgttcagccgggtcttcaa

SEQ ID NO: 18744 - DNA, 7430 bp, Homo sapiens
  source 1..7430: mol_type = unassigned DNA
attttaattgctgttaatcatttcagagaagaacactgaactttgaaaaaaatgttggaagccattgacaaaaatcgggccctgcatgcagcagagcgcttgcaaaccaagctgcgagaacgtggggatgtagcaaatgaagacaaactgagccttctgaagtcagtcctgcagagccctctcttcagtcagattctgagccttcagacttctgtacagcagctgaaagaccaggtaaatattgcaacttcagcaacttcaaatattgaatatgcccacgttcctcatctcagcccagctgtgattcctactctgcaaaatgaatcgtttttattatccccaaacaatgggaatctggaagcacttacaggacctggtattccacacattaatgggaaacctgcttgtgatgaatttgatcagcttatcaaaaatatggcccagggtcgccatgtagaagtttttgagctcctcaaacctccatctggaggccttgggtttagtgttgtgggactaagaagtgaaaacagaggagagctgggaatatttgttcaagagatacaagagggcagtgtggcccatagagatggaagattgaaagaaactgatcaaattcttgctatcaatggacaggctcttgatcagacaattacacatcagcaggctatcagcatcctgcagaaagccaaagatactgtccagctagttattgccagaggctcattgcctcagcttgtcagccccatagtttcccgttctccatctgcagccagcacaatttcagctcactctaatccggttcactggcaacacatggaaacgattgaattggtgaatgatggatctggtttgggatttggcatcataggaggaaaagcaactggtgtgatagtaaaaaccattctgcctggaggagtagctgatcagcatgggcgtttatgcagtggagaccacattctaaagattggtgacacagatctagcaggaatgagcagtgagcaagtagcacaagtccttaggcaatgtggaaatagagttaagttgatgattgcaagaggtgccatagaagaacgtacagcacccactgctttgggcatcaccctctcctcatccccaacttcaacaccagagttgcgggttgatgcttctactcagaaaggtgaagaaagtgagacatttgatgtagaactcactaaaaatgtccaaggattaggaattaccattgctggctacattggagataaaaaattggaaccttcaggaatctttgtaaagagcattacaaaaagcagtgccgttgagcatgatggaagaatccaaattggagaccaaattatagcagtagatggcacaaaccttcagggttttactaatcagcaagcagtagaggtattgcgacatacaggacaaactgtgctcctgacactaatgaggagaggaatgaagcaggaagccgagctcatgtcaagggaagacgtcacaaaagatgcagatttgtctcctgttaatgccagcataatcaaagaaaattatgaaaaagatgaagattttttatcttcgacgagaaacaccaacatattaccaactgaagaagaagggtatccattactgtcagctgagatagaagaaatagaagatgcacaaaaacaagaagctgctctgctgacaaaatggcaaaggattatgggaattaactatgaaatagtggtggcccatgtgagcaagtttagtgagaacagtggattggggataagcctggaagcgacagtgggacatcattttatccgatctgttctaccagagggtcctgttggacacagcgggaagctcttcagtggagacgagctattggaagtaaatggcataactttacttggggaaaatcaccaagatgtggtgaatatcttaaaagaactgcctatagaagtgacaatggtgtgctgtcgtcgaactgtgccacccaccacccaatcagaattggatagcctggacttatgtgatattgagctaacagaaaagcctcacgtagatctaggtgagttcatcgggtcatcagagacagaggatccagtgctggcgatgactgatgcgggtcagagtacagaagaggttcaagcacctttggccatgtgggaggctggcattcagcacatagagctggagaaagggagcaaaggacttggttttagcattttagattatcaggatccaattgatccagcaagcactgtgattataattcgttctttggtgcctggcggcattgctgaaaaggatggacgacttcttcctggtgaccgactcatgtttgtaaacgatgttaacttggaaaacagcagtcttgaggaagctgtagaagcactgaagggagcaccgtcagggactgtgagaataggagttgctaagcctttacccctttcaccagaagaaggttatgtttctgctaaggaggattcctttctctacccaccacactcctgtgaggaagcagggctggctgacaaacccctcttcagggctgacttggctctggtgggcacaaatgatgctgacttagtagatgaatccacatttgagtctccatactctcctgaaaatgacagcatctactctactcaagcctctattttatctcttcatggcagttcttgtggtgatggcctgaactatggttcttcccttccatcatctcctcctaaggatgttattgaaaattcttgtgatccagtacttgatctgcatatgtctctggaggaactatatacccagaatctcctgcaaagacaggatgagaatacaccttcggtggacataagtatggggcctgcttctggctttactataaatgactacacacctgcaaatgctattgaacaacaatatgaatgtgaaaacacaatagtgtggactgaatctcatttaccaagtgaagttatatcaagtgcagaacttccttctgtgctacccgattcagctggaaagggctctgagtacctgcttgaacagagctccctggcctgtaatgctgagtgtgtcatgcttcaaaatgtatctaaagaatcttttgaaaggactattaatatagcaaaaggcaattctagcctaggaatgacagttagtgctaataaagatggcttggggatgatcgttcgaagcattattcatggaggtgccattagtcgagatggccggattgccattggggactgcatcttgtccattaatgaagagtctaccatcagtgtaaccaatgcccaggcacgagctatgttgagaagacattctctcattggccctgacataaaaattacttatgtgcctgcagaacatttggaagagttcaaaataagcttgggacaacaatctggaagagtaatggcactggatattttttcttcatacactggcagagacattccagaattaccagagcgagaagagggagagggtgaagaaagcgaacttcaaaacacagcatatagcaattggaatcagcccaggcgggtggaactctggagagaaccaagcaaatccttaggcatcagcattgttggtggacgagggatggggagtcggctaagcaatggagaagtgatgaggggcattttcatcaaacatgttctggaagatagtccagctggcaaaaatggaaccttgaaacctggagatagaatcgtagaggtggatggaatggacctcagagatgcaagccatgaacaagctgtggaagccattcggaaagcaggcaaccctgtagtctttatggtacagagcattataaacagaccaaggaaatcccctttgccttccttgctgcacaacctttaccctaagtacaacttcagcagcactaacccatttgctgactctctacaaatcaacgccgacaaggcacccagtcagtcagagtcagagccagagaaggctccattgtgcagtgtgcccccaccccctccttcagcctttgccgaaatgggtagtgatcacacacagtcatctgcaagcaaaatctcacaagatgtggacaaagaggatgagtttggttacagctggaaaaatatcagagagcgttatggaaccctaacaggcgagctgcatatgattgaactggagaaaggtcatagtggtttgggcctaagtcttgctgggaacaaagaccgatccaggatgagtgtcttcatagtggggattgatccaaatggagctgcaggaaaagatggtcgattgcaaattgcagatgagcttctagagatcaatggtcagattttatatggaagaagtcatcagaatgcctcatcaatcattaaatgtgccccttctaaagtgaaaataatttttatcagaaataaagatgcagtgaatcagatggccgtatgtcctggaaatgcagtagaacctttgccttctaactcagaaaatcttcaaaataaggagacagagccaactgttactacttctgatgcagctgtggacctcagttcatttaaaaatgtgcaacatctggagcttcccaaggatcaggggggtttgggtattgctatcagcgaagaagatacactcagtggagtcatcataaagagcttaacagagcatggggtagcagccacggatggacgactcaaagtcggagatcagatactggctgtagatgatgaaattgttgttggttaccctattgaaaagtttattagccttctgaagacagcaaagatgacagtaaaacttaccatccatgctgagaatccagattcccaggctgttccttcagcagctggtgcagccagtggagaaaaaaagaacagctcccagtctctgatggtcccacagtctggctccccagaaccggagtccatccgaaatacaagcagatcatcaacaccagcaatttttgcttctgatcctgcaacctgccccattatccctggctgcgaaacaaccatcgagatttccaaagggcgaacagggctgggcctgagcatcgttgggggttcagacacgctgctgggtgccattattatccatgaagtttatgaagaaggagcagcatgtaaagatggaagactctgggctggagatcagatcttagaggtgaatggaattgacttgagaaaggccacacatgatgaagcaatcaatgtcctgagacagacgccacagagagtgcgcctgacactctacagagatgaggccccatacaaagaggaggaagtgtgtgacaccctcactattgagctgcagaagaagccgggaaaaggcctaggattaagtattgttggtaaaagaaacgatactggagtatttgtgtcagacattgtcaaaggaggaattgcagatgccgatggaagactgatgcagggagaccagatattaatggtgaatggggaagacgttcgtaatgccacccaagaagcggttgccgctttgctaaaggtgagtgaaggcagcctgtcatctttcacttttccactctctggatccagtacatctgagtcactggaaagtagctcaaagaagaatgcattggcatctgaaatacagggattaagaacagtcgaaatgaaaaagggccctactgactcactgggaatcagcattgctggaggagtaggcagcccacttggtgatgtgcctatatttattgcaatgatgcacccaactggagttgcagcacagacccaaaaactcagagttggggataggattgtcaccatctgtggcacatccactgagggcatgactcacacccaagcagttaacctactgaaaaatgcatctggctccattgaaatgcaggtggttgctggaggagacgtgagtgtggtcacaggtcatcagcaggagcctgcaagttccagtctttctttcactgggctgacgtcaagcagtatatttcaggatgatttaggacctcctcaatgtaagtctattacactagagcgaggaccagatggcttaggcttcagtatagttggaggatatggcagccctcatggagacttacccatttatgttaaaacagtgtttgcaaagggagcagcctctgaagacggacgtctgaaaaggggcgatcagatcattgctgtcaatgggcagagtctagaaggagtcacccatgaagaagctgttgccatccttaaacggacaaaaggcactgtcactttgatggttctctcttgaattggctgccagaattgaaccaacccaacccctagctcacctcctactgtaaagagaatgcactggtcctgacaatttttatgctgtgttcagccgggtcttcaaaactgtaggggggaaataacacttaagtttctttttctcatctagaaatgctttccttactgacaacctaacatcatttttcttttcttcttgcattttgtgaacttaaagagaaggaatatttgtgtaggtgaatctcgtttttatttgtggagatatctaatgttttgtagtcacatgggcaagaattattacatgctaagctggttagtataaagaaagataattctaaagctaaccaaagaaaatggcttcagtaaattaggatgaaaaatgaaaatataaaataaagaagaaaatctcggggagtttaaaaaaaatgcctcaatttggcaatctacctcctctccccaccccaaactaaaaaaagaaaaaaaggttttctaatgaaaatctttaaaaatactgtcagtattttaaaattttcaacagtattataaaaacattgcatctccccacctctaatatgcatatatatttttcctgctaaaattggtttctacaattgagtaaatggcaaatacatgaagcaatgtccctaaattttataaagaaattatatttaatgcacatttcaattttcattcttatttttgaccttttgtaaaatattttcatgttgctataagtaaatgatgatgccaccccatgttgactatggtttttctagaaagcaactatgctgctaaccatagaggaacatagaagggttccagaatctttagtgctggttttaacaaccgatgcaacattaaaaatgtgttagtgtgctgtgcaattggttttcaattcatattaatcttaatgacagagaacaatgtgttactaattattttggttgtatgccattagtaaattgatagaaaaattaaggggattaacataacttcatttcattgacttatattaacatcttataatacaatagtttaagactaagggaaacagatggagctgtttattgagacaactggtgaggaattatcatgtgttcattcccattttagagcgtgaaactcctacattagaatatataaagtcactttaaatatctatatttgtaacagaagtagtgtacagatattttattacagcatttttgtgtaaatgcagaattaaagtgaataaataagaattttcagtggtgc

SEQ ID NO: 18745 - DNA, 6001 bp, Homo sapiens
  source 1..6001: mol_type = unassigned DNA
tgctgttaatcatttcagagaagaacactgaactttgaaaaaaatgttggaagccattgacaaaaatcgggccctgcatgcagcagagcgcttgcaaaccaagctgcgagaacgtggggatgtagcaaatgaagacaaactgagccttctgaagtcagtcctgcagagccctctcttcagtcagattctgagccttcagacttctgtacagcagctgaaagaccaggtaaatattgcaacttcagcaacttcaaatattgaatatgcccacgttcctcatctcagcccagctgtgattcctactctgcaaaatgaatcgtttttattatccccaaacaatgggaatctggaagcacttacaggacctggtattccacacattaatgggaaacctgcttgtgatgaatttgatcagcttatcaaaaatatggcccagggtcgccatgtagaagtttttgagctcctcaaacctccatctggaggccttgggtttagtgttgtgggactaagaagtgaaaacagaggagagctgggaatatttgttcaagagatacaagagggcagtgtggcccatagagatggaagattgaaagaaactgatcaaattcttgctatcaatggacaggctcttgatcagacaattacacatcagcaggctatcagcatcctgcagaaagccaaagatactgtccagctagttattgccagaggctcattgcctcagcttgtcagccccatagtttcccgttctccatctgcagccagcacaatttcagctcactctaatccggttcactggcaacacatggaaacgattgaattggtgaatgatggatctggtttgggatttggcatcataggaggaaaagcaactggtgtgatagtaaaaaccattctgcctggaggagtagctgatcagcatgggcgtttatgcagtggagaccacattctaaagattggtgacacagatctagcaggaatgagcagtgagcaagtagcacaagtccttaggcaatgtggaaatagagttaagttgatgattgcaagaggtgccatagaagaacgtacagcacccactgctttgggcatcaccctctcctcatccccaacttcaacaccagagttgcgggttgatgcttctactcagaaaggtgaagaaagtgagacatttgatgtagaactcactaaaaatgtccaaggattaggaattaccattgctggctacattggagataaaaaattggaaccttcaggaatctttgtaaagagcattacaaaaagcagtgccgttgagcatgatggaagaatccaaattggagaccaaattatagcagtagatggcacaaaccttcagggttttactaatcagcaagcagtagaggtattgcgacatacaggacaaactgtgctcctgacactaatgaggagaggaatgaagcaggaagccgagctcatgtcaagggaagacgtcacaaaagatgcagatttgtctcctgttaatgccagcataatcaaagaaaattatgaaaaagatgaagattttttatcttcgacgagaaacaccaacatattaccaactgaagaagaagggtatccattactgtcagctgagatagaagaaatagaagatgcacaaaaacaagaagctgctctgctgacaaaatggcaaaggattatgggaattaactatgaaatagtggtggcccatgtgagcaagtttagtgagaacagtggattggggataagcctggaagcgacagtgggacatcattttatccgatctgttctaccagagggtcctgttggacacagcgggaagctcttcagtggagacgagctattggaagtaaatggcataactttacttggggaaaatcaccaagatgtggtgaatatcttaaaagaactgcctatagaagtgacaatggtgtgctgtcgtcgaactgtgccacccaccacccaatcagaattggatagcctgggcattcagcacatagagctggagaaagggagcaaaggacttggttttagcattttagattatcaggatccaattgatccagcaagcactgtgattataattcgttctttggtgcctggcggcattgctgaaaaggatggacgacttcttcctggtgaccgactcatgtttgtaaacgatgttaacttggaaaacagcagtcttgaggaagctgtagaagcactgaagggagcaccgtcagggactgtgagaataggagttgctaagcctttacccctttcaccagaagaaggttatgtttctgctaaggaggattcctttctctacccaccacactcctgtgaggaagcagggctggctgacaaacccctcttcagggctgacttggctctggtgggcacaaatgatgctgacttagtagatgaatccacatttgagtctccatactctcctgaaaatgacagcatctactctactcaagcctctattttatctcttcatggcagttcttgtggtgatggcctgaactatggttcttcccttccatcatctcctcctaaggatgttattgaaaattcttgtgatccagtacttgatctgcatatgtctctggaggaactatatacccagaatctcctgcaaagacaggatgagaatacaccttcggtggacataagtatggggcctgcttctggctttactataaatgactacacacctgcaaatgctattgaacaacaatatgaatgtgaaaacacaatagtgtggactgaatctcatttaccaagtgaagttatatcaagtgcagaacttccttctgtgctacccgattcagctggaaagggctctgagtacctgcttgaacagagctccctggcctgtaatgctgagtgtgtcatgcttcaaaatgtatctaaagaatcttttgaaaggactattaatatagcaaaaggcaattctagcctaggaatgacagttagtgctaataaagatggcttggggatgatcgttcgaagcattattcatggaggtgccattagtcgagatggccggattgccattggggactgcatcttgtccattaatgaagagtctaccatcagtgtaaccaatgcccaggcacgagctatgttgagaagacattctctcattggccctgacataaaaattacttatgtgcctgcagaacatttggaagagttcaaaataagcttgggacaacaatctggaagagtaatggcactggatattttttcttcatacactggcagagacattccagaattaccagagcgagaagagggagagggtgaagaaagcgaacttcaaaacacagcatatagcaattggaatcagcccaggcgggtggaactctggagagaaccaagcaaatccttaggcatcagcattgttggtggacgagggatggggagtcggctaagcaatggagaagtgatgaggggcattttcatcaaacatgttctggaagatagtccagctggcaaaaatggaaccttgaaacctggagatagaatcgtagaggcacccagtcagtcagagtcagagccagagaaggctccattgtgcagtgtgcccccaccccctccttcagcctttgccgaaatgggtagtgatcacacacagtcatctgcaagcaaaatctcacaagatgtggacaaagaggatgagtttggttacagctggaaaaatatcagagagcgttatggaaccctaacaggcgagctgcatatgattgaactggagaaaggtcatagtggtttgggcctaagtcttgctgggaacaaagaccgatccaggatgagtgtcttcatagtggggattgatccaaatggagctgcaggaaaagatggtcgattgcaaattgcagatgagcttctagagatcaatggtcagattttatatggaagaagtcatcagaatgcctcatcaatcattaaatgtgccccttctaaagtgaaaataatttttatcagaaataaagatgcagtgaatcagatggccgtatgtcctggaaatgcagtagaacctttgccttctaactcagaaaatcttcaaaataaggagacagagccaactgttactacttctgatgcagctgtggacctcagttcatttaaaaatgtgcaacatctggagcttcccaaggatcaggggggtttgggtattgctatcagcgaagaagatacactcagtggagtcatcataaagagcttaacagagcatggggtagcagccacggatggacgactcaaagtcggagatcagatactggctgtagatgatgaaattgttgttggttaccctattgaaaagtttattagccttctgaagacagcaaagatgacagtaaaacttaccatccatgctgagaatccagattcccaggctgttccttcagcagctggtgcagccagtggagaaaaaaagaacagctcccagtctctgatggtcccacagtctggctccccagaaccggagtccatccgaaatacaagcagatcatcaacaccagcaatttttgcttctgatcctgcaacctgccccattatccctggctgcgaaacaaccatcgagatttccaaagggcgaacagggctgggcctgagcatcgttgggggttcagacacgctgctgggtgccattattatccatgaagtttatgaagaaggagcagcatgtaaagatggaagactctgggctggagatcagatcttagaggtgaatggaattgacttgagaaaggccacacatgatgaagcaatcaatgtcctgagacagacgccacagagagtgcgcctgacactctacagagatgaggccccatacaaagaggaggaagtgtgtgacaccctcactattgagctgcagaagaagccgggaaaaggcctaggattaagtattgttggtaaaagaaacgatactggagtatttgtgtcagacattgtcaaaggaggaattgcagatgccgatggaagactgatgcagggagaccagatattaatggtgaatggggaagacgttcgtaatgccacccaagaagcggttgccgctttgctaaagtgttccctaggcacagtaaccttggaagttggaagaatcaaagctggtccattccattcagagaggaggccatctcaaagcagccaggtgagtgaaggcagcctgtcatctttcacttttccactctctggatccagtacatctgagtcactggaaagtagctcaaagaagaatgcattggcatctgaaatacagggattaagaacagtcgaaatgaaaaagggccctactgactcactgggaatcagcattgctggaggagtaggcagcccacttggtgatgtgcctatatttattgcaatgatgcacccaactggagttgcagcacagacccaaaaactcagagttggggataggattgtcaccatctgtggcacatccactgagggcatgactcacacccaagcagttaacctactgaaaaatgcatctggctccattgaaatgcaggtggttgctggaggagacgtgagtgtggtcacaggtcatcagcaggagcctgcaagttccagtctttctttcactgggctgacgtcaagcagtatatttcaggatgatttaggacctcctcaatgtaagtctattacactagagcgaggaccagatggcttaggcttcagtatagttggaggatatggcagccctcatggagacttacccatttatgttaaaacagtgtttgcaaagggagcagcctctgaagacggacgtctgaaaaggggcgatcagatcattgctgtcaatgggcagagtctagaaggagtcacccatgaagaagctgttgccatccttaaacggacaaaaggcactgtcactttgatggttctctcttgaattggctgccagaattgaaccaacccaacccctagctcacctcctactgtaaagagaatgcactggtcctgacaatttttatgctgtgttcagccgggtcttcaa

SEQ ID NO: 18746 - DNA, 2303 bp, Homo sapiens
  source 1..2303: mol_type = unassigned DNA
aataaagatgcagtgaatcagatggccgtatgtcctggaaatgcagtagaacctttgccttctaactcagaaaatcttcaaaataaggagacagagccaactgttactacttctgatgcagctgtggacctcagttcatttaaaaatgtgcaacatctggagcttcccaaggatcaggggggtttgggtattgctatcagcgaagaagatacactcagtggagtcatcataaagagcttaacagagcatggggtagcagccacggatggacgactcaaagtcggagatcagatactggctgtagatgatgaaattgttgttggttaccctattgaaaagtttattagccttctgaagacagcaaagatgacagtaaaacttaccatccatgctgagaatccagattcccaggctgttccttcagcagctggtgcagccagtggagaaaaaaagaacagctcccagtctctgatggtcccacagtctggctccccagaaccggagtccatccgaaatacaagcagatcatcaacaccagcaatttttgcttctgatcctgcaacctgccccattatccctggctgcgaaacaaccatcgagatttccaaagggcgaacagggctgggcctgagcatcgttgggggttcagacacgctgctggtgaatggaattgacttgagaaaggccacacatgatgaagcaatcaatgtcctgagacagacgccacagagagtgcgcctgacactctacagagatgaggccccatacaaagaggaggaagtgtgtgacaccctcactattgagctgcagaagaagccgggaaaaggcctaggattaagtattgttggtaaaagaaacgatactggagtatttgtgtcagacattgtcaaaggaggaattgcagatgccgatggaagactgatgcagggagaccagatattaatggtgaatggggaagacgttcgtaatgccacccaagaagcggttgccgctttgctaaagtgttccctaggcacagtaaccttggaagttggaagaatcaaagctggtccattccattcagagaggaggccatctcaaagcagccaggtgagtgaaggcagcctgtcatctttcacttttccactctctggatccagtacatctgagtcactggaaagtagctcaaagaagaatgcattggcatctgaaatacagggattaagaacagtcgaaatgaaaaagggccctactgactcactgggaatcagcattgctggaggagtaggcagcccacttggtgatgtgcctatatttattgcaatgatgcacccaactggagttgcagcacagacccaaaaactcagagttggggataggattgtcaccatctgtggcacatccactgagggcatgactcacacccaagcagttaacctactgaaaaatgcatctggctccattgaaatgcaggtggttgctggaggagacgtgagtgtggtcacaggtcatcagcaggagcctgcaagttccagtctttctttcactgggctgacgtcaagcagtatatttcaggatgatttaggacctcctcaatgtaagtctattacactagagcgaggaccagatggcttaggcttcagtatagttggaggatatggcagccctcatggagacttacccatttatgttaaaacagtgtttgcaaagggagcagcctctgaagacggacgtctgaaaaggggcgatcagatcattgctgtcaatgggcagagtctagaaggagtcacccatgaagaagctgttgccatccttaaacggacaaaaggcactgtcactttgatggttctctcttgaattggctgccagaattgaaccaacccaacccctagctcacctcctactgtaaagagaatgcactggtcctgacaatttttatgctgtgttcagccgggtcttcaaaactgtaggggggaaataacacttaagtttctttttctcatctagaaatgctttccttactgacaacctaacatcatttttcttttcttcttgcattttgtgaacttaaagagaaggaatatttgtgtaggtgaatctcgtttttatttgtggagatatctaatgttttgtagtcacatgggcaagaattattacatgctaagctggttagtataaagaaagataattctaaagctaaccaaagaaaatggcttcagtaaattaggatgaaaaatgaaaatataaaataaagaagaaaatctcggggagtttaaaaaaaatgcctcaatttggcaatctacctcctctccccaccccaaact

SEQ ID NO: 18747 - DNA, 7603 bp, Homo sapiens
  source 1..7603: mol_type = unassigned DNA
cgtgagtgtctgtgcgttttgatccgaagctcctcgccgggtcgttacttcagaagagaagacagtgagcgtgggcgaggcgaggcatccagaggccccggcgacccctgctccccagtcctccgccccctcgcgtcgcggccctgggcgggcgccgcgagccggagttccattttaattgctgttaatcatttcagagaagaacactgaactttgaaaaaaatgttggaagccattgacaaaaatcgggccctgcatgcagcagagcgcttgcaaaccaagctgcgagaacgtggggatgtagcaaatgaagacaaactgagccttctgaagtcagtcctgcagagccctctcttcagtcagattctgagccttcagacttctgtacagcagctgaaagaccaggtaaatattgcaacttcagcaacttcaaatattgaatatgcccacgttcctcatctcagcccagctgtgattcctactctgcaaaatgaatcgtttttattatccccaaacaatgggaatctggaagcacttacaggacctggtattccacacattaatgggaaacctgcttgtgatgaatttgatcagcttatcaaaaatatggcccagggtcgccatgtagaagtttttgagctcctcaaacctccatctggaggccttgggtttagtgttgtgggactaagaagtgaaaacagaggagagctgggaatatttgttcaagagatacaagagggcagtgtggcccatagagatggaagattgaaagaaactgatcaaattcttgctatcaatggacaggctcttgatcagacaattacacatcagcaggctatcagcatcctgcagaaagccaaagatactgtccagctagttattgccagaggctcattgcctcagcttgtcagccccatagtttcccgttctccatctgcagccagcacaatttcagctcactctaatccggttcactggcaacacatggaaacgattgaattggtgaatgatggatctggtttgggatttggcatcataggaggaaaagcaactggtgtgatagtaaaaaccattctgcctggaggagtagctgatcagcatgggcgtttatgcagtggagaccacattctaaagattggtgacacagatctagcaggaatgagcagtgagcaagtagcacaagtccttaggcaatgtggaaatagagttaagttgatgattgcaagaggtgccatagaagaacgtacagcacccactgctttgggcatcaccctctcctcatccccaacttcaacaccagagttgcgggttgatgcttctactcagaaaggtgaagaaagtgagacatttgatgtagaactcactaaaaatgtccaaggattaggaattaccattgctggctacattggagataaaaaattggaaccttcaggaatctttgtaaagagcattacaaaaagcagtgccgttgagcatgatggaagaatccaaattggagaccaaattatagcagtagatggcacaaaccttcagggttttactaatcagcaagcagtagaggtattgcgacatacaggacaaactgtgctcctgacactaatgaggagaggaatgaagcaggaagccgagctcatgtcaagggaagacgtcacaaaagatgcagatttgtctcctgttaatgccagcataatcaaagaaaattatgaaaaagatgaagattttttatcttcgacgagaaacaccaacatattaccaactgaagaagaagggtatccattactgtcagctgagatagaagaaatagaagatgcacaaaaacaagaagctgctctgctgacaaaatggcaaaggattatgggaattaactatgaaatagtggtggcccatgtgagcaagtttagtgagaacagtggattggggataagcctggaagcgacagtgggacatcattttatccgatctgttctaccagagggtcctgttggacacagcgggaagctcttcagtggagacgagctattggaagtaaatggcataactttacttggggaaaatcaccaagatgtggtgaatatcttaaaagaactgcctatagaagtgacaatggtgtgctgtcgtcgaactgtgccacccaccacccaatcagaattggatagcctggacttatgtgatattgagctaacagaaaagcctcacgtagatctaggtgagttcatcgggtcatcagagacagaggatccagtgctggcgatgactgatgcgggtcagagtacagaagaggttcaagcacctttggccatgtgggaggctggcattcagcacatagagctggagaaagggagcaaaggacttggttttagcattttagattatcaggatccaattgatccagcaagcactgtgattataattcgttctttggtgcctggcggcattgctgaaaaggatggacgacttcttcctggtgaccgactcatgtttgtaaacgatgttaacttggaaaacagcagtcttgaggaagctgtagaagcactgaagggagcaccgtcagggactgtgagaataggagttgctaagcctttacccctttcaccagaagaaggttatgtttctgctaaggaggattcctttctctacccaccacactcctgtgaggaagcagggctggctgacaaacccctcttcagggctgacttggctctggtgggcacaaatgatgctgacttagtagatgaatccacatttgagtctccatactctcctgaaaatgacagcatctactctactcaagcctctattttatctcttcatggcagttcttgtggtgatggcctgaactatggttcttcccttccatcatctcctcctaaggatgttattgaaaattcttgtgatccagtacttgatctgcatatgtctctggaggaactatatacccagaatctcctgcaaagacaggatgagaatacaccttcggtggacataagtatggggcctgcttctggctttactataaatgactacacacctgcaaatgctattgaacaacaatatgaatgtgaaaacacaatagtgtggactgaatctcatttaccaagtgaagttatatcaagtgcagaacttccttctgtgctacccgattcagctggaaagggctctgagtacctgcttgaacagagctccctggcctgtaatgctgagtgtgtcatgcttcaaaatgtatctaaagaatcttttgaaaggactattaatatagcaaaaggcaattctagcctaggaatgacagttagtgctaataaagatggcttggggatgatcgttcgaagcattattcatggaggtgccattagtcgagatggccggattgccattggggactgcatcttgtccattaatgaagagtctaccatcagtgtaaccaatgcccaggcacgagctatgttgagaagacattctctcattggccctgacataaaaattacttatgtgcctgcagaacatttggaagagttcaaaataagcttgggacaacaatctggaagagtaatggcactggatattttttcttcatacactggcagagacattccagaattaccagagcgagaagagggagagggtgaagaaagcgaacttcaaaacacagcatatagcaattggaatcagcccaggcgggtggaactctggagagaaccaagcaaatccttaggcatcagcattgttggtggacgagggatggggagtcggctaagcaatggagaagtgatgaggggcattttcatcaaacatgttctggaagatagtccagctggcaaaaatggaaccttgaaacctggagatagaatcgtagaggtggatggaatggacctcagagatgcaagccatgaacaagctgtggaagccattcggaaagcaggcaaccctgtagtctttatggtacagagcattataaacagaccaaggaaatcccctttgccttccttgctgcacaacctttaccctaagtacaacttcagcagcactaacccatttgctgactctctacaaatcaacgccgacaaggcacccagtcagtcagagtcagagccagagaaggctccattgtgcagtgtgcccccaccccctccttcagcctttgccgaaatgggtagtgatcacacacagtcatctgcaagcaaaatctcacaagatgtggacaaagaggatgagtttggttacagctggaaaaatatcagagagcgttatggaaccctaacaggcgagctgcatatgattgaactggagaaaggtcatagtggtttgggcctaagtcttgctgggaacaaagaccgatccaggatgagtgtcttcatagtggggattgatccaaatggagctgcaggaaaagatggtcgattgcaaattgcagatgagcttctagagatcaatggtcagattttatatggaagaagtcatcagaatgcctcatcaatcattaaatgtgccccttctaaagtgaaaataatttttatcagaaataaagatgcagtgaatcagatggccgtatgtcctggaaatgcagtagaacctttgccttctaactcagaaaatcttcaaaataaggagacagagccaactgttactacttctgatgcagctgtggacctcagttcatttaaaaatgtgcaacatctggagcttcccaaggatcaggggggtttgggtattgctatcagcgaagaagatacactcagtggagtcatcataaagagcttaacagagcatggggtagcagccacggatggacgactcaaagtcggagatcagatactggctgtagatgatgaaattgttgttggttaccctattgaaaagtttattagccttctgaagacagcaaagatgacagtaaaacttaccatccatgctgagaatccagattcccaggctgttccttcagcagctggtgcagccagtggagaaaaaaagaacagctcccagtctctgatggtcccacagtctggctccccagaaccggagtccatccgaaatacaagcagatcatcaacaccagcaatttttgcttctgatcctgcaacctgccccattatccctggctgcgaaacaaccatcgagatttccaaagggcgaacagggctgggcctgagcatcgttgggggttcagacacgctgctgggtgccattattatccatgaagtttatgaagaaggagcagcatgtaaagatggaagactctgggctggagatcagatcttagaggtgaatggaattgacttgagaaaggccacacatgatgaagcaatcaatgtcctgagacagacgccacagagagtgcgcctgacactctacagagatgaggccccatacaaagaggaggaagtgtgtgacaccctcactattgagctgcagaagaagccgggaaaaggcctaggattaagtattgttggtaaaagaaacgatactggagtatttgtgtcagacattgtcaaaggaggaattgcagatgccgatggaagactgatgcagggagaccagatattaatggtgaatggggaagacgttcgtaatgccacccaagaagcggttgccgctttgctaaaggtgagtgaaggcagcctgtcatctttcacttttccactctctggatccagtacatctgagtcactggaaagtagctcaaagaagaatgcattggcatctgaaatacagggattaagaacagtcgaaatgaaaaagggccctactgactcactgggaatcagcattgctggaggagtaggcagcccacttggtgatgtgcctatatttattgcaatgatgcacccaactggagttgcagcacagacccaaaaactcagagttggggataggattgtcaccatctgtggcacatccactgagggcatgactcacacccaagcagttaacctactgaaaaatgcatctggctccattgaaatgcaggtggttgctggaggagacgtgagtgtggtcacaggtcatcagcaggagcctgcaagttccagtctttctttcactgggctgacgtcaagcagtatatttcaggatgatttaggacctcctcaatgtaagtctattacactagagcgaggaccagatggcttaggcttcagtatagttggaggatatggcagccctcatggagacttacccatttatgttaaaacagtgtttgcaaagggagcagcctctgaagacggacgtctgaaaaggggcgatcagatcattgctgtcaatgggcagagtctagaaggagtcacccatgaagaagctgttgccatccttaaacggacaaaaggcactgtcactttgatggttctctcttgaattggctgccagaattgaaccaacccaacccctagctcacctcctactgtaaagagaatgcactggtcctgacaatttttatgctgtgttcagccgggtcttcaaaactgtaggggggaaataacacttaagtttctttttctcatctagaaatgctttccttactgacaacctaacatcatttttcttttcttcttgcattttgtgaacttaaagagaaggaatatttgtgtaggtgaatctcgtttttatttgtggagatatctaatgttttgtagtcacatgggcaagaattattacatgctaagctggttagtataaagaaagataattctaaagctaaccaaagaaaatggcttcagtaaattaggatgaaaaatgaaaatataaaataaagaagaaaatctcggggagtttaaaaaaaatgcctcaatttggcaatctacctcctctccccaccccaaactaaaaaaagaaaaaaaggttttctaatgaaaatctttaaaaatactgtcagtattttaaaattttcaacagtattataaaaacattgcatctccccacctctaatatgcatatatatttttcctgctaaaattggtttctacaattgagtaaatggcaaatacatgaagcaatgtccctaaattttataaagaaattatatttaatgcacatttcaattttcattcttatttttgaccttttgtaaaatattttcatgttgctataagtaaatgatgatgccaccccatgttgactatggtttttctagaaagcaactatgctgctaaccatagaggaacatagaagggttccagaatctttagtgctggttttaacaaccgatgcaacattaaaaatgtgttagtgtgctgtgcaattggttttcaattcatattaatcttaatgacagagaacaatgtgttactaattattttggttgtatgccattagtaaattgatagaaaaattaaggggattaacataacttcatttcattgacttatattaacatcttataatacaatagtttaagactaagggaaacagatggagctgtttattgagacaactggtgaggaattatcatgtgttcattcccattttagagcgtgaaactcctacattagaatatataaagtcactttaaatatctatatttgtaacagaagtagtgtacagatattttattacagcatttttgtgtaaatgcagaattaaagtgaataaataagaattttcagtggtgcac

SEQ ID NO: 18748 - DNA, 6262 bp, Homo sapiens
  source 1..6262: mol_type = unassigned DNA
tgctgttaatcatttcagagaagaacactgaactttgaaaaaaatgttggaagccattgacaaaaatcgggccctgcatgcagcagagcgcttgcaaaccaagctgcgagaacgtggggatgtagcaaatgaagacaaactgagccttctgaagtcagtcctgcagagccctctcttcagtcagattctgagccttcagacttctgtacagcagctgaaagaccaggtaaatattgcaacttcagcaacttcaaatattgaatatgcccacgttcctcatctcagcccagctgtgattcctactctgcaaaatgaatcgtttttattatccccaaacaatgggaatctggaagcacttacaggacctggtattccacacattaatgggaaacctgcttgtgatgaatttgatcagcttatcaaaaatatggcccagggtcgccatgtagaagtttttgagctcctcaaacctccatctggaggccttgggtttagtgttgtgggactaagaagtgaaaacagaggagagctgggaatatttgttcaagagatacaagagggcagtgtggcccatagagatggaagattgaaagaaactgatcaaattcttgctatcaatggacaggctcttgatcagacaattacacatcagcaggctatcagcatcctgcagaaagccaaagatactgtccagctagttattgccagaggctcattgcctcagcttgtcagccccatagtttcccgttctccatctgcagccagcacaatttcagctcactctaatccggttcactggcaacacatggaaacgattgaattggtgaatgatggatctggtttgggatttggcatcataggaggaaaagcaactggtgtgatagtaaaaaccattctgcctggaggagtagctgatcagcatgggcgtttatgcagtggagaccacattctaaagattggtgacacagatctagcaggaatgagcagtgagcaagtagcacaagtccttaggcaatgtggaaatagagttaagttgatgattgcaagaggtgccatagaagaacgtacagcacccactgctttgggcatcaccctctcctcatccccaacttcaacaccagagttgcgggttgatgcttctactcagaaaggtgaagaaagtgagacatttgatgtagaactcactaaaaatgtccaaggattaggaattaccattgctggctacattggagataaaaaattggaaccttcaggaatctttgtaaagagcattacaaaaagcagtgccgttgagcatgatggaagaatccaaattggagaccaaattatagcagtagatggcacaaaccttcagggttttactaatcagcaagcagtagaggtattgcgacatacaggacaaactgtgctcctgacactaatgaggagaggaatgaagcaggaagccgagctcatgtcaagggaagacgtcacaaaagatgcagatttgtctcctgttaatgccagcataatcaaagaaaattatgaaaaagatgaagattttttatcttcgacgagaaacaccaacatattaccaactgaagaagaagggtatccattactgtcagctgagatagaagaaatagaagatgcacaaaaacaagaagctgctctgctgacaaaatggcaaaggattatgggaattaactatgaaatagtggtggcccatgtgagcaagtttagtgagaacagtggattggggataagcctggaagcgacagtgggacatcattttatccgatctgttctaccagagggtcctgttggacacagcgggaagctcttcagtggagacgagctattggaagtaaatggcataactttacttggggaaaatcaccaagatgtggtgaatatcttaaaagaactgcctatagaagtgacaatggtgtgctgtcgtcgaactgtgccacccaccacccaatcagaattggatagcctggacttatgtgatattgagctaacagaaaagcctcacgtagatctaggtgagttcatcgggtcatcagagacagaggatccagtgctggcgatgactgatgcgggtcagagtacagaagaggttcaagcacctttggccatgtgggaggctggcattcagcacatagagctggagaaagggagcaaaggacttggttttagcattttagattatcaggatccaattgatccagcaagcactgtgattataattcgttctttggtgcctggcggcattgctgaaaaggatggacgacttcttcctggtgaccgactcatgtttgtaaacgatgttaacttggaaaacagcagtcttgaggaagctgtagaagcactgaagggagcaccgtcagggactgtgagaataggagttgctaagcctttacccctttcaccagaagaaggttatgtttctgctaaggaggattcctttctctacccaccacactcctgtgaggaagcagggctggctgacaaacccctcttcagggctgacttggctctggtgggcacaaatgatgctgacttagtagatgaatccacatttgagtctccatactctcctgaaaatgacagcatctactctactcaagcctctattttatctcttcatggcagttcttgtggtgatggcctgaactatggttcttcccttccatcatctcctcctaaggatgttattgaaaattcttgtgatccagtacttgatctgcatatgtctctggaggaactatatacccagaatctcctgcaaagacaggatgagaatacaccttcggtggacataagtatggggcctgcttctggctttactataaatgactacacacctgcaaatgctattgaacaacaatatgaatgtgaaaacacaatagtgtggactgaatctcatttaccaagtgaagttatatcaagtgcagaacttccttctgtgctacccgattcagctggaaagggctctgagtacctgcttgaacagagctccctggcctgtaatgctgagtgtgtcatgcttcaaaatgtatctaaagaatcttttgaaaggactattaatatagcaaaaggcaattctagcctaggaatgacagttagtgctaataaagatggcttggggatgatcgttcgaagcattattcatggaggtgccattagtcgagatggccggattgccattggggactgcatcttgtccattaatgaagagtctaccatcagtgtaaccaatgcccaggcacgagctatgttgagaagacattctctcattggccctgacataaaaattacttatgtgcctgcagaacatttggaagagttcaaaataagcttgggacaacaatctggaagagtaatggcactggatattttttcttcatacactggcagagacattccagaattaccagagcgagaagagggagagggtgaagaaagcgaacttcaaaacacagcatatagcaattggaatcagcccaggcgggtggaactctggagagaaccaagcaaatccttaggcatcagcattgttggtggacgagggatggggagtcggctaagcaatggagaagtgatgaggggcattttcatcaaacatgttctggaagatagtccagctggcaaaaatggaaccttgaaacctggagatagaatcgtagaggtggatggaatggacctcagagatgcaagccatgaacaagctgtggaagccattcggaaagcaggcaaccctgtagtctttatggtacagagcattataaacagaccaagggcacccagtcagtcagagtcagagccagagaaggctccattgtgcagtgtgcccccaccccctccttcagcctttgccgaaatgggtagtgatcacacacagtcatctgcaagcaaaatctcacaagatgtggacaaagaggatgagtttggttacagctggaaaaatatcagagagcgttatggaaccctaacaggcgagctgcatatgattgaactggagaaaggtcatagtggtttgggcctaagtcttgctgggaacaaagaccgatccaggatgagtgtcttcatagtggggattgatccaaatggagctgcaggaaaagatggtcgattgcaaattgcagatgagcttctagagatcaatggtcagattttatatggaagaagtcatcagaatgcctcatcaatcattaaatgtgccccttctaaagtgaaaataatttttatcagaaataaagatgcagtgaatcagatggccgtatgtcctggaaatgcagtagaacctttgccttctaactcagaaaatcttcaaaataaggagacagagccaactgttactacttctgatgcagctgtggacctcagttcatttaaaaatgtgcaacatctggagcttcccaaggatcaggggggtttgggtattgctatcagcgaagaagatacactcagtggagtcatcataaagagcttaacagagcatggggtagcagccacggatggacgactcaaagtcggagatcagatactggctgtagatgatgaaattgttgttggttaccctattgaaaagtttattagccttctgaagacagcaaagatgacagtaaaacttaccatccatgctgagaatccagattcccaggctgttccttcagcagctggtgcagccagtggagaaaaaaagaacagctcccagtctctgatggtcccacagtctggctccccagaaccggagtccatccgaaatacaagcagatcatcaacaccagcaatttttgcttctgatcctgcaacctgccccattatccctggctgcgaaacaaccatcgagatttccaaagggcgaacagggctgggcctgagcatcgttgggggttcagacacgctgctgggtgccattattatccatgaagtttatgaagaaggagcagcatgtaaagatggaagactctgggctggagatcagatcttagaggtgaatggaattgacttgagaaaggccacacatgatgaagcaatcaatgtcctgagacagacgccacagagagtgcgcctgacactctacagagatgaggccccatacaaagaggaggaagtgtgtgacaccctcactattgagctgcagaagaagccgggaaaaggcctaggattaagtattgttggtaaaagaaacgatactggagtatttgtgtcagacattgtcaaaggaggaattgcagatgccgatggaagactgatgcagggagaccagatattaatggtgaatggggaagacgttcgtaatgccacccaagaagcggttgccgctttgctaaagtgttccctaggcacagtaaccttggaagttggaagaatcaaagctggtccattccattcagagaggaggccatctcaaagcagccaggtgagtgaaggcagcctgtcatctttcacttttccactctctggatccagtacatctgagtcactggaaagtagctcaaagaagaatgcattggcatctgaaatacagggattaagaacagtcgaaatgaaaaagggccctactgactcactgggaatcagcattgctggaggagtaggcagcccacttggtgatgtgcctatatttattgcaatgatgcacccaactggagttgcagcacagacccaaaaactcagagttggggataggattgtcaccatctgtggcacatccactgagggcatgactcacacccaagcagttaacctactgaaaaatgcatctggctccattgaaatgcaggtggttgctggaggagacgtgagtgtggtcacaggtcatcagcaggagcctgcaagttccagtctttctttcactgggctgacgtcaagcagtatatttcaggatgatttaggacctcctcaatgtaagtctattacactagagcgaggaccagatggcttaggcttcagtatagttggaggatatggcagccctcatggagacttacccatttatgttaaaacagtgtttgcaaagggagcagcctctgaagacggacgtctgaaaaggggcgatcagatcattgctgtcaatgggcagagtctagaaggagtcacccatgaagaagctgttgccatccttaaacggacaaaaggcactgtcactttgatggttctctcttgaattggctgccagaattgaaccaacccaacccctagctcacctcctactgtaaagagaatgcactggtcctgacaatttttatgctgtgttcagccgggtcttcaa

SEQ ID NO: 18749 - DNA, 6176 bp, Homo sapiens
  source 1..6176: mol_type = unassigned DNA
tgctgttaatcatttcagagaagaacactgaactttgaaaaaaatgttggaagccattgacaaaaatcgggccctgcatgcagcagagcgcttgcaaaccaagctgcgagaacgtggggatgtagcaaatgaagacaaactgagccttctgaagtcagtcctgcagagccctctcttcagtcagattctgagccttcagacttctgtacagcagctgaaagaccaggtaaatattgcaacttcagcaacttcaaatattgaatatgcccacgttcctcatctcagcccagctgtgattcctactctgcaaaatgaatcgtttttattatccccaaacaatgggaatctggaagcacttacaggacctggtattccacacattaatgggaaacctgcttgtgatgaatttgatcagcttatcaaaaatatggcccagggtcgccatgtagaagtttttgagctcctcaaacctccatctggaggccttgggtttagtgttgtgggactaagaagtgaaaacagaggagagctgggaatatttgttcaagagatacaagagggcagtgtggcccatagagatggaagattgaaagaaactgatcaaattcttgctatcaatggacaggctcttgatcagacaattacacatcagcaggctatcagcatcctgcagaaagccaaagatactgtccagctagttattgccagaggctcattgcctcagcttgtcagccccatagtttcccgttctccatctgcagccagcacaatttcagctcactctaatccggttcactggcaacacatggaaacgattgaattggtgaatgatggatctggtttgggatttggcatcataggaggaaaagcaactggtgtgatagtaaaaaccattctgcctggaggagtagctgatcagcatgggcgtttatgcagtggagaccacattctaaagattggtgacacagatctagcaggaatgagcagtgagcaagtagcacaagtccttaggcaatgtggaaatagagttaagttgatgattgcaagaggtgccatagaagaacgtacagcacccactgctttgggcatcaccctctcctcatccccaacttcaacaccagagttgcgggttgatgcttctactcagaaaggtgaagaaagtgagacatttgatgtagaactcactaaaaatgtccaaggattaggaattaccattgctggctacattggagataaaaaattggaaccttcaggaatctttgtaaagagcattacaaaaagcagtgccgttgagcatgatggaagaatccaaattggagaccaaattatagcagtagatggcacaaaccttcagggttttactaatcagcaagcagtagaggtattgcgacatacaggacaaactgtgctcctgacactaatgaggagaggaatgaagcaggaagccgagctcatgtcaagggaagacgtcacaaaagatgcagatttgtctcctgttaatgccagcataatcaaagaaaattatgaaaaagatgaagattttttatcttcgacgagaaacaccaacatattaccaactgaagaagaagggtatccattactgtcagctgagatagaagaaatagaagatgcacaaaaacaagaagctgctctgctgacaaaatggcaaaggattatgggaattaactatgaaatagtggtggcccatgtgagcaagtttagtgagaacagtggattggggataagcctggaagcgacagtgggacatcattttatccgatctgttctaccagagggtcctgttggacacagcgggaagctcttcagtggagacgagctattggaagtaaatggcataactttacttggggaaaatcaccaagatgtggtgaatatcttaaaagaactgcctatagaagtgacaatggtgtgctgtcgtcgaactgtgccacccaccacccaatcagaattggatagcctggacttatgtgatattgagctaacagaaaagcctcacgtagatctaggtgagttcatcgggtcatcagagacagaggatccagtgctggcgatgactgatgcgggtcagagtacagaagaggttcaagcacctttggccatgtgggaggctggcattcagcacatagagctggagaaagggagcaaaggacttggttttagcattttagattatcaggatccaattgatccagcaagcactgtgattataattcgttctttggtgcctggcggcattgctgaaaaggatggacgacttcttcctggtgaccgactcatgtttgtaaacgatgttaacttggaaaacagcagtcttgaggaagctgtagaagcactgaagggagcaccgtcagggactgtgagaataggagttgctaagcctttacccctttcaccagaagaaggttatgtttctgctaaggaggattcctttctctacccaccacactcctgtgaggaagcagggctggctgacaaacccctcttcagggctgacttggctctggtgggcacaaatgatgctgacttagtagatgaatccacatttgagtctccatactctcctgaaaatgacagcatctactctactcaagcctctattttatctcttcatggcagttcttgtggtgatggcctgaactatggttcttcccttccatcatctcctcctaaggatgttattgaaaattcttgtgatccagtacttgatctgcatatgtctctggaggaactatatacccagaatctcctgcaaagacaggatgagaatacaccttcggtggacataagtatggggcctgcttctggctttactataaatgactacacacctgcaaatgctattgaacaacaatatgaatgtgaaaacacaatagtgtggactgaatctcatttaccaagtgaagttatatcaagtgcagaacttccttctgtgctacccgattcagctggaaagggctctgagtacctgcttgaacagagctccctggcctgtaatgctgagtgtgtcatgcttcaaaatgtatctaaagaatcttttgaaaggactattaatatagcaaaaggcaattctagcctaggaatgacagttagtgctaataaagatggcttggggatgatcgttcgaagcattattcatggaggtgccattagtcgagatggccggattgccattggggactgcatcttgtccattaatgaagagtctaccatcagtgtaaccaatgcccaggcacgagctatgttgagaagacattctctcattggccctgacataaaaattacttatgtgcctgcagaacatttggaagagttcaaaataagcttgggacaacaatctggaagagtaatggcactggatattttttcttcatacactggcagagacattccagaattaccagagcgagaagagggagagggtgaagaaagcgaacttcaaaacacagcatatagcaattggaatcagcccaggcgggtggaactctggagagaaccaagcaaatccttaggcatcagcattgttggtggacgagggatggggagtcggctaagcaatggagaagtgatgaggggcattttcatcaaacatgttctggaagatagtccagctggcaaaaatggaaccttgaaacctggagatagaatcgtagaggtggatggaatggacctcagagatgcaagccatgaacaagctgtggaagccattcggaaagcaggcaaccctgtagtctttatggtacagagcattataaacagaccaagggcacccagtcagtcagagtcagagccagagaaggctccattgtgcagtgtgcccccaccccctccttcagcctttgccgaaatgggtagtgatcacacacagtcatctgcaagcaaaatctcacaagatgtggacaaagaggatgagtttggttacagctggaaaaatatcagagagcgttatggaaccctaacaggcgagctgcatatgattgaactggagaaaggtcatagtggtttgggcctaagtcttgctgggaacaaagaccgatccaggatgagtgtcttcatagtggggattgatccaaatggagctgcaggaaaagatggtcgattgcaaattgcagatgagcttctagagatcaatggtcagattttatatggaagaagtcatcagaatgcctcatcaatcattaaatgtgccccttctaaagtgaaaataatttttatcagaaataaagatgcagtgaatcagatggccgtatgtcctggaaatgcagtagaacctttgccttctaactcagaaaatcttcaaaataaggagacagagccaactgttactacttctgatgcagctgtggacctcagttcatttaaaaatgtgcaacatctggagcttcccaaggatcaggggggtttgggtattgctatcagcgaagaagatacactcagtggagtcatcataaagagcttaacagagcatggggtagcagccacggatggacgactcaaagtcggagatcagatactggctgtagatgatgaaattgttgttggttaccctattgaaaagtttattagccttctgaagacagcaaagatgacagtaaaacttaccatccatgctgagaatccagattcccaggctgttccttcagcagctggtgcagccagtggagaaaaaaagaacagctcccagtctctgatggtcccacagtctggctccccagaaccggagtccatccgaaatacaagcagatcatcaacaccagcaatttttgcttctgatcctgcaacctgccccattatccctggctgcgaaacaaccatcgagatttccaaagggcgaacagggctgggcctgagcatcgttgggggttcagacacgctgctgggtgccattattatccatgaagtttatgaagaaggagcagcatgtaaagatggaagactctgggctggagatcagatcttagaggtgaatggaattgacttgagaaaggccacacatgatgaagcaatcaatgtcctgagacagacgccacagagagtgcgcctgacactctacagagatgaggccccatacaaagaggaggaagtgtgtgacaccctcactattgagctgcagaagaagccgggaaaaggcctaggattaagtattgttggtaaaagaaacgatactggagtatttgtgtcagacattgtcaaaggaggaattgcagatgccgatggaagactgatgcagggagaccagatattaatggtgaatggggaagacgttcgtaatgccacccaagaagcggttgccgctttgctaaaggtgagtgaaggcagcctgtcatctttcacttttccactctctggatccagtacatctgagtcactggaaagtagctcaaagaagaatgcattggcatctgaaatacagggattaagaacagtcgaaatgaaaaagggccctactgactcactgggaatcagcattgctggaggagtaggcagcccacttggtgatgtgcctatatttattgcaatgatgcacccaactggagttgcagcacagacccaaaaactcagagttggggataggattgtcaccatctgtggcacatccactgagggcatgactcacacccaagcagttaacctactgaaaaatgcatctggctccattgaaatgcaggtggttgctggaggagacgtgagtgtggtcacaggtcatcagcaggagcctgcaagttccagtctttctttcactgggctgacgtcaagcagtatatttcaggatgatttaggacctcctcaatgtaagtctattacactagagcgaggaccagatggcttaggcttcagtatagttggaggatatggcagccctcatggagacttacccatttatgttaaaacagtgtttgcaaagggagcagcctctgaagacggacgtctgaaaaggggcgatcagatcattgctgtcaatgggcagagtctagaaggagtcacccatgaagaagctgttgccatccttaaacggacaaaaggcactgtcactttgatggttctctcttgaattggctgccagaattgaaccaacccaacccctagctcacctcctactgtaaagagaatgcactggtcctgacaatttttatgctgtgttcagccgggtcttcaaa

SEQ ID NO: 18750 - DNA, 2975 bp, Homo sapiens
  source 1..2975: mol_type = unassigned DNA
cttcgccgcgctcctcatctgccccgcgccgagcgccgccgccgccgccgccgccgccgctccgctgcccgcgccgcccgcggctcccgatggagactgacgcgccccagcccggcctcgcctccccggactcgccgcacgacccctgcaagatgttcatcgggggactcagttggcagactacgcaggaagggctgcgcgaatacttcggccagttcggggaggtgaaggagtgtctggtgatgcgggaccccctgaccaagagatccaggggtttcggcttcgtcactttcatggaccaggcgggggtggataaagtgctggcgcaatcgcggcacgagctcgactccaaaacaattgaccctaaggtggccttccctcggcgagcacagcccaagatggtgactcgaacgaagaagatctttgtgggggggctgtcggtgaacaccacggtggaggacgtgaagcaatattttgagcagtttgggaaggtggacgacgccatgctgatgtttgacaaaaccaccaaccggcaccgagggttcgggtttgtcacgtttgagagtgaggacatcgtggagaaagtgtgtgaaattcattttcatgaaatcaacaacaaaatggtggaatgtaagaaagctcagccaaaggaggtgatgtcgccaacgggctcagcccgggggaggtctcgagtcatgccctacggaatggacgccttcatgctgggcatcggcatgctgggttacccaggtttccaagccacaacctacgccagccggagttatacaggcctcgcccctggctacacctaccagttccccgaattccgtgtagagcggacccctctcccgagcgccccagtcctccccgagcttacagccattcctctcactgcctacggaccaatggcggcggcagcggcggcagcggctgtggttcgagggacaggctctcacccctggacgatggctccccctccaggttcgactcccagccgcacagggggcttcctggggaccaccagccccggccccatggccgagctctacggggcggccaaccaggactcgggggtcagcagttacatcagcgccgccagccctgcccccagcaccggcttcggccacagtcttgggggccctttgattgccacagccttcaccaatgggtaccactgaagcaggggacggtggcaggagcgccccagcctgcagctgactgaggaccacgagtgagccagcgagggggcgggagacctcagccgcagccgccgccccctcccctgcagcgactcggacccgctactgcctgcccccaactccccgggcccggcccctgccctgctgcccccaacagcgtctggctcccctactaacgtccccctcttcgcccttgcccccatccccacccgcccctctcccggccctgcttttatttattttggattagccggttgcccaccccagccctctggtccatccctccctccgtgccgcgcccccctaggaccgccccctccccaaaaggcttttggatttgtgcatagctggagtgaaggcggagggagcctgctacaggccgcagcccaacccctgttttttattcagatttcccctcctttaccctttccctttttttttttttttttttttttaaagaaaccttttttaaactatttctaggtttgtgaatgtgaagccccaggccgcagggggcaaggggccaggtgccccccaccagctgagaacaaagtgtctatctgggtgtgggcccctggccgcctccctccagccctggagaggagggcagggctgcggggaggccaggccgagcccctggaaccatcccgtcctgtatcatatgtaaatactgtgaggtgatgtgcccacccctctctaagacccctcgggggtgaggggctcccccctcccctgtttctgtcccctcagacaccgttactgtaagcttgcaggcctcagctgtggccacggcaggcccgctctctcaggccctcagggtcaaggccttggttggacctgcccactccaaaaacccagtgtgggggcaaagggcgtgggaagagcagggcttgcccagcgacactgctggacaggaattaactctccaaaggtctcccctgctccctacctaggttggggcttcatggtttctgctcagtctgtcccccttccccctcgacccccgcaatgagtgggcaccaggggacgctctggcgagggcagaccccaggggaaagcaaagggcgtctcagggaacccccacattctctcactgaagtttcccaccaggatgaccccacagccagagtcccttggcagcccctcaccccagaccccccttctaaggaaaaagagaggttcagagcgttggaccttcatgaacagtggcctggctggcgtggcagggccaaggcccacccactgccatcccccttctgtgtgtccctctcccccagttatgaggcccagggcctgagctctcttccccagcattgcccccacccggaaaccccacctttggagagttaattgtctgtgtgaggtgcttaacctatcagccctgagaacacaaagcaataatctttgttactgagatgcgcggctgttcgtgttttgggttttttttttttttaatgtttcctaataaaagagaagctgcattttattggtttttatttttaattttctacacgtttgagctgagtcctgagacacttagcttccctctccctcattcccggacccttccaccccactgggcccaaccatgggctcaggaccctggaattccgttttctgatttgctttgggattttttttttttttaagatgttacatggtgtttcgaagccagcaagttaccatcctccggtgtctcttctctccacatctgtaacttctttttccaggttttattttcagttttaaattcctaataaattatttgaaaacgtt

SEQ ID NO: 18751 - DNA, 4538 bp, Homo sapiens
  source 1..4538: mol_type = unassigned DNA
attctcctgcctcagcctcccgagtagatgagatcacaggcacgtgccgccatgccgggttgacttttgtatttttagtagagacggggtttcaccatgttgcctaggctggtcttgaactcctgacctcaggcgattcacccgcctcggcctcccaaagtgttaggattacaggcgtgagccaccgcgcccggcttgaattgtacacttcaaaaggtggaattttatggtgttgaattatatctttatttttttaacggggggaaaatgacgccgctggagaggagttagcggaactgaaacaatgaaatggtgcgcgagtgtcgcctgtccccgtcgcatccatcccaacgaagtttgggccctggaacggtgcacccagaaggcctgcggggagagacgctggggcatgatctggaagaaagacgtctcaggattcgaagggaatgcagctaaggtggcggcggaggttcgcctaggactggggaggcgtccctaggctcagaagttggcccggccggagcggagatttaaaggttggagcgcagaggctcttaaagaggccgagtcgaattcccactcggcgtccaccttaaagccagctccccggcaccacggatctgacccgggtctgacctacgagaaacatggcaaccagcgccgtccccagtgacaacctccccacatacaagctggtggtggtgggggatgggggtgtgggcaaaagtgccctcaccatccagtttttccagaagatctttgtgcctgactatgaccccaccattgaagactcctacctgaaacatacggagattgacaatcaatgggccatcttggacgttctggacacagctgggcaggaggaattcagcgccatgcgggagcaatacatgcgcacgggggatggcttcctcatcgtctactccgtcactgacaaggccagctttgagcacgtggaccgcttccaccagcttatcctgcgcgtcaaagacagggagtcattcccgatgatcctcgtggccaacaaggtcgatttgatgcacttgaggaagatcaccagggagcaaggaaaagaaatggcgaccaaacacaatattccgtacatagaaaccagtgccaaggacccacctctcaatgtcgacaaagccttccatgacctcgttagagtaattaggcaacagattccggaaaaaagccagaagaagaagaagaaaaccaaatggcggggagaccgggccacaggcacccacaaactgcaatgtgtgatcttgtgacaggcctgaggccctgggcacagtgacggtggcctggccagccctcgggacccctccccacctaactgcactgaaaccatttctaaccacaacccttggcccaaggacttggtacaggaagggagaagggcaggtgggcagggagcagacagggtctggctttgcccagagggcacgggctttcccacctctcaaagagacaaggaagccacctgtaagcagaagcagcatccaagtgcccctggcccccccatgtgttgattcaacccggttcctccccctctctcggtgggtgtgttgtttattgtaactacatagtgttggtttgatgtggaagtgtttatccacatacaaagtacaaaacaagccatgaacaagcttctttcccttaccccccatccacaatgtctgagcttggatgtcttttatagatttttaaattattttagtgattattattttattaaaggggtctgggctcactgcctggtgaagtttcaagtgttcagcagacctctctggtaacatatctggaatattgttgttgttttttaaccgagttttcccatcagtgccaaaactcaactcaatctgaaagtagagtgtctgagaggacagaaggtaatgggaactgtagctggaggcctcaggccatgggtcaaacctgggagggaaagagaccctacacatggcctagaaatgagagaagagagaggtatttacccagaggattttcctatggttggggatgcaaatattagaaaacagattgtattttgctgaggggagtggctgtcatgagcatgtcagttctaaaaggggttttcattatcctggaaatgtataaactaaagtaagctgattggctttgcaaacatgttcatttgtttttcagacagtatgggttaagttctctgccctccccaggggtctgaggaggctctgggtttctcagatctgtctcttgctgcgttttcacatcagctgtgctgcttggtgcctctctgatacgaatacactgacacgtcaaagtaacctaatgtggacaccatccagaaaactccagttcatgctggatcttaaccaaaaatgattcaatactgttatcactaaaacagcaccaagacctgaagccatcttcccttggagtcaactgactaccacctctataagcctagtcaatgagcagaccccttccagtatttgtaaaagtagtactaggttgcctttttggcaatttttattgacctgttgaatcttgactataaaatgatctgagaagtaaggaaggctgggctgatgtgtggctctcatataccttctgcaagggggcagtctccccagctccctgatgatgctcacccccgcccccccacctcaggtgctgctggtgtgagccaaagactggagtttttccagctggggtgggagtggagagacaacaggaacaacgctgcaccaaagaaaaggtcagaataaaaggcagcacagctggtgaccttattttctagatgttacaaatcaggtcactatgcaaactagaatatcctcagcaggtggcctggccactctggagaaagaaacccaaggaaagtgagcacccaactggatgccaagacacccgggttctgaaaatgtgctgtgttcctacctcggcaagatcaccagcactgaggggcccagctggagaatgattctgctacaaaaggagacagttgagacttttgcttgttggaaatcaaacttcttatttgtctaaattgcccctttttctgttcctaaaaggaaggataagagagaacattccaggtgaggcacttcaaagtttccttagaccctatagtgttaagaggtattttaaacactaaaaggacaaagctcttcccaatccttatgcttccctaagtggtatctgcagcagtttgttgtgtgcagtttgatggcagctgcaaactggaggtgaggcggaggaaaggcaggtaggaaggagtaaggatggagatgctcagaatcaagagcatggcggagtaggagaagaagccctgcacacagggcagtgtccacagccagaaaactcctgctgggcaccaaccactacgagcataccccatgcccaccgtggagctgcaactcctcgacagcactgagtttgatagtctcactggaagcagatcagctgatgtagaacagagacctcggccataaaggtgagaagacatagggatttcaaccacacagttgggacagaagggacagtgcatctgttcatccatcctgcacttggcccacgttgaactccatggtgcctgagagagactagttaagggttggtcttctgtatcctctgctgttgagcctctggtaagctttcatctcccatgaactcatttccccataaatgaaatgggtaaataatgccccatttgtagaagtgggccctcatgactgaggtagcttccagataggccagagtagagtgtagagtgtgccccgtgacatccctccatcttctcctccattatcatctagcagggtcagactgggaaacctggttggccacgccacaccatgaccgaggagccaactgggacttctggctgtttgacatcctcatgttcccgttggtcttccggagaatagtgctaccctcacatcccctggagcacagccttcctgaaatgccctcaccccatgcctttgccattgtgtgctctcagatttcttccactgtttgacaccctccttagagggctgctcttttttttccagagataatcctagccatcctctccactcccacggctggggacaatggccacttactacctgtgcactttgccactcgggacacctggatggtttctcttaggactttgcccacctccttctcatggcacttgctgtggaaaatgcctggctggcctcgtggggcctgtctcacttttccaggagacatgacccactaacgtggcaactttaacccaaaggcccctcagacatgttacagcaaatctggagccacagacaggttccctccattggcagcccattgtgtttgaaattccatgtcgggtttacttggaatgaaagatacttgaattattgtgcgcctgtgagcgcccagcttctgtttcatagtcttaacaggtggccattgtcgtgaaacgagtgatgcctgaagatctcagtgatgtttgaaccttctgtgtaactttttattaagtctttgtatctctcgactgattaataaagaagagaaacacg

SEQ ID NO: 18752 - DNA, 1803 bp, Homo sapiens
  source 1..1803: mol_type = unassigned DNA
agggtcgaggcacccggcccgggctccccactggcgcgcccgcagcggcgctctatttttagcaggcgctgtggcaatataaggaatgcgcggcgcgctaggcgctcggggcgcacgctggcggcgcggtcgctttaaggaggcgccggggcggggacggaccggagtggccggctggcggggagccgtcagtccggcggccgcggggcccggcgggcgcgacgctgcctcctcaccggcgcaggctaggagggggcggcctgagtgccgtagccgagccggggctggagcgcgcggtctgacctacgagaaacatggcaaccagcgccgtccccagtgacaacctccccacatacaagctggtggtggtgggggatgggggtgtgggcaaaagtgccctcaccatccagtttttccagaagatctttgtgcctgactatgaccccaccattgaagactcctacctgaaacatacggagattgacaatcaatgggccatcttggacgttctggacacagctgggcaggaggaattcagcgccatgcgggagcaatacatgcgcacgggggatggcttcctcatcgtctactccgtcactgacaaggccagctttgagcacgtggaccgcttccaccagcttatcctgcgcgtcaaagacagggagtcattcccgatgatcctcgtggccaacaaggtcgatttgatgcacttgaggaagatcaccagggagcaaggaaaagaaatggcgaccaaacacaatattccgtacatagaaaccagtgccaaggacccacctctcaatgtcgacaaagccttccatgacctcgttagagtaattaggcaacagattccggaaaaaagccagaagaagaagaagaaaaccaaatggcggggagaccgggccacaggcacccacaaactgcaatgtgtgatcttgtgacaggcctgaggccctgggcacagtgacggtggcctggccagccctcgggacccctccccacctaactgcactgaaaccatttctaaccacaacccttggcccaaggacttggtacaggaagggagaagggcaggtgggcagggagcagacagggtctggctttgcccagagggcacgggctttcccacctctcaaagagacaaggaagccacctgtaagcagaagcagcatccaagtgcccctggcccccccatgtgttgattcaacccggttcctccccctctctcggtgggtgtgttgtttattgtaactacatagtgttggtttgatgtggaagtgtttatccacatacaaagtacaaaacaagccatgaacaagcttctttcccttaccccccatccacaatgtctgagcttggatgtcttttatagatttttaaattattttagtgattattattttattaaaggggtctgggctcactgcctggtgaagtttcaagtgttcagcagacctctctggtaacatatctggaatattgttgttgttttttaaccgagttttcccatcagtgccaaaactcaactcaatctgaaagtagagtgtctgagaggacagaaggtaatgggaactgtagctggaggcctcaggccatgggtcaaacctgggagggaaagagaccctacacatggcctagaaatgagagaagagagaggtatttacccagaggattttcctatggttggggatgcaaatattagaaaacagattgtattttgctgaggggagtggctgtcatgagcatgtcagttctaaaaggggttttcattatcctggaaatgtataaactaaagtaagctga

SEQ ID NO: 18753 - DNA, 1534 bp, Homo sapiens
  source 1..1534: mol_type = unassigned DNA
aggtgtggccgccctccgggctcggccgcgctctccgcttgcggggtgcgccctgggaccggctgtgcgtggcgttttgcccccatcgcgggctcccgcgtaacggtgtgcgttcgtgaaatcggccacgaccaagaccccagtggggagggcctgcgcgccgctcagagagaccctttcatgttctggacacagctgggcaggaggaattcagcgccatgcgggagcaatacatgcgcacgggggatggcttcctcatcgtctactccgtcactgacaaggccagctttgagcacgtggaccgcttccaccagcttatcctgcgcgtcaaagacagggagtcattcccgatgatcctcgtggccaacaaggtcgatttgatgcacttgaggaagatcaccagggagcaaggaaaagaaatggcgaccaaacacaatattccgtacatagaaaccagtgccaaggacccacctctcaatgtcgacaaagccttccatgacctcgttagagtaattaggcaacagattccggaaaaaagccagaagaagaagaagaaaaccaaatggcggggagaccgggccacaggcacccacaaactgcaatgtgtgatcttgtgacaggcctgaggccctgggcacagtgacggtggcctggccagccctcgggacccctccccacctaactgcactgaaaccatttctaaccacaacccttggcccaaggacttggtacaggaagggagaagggcaggtgggcagggagcagacagggtctggctttgcccagagggcacgggctttcccacctctcaaagagacaaggaagccacctgtaagcagaagcagcatccaagtgcccctggcccccccatgtgttgattcaacccggttcctccccctctctcggtgggtgtgttgtttattgtaactacatagtgttggtttgatgtggaagtgtttatccacatacaaagtacaaaacaagccatgaacaagcttctttcccttaccccccatccacaatgtctgagcttggatgtcttttatagatttttaaattattttagtgattattattttattaaaggggtctgggctcactgcctggtgaagtttcaagtgttcagcagacctctctggtaacatatctggaatattgttgttgttttttaaccgagttttcccatcagtgccaaaactcaactcaatctgaaagtagagtgtctgagaggacagaaggtaatgggaactgtagctggaggcctcaggccatgggtcaaacctgggagggaaagagaccctacacatggcctagaaatgagagaagagagaggtatttacccagaggattttcctatggttggggatgcaaatattagaaaacagattgtattttgctgaggggagtggctgtcatgagcatgtcagttctaaaaggggttttcattatcctggaaatgtataaactaaagtaagctgattggctttgcaaacatgttcatttgtttttcagacagtatgggttaagttctctg

SEQ ID NO: 18754 - DNA, 856 bp, Homo sapiens
  source 1..856: mol_type = unassigned DNA
gctgtggtcacaactagggcctgggctcatgcattgaactgatctggctgaggcatcagacacggtgccagtcctgccctgcggggaagacaagagcacaaagtgacaagccagtgtggtctgacctacgagaaacatggcaaccagcgccgtccccagtgacaacctccccacatacaagctggtggtggtgggggatgggggtgtgggcaaaagtgccctcaccatccagtttttccagaagatctttgtgcctgactatgaccccaccattgaagactcctacctgaaacatacggagattgacaatcaatgggccatcttggacgttctggacacagctgggcaggaggaattcagcgccatgcgggagcaatacatgcgcacgggggatggcttcctcatcgtctactccgtcactgacaaggccagctttgagcacgtggaccgcttccaccagcttatcctgcgcgtcaaagacagggagtcattcccgatgatcctcgtggccaacaaggtcgatttgatgcacttgaggaagatcaccagggagcaaggaaaagaaatggcgaccaaacacaatattccgtacatagaaaccagtgccaaggacccacctctcaatgtcgacaaagccttccatgacctcgttagagtaattaggcaacagattccggaaaaaagccagaagaagaagaagaaaaccaaatggcggggagaccgggccacaggcacccacaaactgcaatgtgtgatcttgtgacaggcctgaggccctgggcacagtgacggtggcctggccagccctcgggacccctccccacctaactgcactgaaaccatttctaaccacaac

SEQ ID NO: 18755 - DNA, 271 bp, Homo sapiens
  source 1..271: mol_type = unassigned DNA
aggtgtggccgccctccgggctcggccgcgctctccgcttgcggggtgcgccctgggaccggctgtgcgtggcgttttgcccccatcgcgggctcccgcgtaacggtgtgcgttcgtgaaatcggccacgaccaagaccccagtggggagggcctgcgcgccgctcagagagaccctttcatggtctgacctacgagaaacatggcaaccagcgccgtccccagtgacaacctccccacatacaagctggtggtggtgggggatgggggtg

SEQ ID NO: 18756 - DNA, 2772 bp, Homo sapiens
  source 1..2772: mol_type = unassigned DNA
gtggagctgctgacacaaacagtcattagcagacaacccttttgcaacaaagtatgctttaaaatgtaaactgtggagccattttccttgcgttgtccagaaggaacttcgtcctgcgtgagcctggattaatcatgagagagctcgtcaacattccactggtacatattcttactctggttgccttcagcggaactgagaaacttccaaaagctcctgtcatcaccactcctcttgaaacagtggatgccttagttgaagaagtggctactttcatgtgtgcagtggaatcctacccccagcctgagatttcctggactagaaataaaattctcattaaactctttgacacccggtacagcatccgggagaatgggcagctcctcaccatcctgagtgtggaagacagtgatgatggcatttactgctgcacggccaacaatggtgtgggaggagctgtggagagttgtggagccctgcaagtgaagatgaaacctaaaataactcgtcctcccataaatgtgaaaataatagagggattaaaagcagtcctaccatgtactacaatgggtaatcccaaaccatcagtgtcttggataaagggagacagccctctcagggaaaattcccgaattgcagttcttgaatctgggagcttgaggattcataacgtacaaaaggaagatgcaggacagtatcgatgtgtggcaaaaaacagcctcgggacagcatattccaaagtggtgaagctggaagttgaggtttttgccaggatcctgcgggctcctgaatcccacaatgtcacctttggctcctttgtgaccctgcactgtacagcaacaggcattcctgtccccaccatcacctggattgaaaacggaaatgctgtttcttctgggtccattcaagagagtgtgaaagaccgagtgattgactcaagactgcagctgtttatcaccaagccaggactctacacatgcatagctaccaataagcatggggagaagttcagtactgccaaggctgcagccaccatcagcatagcagaaatgttgttcatttcttctttcagtaaaccacagaaagataacaaaggctactgcgcccagtacagaggggaggtgtgtaatgcagtcctggcaaaagatgctcttgtttttctcaacacctcctatgcggaccctgaggaggcccaagagctactggtccacacggcctggaatgaactgaaagtagtgagcccagtctgccggccagctgctgaggctttgttgtgtaaccacatcttccaggagtgcagtcctggagtagtgcctactcctattcccatttgcagagagtactgcttggcagtaaaggagctcttctgcgcaaaagaatggctggtaatggaagagaagacccacagaggactctacagatccgagatgcatttgctgtccgtgccagaatgcagcaagcttcccagcatgcattgggaccccacggcctgtgccagactgccacatctagattataacaaagaaaacctaaaaacattcccaccaatgacgtcctcaaagccaagtgtggacattccaaatctgccttcctcctcctcttcttccttctctgtctcacctacatactccatgactgtaataatctccatcatgtccagctttgcaatatttgtgcttcttaccataactactctctattgctgccgaagaagaaaacaatggaaaaataagaaaagagaatcagcagcagtaaccctcaccacactgccttctgagctcttactagatagacttcatcccaaccccatgtaccagaggatgccgctccttctgaaccccaaattgctcagcctggagtatccaaggaataacattgaatatgtgagagacatcggagagggagcgtttggaagggtgtttcaagcaagggcaccaggcttacttccctatgaacctttcactatggtggcagtaaagatgctcaaagaagaagcctcggcagatatgcaagcggactttcagagggaggcagccctcatggcagaatttgacaaccctaacattgtgaagctattaggagtgtgtgctgtcgggaagccaatgtgcctgctctttgaatacatggcctatggtgacctcaatgagttcctccgcagcatgtcccctcacaccgtgtgcagcctcagtcacagtgacttgtctatgagggctcaggtctccagccctgggcccccacccctctcctgtgctgagcagctttgcattgccaggcaggtggcagctggcatggcttacctctcagaacgtaagtttgttcaccgagatttagccaccaggaactgcctggtgggcgagaacatggtggtgaaaattgccgactttggcctctccaggaacatctactcagcagactactacaaagctaatgaaaacgacgctatccctatccgttggatgccaccagagtccattttttataaccgctacactacagagtctgatgtgtgggcctatggcgtggtcctctgggagatcttctcctatggcctgcagccctactatgggatggcccatgaggaggtcatttactacgtgcgagatggcaacatcctctcctgccctgagaactgccccgtggagctgtacaatctcatgcgtctatgttggagcaagctgcctgcagacagacccagtttcaccagtattcaccgaattctggaacgcatgtgtgagagggcagagggaactgtgagtgtctaaggttgaagac

SEQ ID NO: 18757 - DNA, 1221 bp, Homo sapiens
  source 1..1221: mol_type = unassigned DNA
ccctacccattagccccaagatcatagaaaaatcttccaagctggaaactggttgacaatgatcctgactttcagtaggtgtgttttttaaactctgtatacctttttcctctacctgtgttgttatttgaatatgaagttgggagaagacatatcagagattcccaatctaatacgttttaaatttgacgtttttttcccttagactagcattaattgtgtttcacaacaaaacgagatagcatttcatctcacgggacagtacactagatttcatgaggtctcatattatttacagtaaaaagtttctttcataaacgcgcttttttcaagaacaatttaccatgatgatgtcttgaaaacacagaatttaggctctgccacaaatttgctttaacatgtaatgattcatcaagttttgttctccatatactattttagagagtactgcttggcagtaaaggagctcttctgcgcaaaagaatggctggtaatggaagagaagacccacagaggactctacagatccgagatgcatttgctgtccgtgccagaatgcagcaagcttcccagcatgcattgggaccccacggcctgtgccagactgccacatctagagaatcagcagcagtaaccctcaccacactgccttctgagctcttactagatagacttcatcccaaccccatgtaccagaggatgccgctccttctgaaccccaaattgctcagcctggagtatccaaggaataacattgaatatgtgagagacatcggagagggagcgtttggaagggtgtttcaagcaagggcaccaggcttacttccctatgaacctttcactatggtggcagtaaagatgctcaaagaagaagcctcggcagatatgcaagcggactttcagagggaggcagccctcatggcagaatttgacaaccctaacattgtgaagctattaggtatgaaaatacaagtgaggatatgtatttcatcagaaaacagaggctttccaagtttttctccccttgttcgtgctttttccttttctccttgatcagtgagacgtttcagttccttttcaaatttagcttcttcaccttggtctatcccaaccctataggacattcatggcttaatggattatccctctttaaattcatcacttcaatttgtctctgtctttgctgcctcctatttataaaaatgtttaaaatgtccccat

SEQ ID NO: 18758 - DNA, 435 bp, Homo sapiens
  source 1..435: mol_type = unassigned DNA
aatggtgtgggaggagctgtggagagttgtggagccctgcaagtgaagatgaaacctaaaataactcgtcctcccataaatgtgaaaataatagagggattaaaagcagtcctaccatgtactacaatgggtaatcccaaaccatcagtgtcttggataaagggagacagccctctcagggaaaattcccgaattgcagttcttgaatctgggagcttgaggattcataacgtacaaaaggaagatgcaggacagtatcgatgtgtggcaaaaaacagcctcgggacagcatattccaaagtggtgaagctggaagttgagggtgctaaaggcattcacacccagtttgtggcttctgccctccagctaagatcgttccttagctgtccccaaatatgagaatgaatatacaatgataaaacaaaaataaatcaa

SEQ ID NO: 18759 - DNA, 839 bp, Homo sapiens
  source 1..839: mol_type = unassigned DNA
gtggagctgctgacacaaacagtcattagcagacaacccttttgcaacaaagtatgctttaaaatgtaaactgtggagccattttccttgcgttgtccagaaggaacttcgtcctgcgtgagcctggattaatcatgagagagctcgtcaacattccactggtacatattcttactctggttgccttcagcggaactgagaaacttccaaaagctcctgtcatcaccactcctcttgaaacagtggatgccttagttgaagaagtggctactttcatgtgtgcagtggaatcctacccccagcctgagatttcctggactagaaataaaattctcattaaactctttgacacccggtacagcatccgggagaatgggcagctcctcaccatcctgagtgtggaagacagtgatgatggcatttactgctgcacggccaacaatggtgtgggaggagctgtggagagttgtggagccctgcaagtgaagatgaaacctaaaataactcgtcctcccataaatgtgaaaataatagagggattaaaagcagtcctaccatgtactacaatgggtaatcccaaaccatcagtgtcttggataaagggagacagccctctcagggaaaattcccgaattgcagttcttgaatctgggagcttgaggattcataacgtacaaaaggaagatgcaggacagtatcgatgtgtggcaaaaaacagcctcgggacagcatattccaaagtggtgaagctggaagttgagggtgctaaaggcattcacacccagtttgtggcttctgccctccagctaagatcgttccttagctgtccccaaatatga

SEQ ID NO: 18760 - DNA, 1696 bp, Homo sapiens
  source 1..1696: mol_type = unassigned DNA
gtggagctgctgacacaaacagtcattagcagacaacccttttgcaacaaagtatgctttaaaatgtaaactgtggagccattttccttgcgttgtccagaaggaacttcgtcctgcgtgagcctggattaatcatgagagagctcgtcaacattccactggtacatattcttactctggttgccttcagcggaactgagaaacttccaaaagctcctgtcatcaccactcctcttgaaacagtggatgccttagttgaagaagtggctactttcatgtgtgcagtggaatcctacccccagcctgagatttcctggactagaaataaaattctcattaaactctttgacacccggtacagcatccgggagaatgggcagctcctcaccatcctgagtgtggaagacagtgatgatggcatttactgctgcacggccaacaatggtgtgggaggagctgtggagagttgtggagccctgcaagtgaagatgaaacctaaaataactcgtcctcccataaatgtgaaaataatagagggattaaaagcagtcctaccatgtactacaatgggtaatcccaaaccatcagtgtcttggataaagggagacagccctctcagggaaaattcccgaattgcagttcttgaatctgggagcttgaggattcataacgtacaaaaggaagatgcaggacagtatcgatgtgtggcaaaaaacagcctcgggacagcatattccaaagtggtgaagctggaagttgaggaagaaagtgaacccgaacaagatactaaagtttttgccaggatcctgcgggctcctgaatcccacaatgtcacctttggctcctttgtgaccctgcactgtacagcaacaggcattcctgtccccaccatcacctggattgaaaacggaaatgctgtttcttctgggtccattcaagagagtgtgaaagaccgagtgattgactcaagactgcagctgtttatcaccaagccaggactctacacatgcatagctaccaataagcatggggagaagttcagtactgccaaggctgcagccaccatcagcatagcagattttagagagtactgcttggcagtaaaggagctcttctgcgcaaaagaatggctggtaatggaagagaagacccacagaggactctacagatccgagatgcatttgctgtccgtgccagaatgcagcaagcttcccagcatgcattgggaccccacggcctgtgccagactgccacatctagagaatcagcagcagtaaccctcaccacactgccttctgagctcttactagatagacttcatcccaaccccatgtaccagaggatgccgctccttctgaaccccaaattgctcagcctggagtatccaaggaataacattgaatatgtgagagacatcggagagggagcgtttggaagggtgtttcaagcaagggcaccaggcttacttccctatgaacctttcactatggtggcagtaaagatgctcaaagaagaagcctcggcagatatgcaagcggactttcagagggaggcagccctcatggcagaatttgacaaccctaacattgtgaagctattaggtatgaaaatacaagtgaggatatgtatttcatcagaaaacagaggctttccaagtttttctccccttgttcgtgctttttccttttctccttga

SEQ ID NO: 18761 - DNA, 2496 bp, Homo sapiens
  source 1..2496: mol_type = unassigned DNA
gtggagctgctgacacaaacagtcattagcagacaacccttttgcaacaaagtatgctttaaaatgtaaactgtggagccattttccttgcgttgtccagaaggaacttcgtcctgcgtgagcctggattaatcatgagagagctcgtcaacattccactggtacatattcttactctggttgccttcagcggaactgagaaacttccaaaagctcctgtcatcaccactcctcttgaaacagtggatgccttagttgaagaagtggctactttcatgtgtgcagtggaatcctacccccagcctgagatttcctggactagaaataaaattctcattaaactctttgacacccggtacagcatccgggagaatgggcagctcctcaccatcctgagtgtggaagacagtgatgatggcatttactgctgcacggccaacaatggtgtgggaggagctgtggagagttgtggagccctgcaagtgaagatgaaacctaaaataactcgtcctcccataaatgtgaaaataatagagggattaaaagcagtcctaccatgtactacaatgggtaatcccaaaccatcagtgtcttggataaagggagacagccctctcagggaaaattcccgaattgcagttcttgaatctgggagcttgaggattcataacgtacaaaaggaagatgcaggacagtatcgatgtgtggcaaaaaacagcctcgggacagcatattccaaagtggtgaagctggaagttgaggaagaaagtgaacccgaacaagatactaaagtttttgccaggatcctgcgggctcctgaatcccacaatgtcacctttggctcctttgtgaccctgcactgtacagcaacaggcattcctgtccccaccatcacctggattgaaaacggaaatgctgtttcttctgggtccattcaagagagtgtgaaagaccgagtgattgactcaagactgcagctgtttatcaccaagccaggactctacacatgcatagctaccaataagcatggggagaagttcagtactgccaaggctgcagccaccatcagcatagcagattttagagagtactgcttggcagtaaaggagctcttctgcgcaaaagaatggctggtaatggaagagaagacccacagaggactctacagatccgagatgcatttgctgtccgtgccagaatgcagcaagcttcccagcatgcattgggaccccacggcctgtgccagactgccacatctagcattcccaccaatgacgtcctcaaagccaagtgtggacattccaaatctgccttcctcctcctcttcttccttctctgtctcacctacatactccatgactgtaataatctccatcatgtccagctttgcaatatttgtgcttcttaccataactactctctattgctgccgaagaagaaaacaatggaaaaataagaaaagagaatcagcagcagtaaccctcaccacactgccttctgagctcttactagatagacttcatcccaaccccatgtaccagaggatgccgctccttctgaaccccaaattgctcagcctggagtatccaaggaataacattgaatatgtgagagacatcggagagggagcgtttggaagggtgtttcaagcaagggcaccaggcttacttccctatgaacctttcactatggtggcagtaaagatgctcaaagaagaagcctcggcagatatgcaagcggactttcagagggaggcagccctcatggcagaatttgacaaccctaacattgtgaagctattaggagtgtgtgctgtcgggaagccaatgtgcctgctctttgaatacatggcctatggtgacctcaatgagttcctccgcagcatgtcccctcacaccgtgtgcagcctcagtcacagtgacttgtctatgagggctcaggtctccagccctgggcccccacccctctcctgtgctgagcagctttgcattgccaggcaggtggcagctggcatggcttacctctcagaacgtaagtttgttcaccgagatttagccaccaggaactgcctggtgggcgagaacatggtggtgaaaattgccgactttggcctctccaggaacatctactcagcagactactacaaagctaatgaaaacgacgctatccctatccgttggatgccaccagagtccattttttataaccgctacactacagagtctgatgtgtgggcctatggcgtggtcctctgggagatcttctcctatggcctgcagccctactatgggatggcccatgaggaggtcatttactacgtgcgagatggcaacatcctctcctgccctgagaactgccccgtggagctgtacaatctcatgcgtctatgttggagcaagctgcctgcagacagacccagtttcaccagtattcaccgaattctggaacgcatgtgtgagagggcagagggaactgtgagtgtctaaggttgaagac

SEQ ID NO: 18762 - DNA, 2754 bp, Homo sapiens
  source 1..2754: mol_type = unassigned DNA
gtggagctgctgacacaaacagtcattagcagacaacccttttgcaacaaagtatgctttaaaatgtaaactgtggagccattttccttgcgttgtccagaaggaacttcgtcctgcgtgagcctggattaatcatgagagagctcgtcaacattccactggtacatattcttactctggttgccttcagcggaactgagaaacttccaaaagctcctgtcatcaccactcctcttgaaacagtggatgccttagttgaagaagtggctactttcatgtgtgcagtggaatcctacccccagcctgagatttcctggactagaaataaaattctcattaaactctttgacacccggtacagcatccgggagaatgggcagctcctcaccatcctgagtgtggaagacagtgatgatggcatttactgctgcacggccaacaatggtgtgggaggagctgtggagagttgtggagccctgcaagtgaagatgaaacctaaaataactcgtcctcccataaatgtgaaaataatagagggattaaaagcagtcctaccatgtactacaatgggtaatcccaaaccatcagtgtcttggataaagggagacagccctctcagggaaaattcccgaattgcagttcttgaatctgggagcttgaggattcataacgtacaaaaggaagatgcaggacagtatcgatgtgtggcaaaaaacagcctcgggacagcatattccaaagtggtgaagctggaagttgaggtttttgccaggatcctgcgggctcctgaatcccacaatgtcacctttggctcctttgtgaccctgcactgtacagcaacaggcattcctgtccccaccatcacctggattgaaaacggaaatgctgtttcttctgggtccattcaagagagtgtgaaagaccgagtgattgactcaagactgcagctgtttatcaccaagccaggactctacacatgcatagctaccaataagcatggggagaagttcagtactgccaaggctgcagccaccatcagcatagcagaatggagtaaaccacagaaagataacaaaggctactgcgcccagtacagaggggaggtgtgtaatgcagtcctggcaaaagatgctcttgtttttctcaacacctcctatgcggaccctgaggaggcccaagagctactggtccacacggcctggaatgaactgaaagtagtgagcccagtctgccggccagctgctgaggctttgttgtgtaaccacatcttccaggagtgcagtcctggagtagtgcctactcctattcccatttgcagagagtactgcttggcagtaaaggagctcttctgcgcaaaagaatggctggtaatggaagagaagacccacagaggactctacagatccgagatgcatttgctgtccgtgccagaatgcagcaagcttcccagcatgcattgggaccccacggcctgtgccagactgccacatctagattataacaaagaaaacctaaaaacattcccaccaatgacgtcctcaaagccaagtgtggacattccaaatctgccttcctcctcctcttcttccttctctgtctcacctacatactccatgactgtaataatctccatcatgtccagctttgcaatatttgtgcttcttaccataactactctctattgctgccgaagaagaaaacaatggaaaaataagaaaagagaatcagcagcagtaaccctcaccacactgccttctgagctcttactagatagacttcatcccaaccccatgtaccagaggatgccgctccttctgaaccccaaattgctcagcctggagtatccaaggaataacattgaatatgtgagagacatcggagagggagcgtttggaagggtgtttcaagcaagggcaccaggcttacttccctatgaacctttcactatggtggcagtaaagatgctcaaagaagaagcctcggcagatatgcaagcggactttcagagggaggcagccctcatggcagaatttgacaaccctaacattgtgaagctattaggagtgtgtgctgtcgggaagccaatgtgcctgctctttgaatacatggcctatggtgacctcaatgagttcctccgcagcatgtcccctcacaccgtgtgcagcctcagtcacagtgacttgtctatgagggctcaggtctccagccctgggcccccacccctctcctgtgctgagcagctttgcattgccaggcaggtggcagctggcatggcttacctctcagaacgtaagtttgttcaccgagatttagccaccaggaactgcctggtgggcgagaacatggtggtgaaaattgccgactttggcctctccaggaacatctactcagcagactactacaaagctaatgaaaacgacgctatccctatccgttggatgccaccagagtccattttttataaccgctacactacagagtctgatgtgtgggcctatggcgtggtcctctgggagatcttctcctatggcctgcagccctactatgggatggcccatgaggaggtcatttactacgtgcgagatggcaacatcctctcctgccctgagaactgccccgtggagctgtacaatctcatgcgtctatgttggagcaagctgcctgcagacagacccagtttcaccagtattcaccgaattctggaacgcatgtgtgagagggcagagggaactgtgagtgtctaaggttgaagac

SEQ ID NO: 18763 - DNA, 3321 bp, Homo sapiens
  source 1..3321: mol_type = unassigned DNA
gctgacacaaacagtcattagcagacaacccttttgcaacaaagtatgctttaaaatgtaaactgtggagccattttccttgcgttgtccagaaggaacttcgtcctgcgtgagcctggattaatcatgagagagctcgtcaacattccactggtacatattcttactctggttgccttcagcggaactgagaaacttccaaaagctcctgtcatcaccactcctcttgaaacagtggatgccttagttgaagaagtggctactttcatgtgtgcagtggaatcctacccccagcctgagatttcctggactagaaataaaattctcattaaactctttgacacccggtacagcatccgggagaatgggcagctcctcaccatcctgagtgtggaagacagtgatgatggcatttactgctgcacggccaacaatggtgtgggaggagctgtggagagttgtggagccctgcaagtgaagatgaaacctaaaataactcgtcctcccataaatgtgaaaataatagagggattaaaagcagtcctaccatgtactacaatgggtaatcccaaaccatcagtgtcttggataaagggagacagccctctcagggaaaattcccgaattgcagttcttgaatctgggagcttgaggattcataacgtacaaaaggaagatgcaggacagtatcgatgtgtggcaaaaaacagcctcgggacagcatattccaaagtggtgaagctggaagttgaggtttttgccaggatcctgcgggctcctgaatcccacaatgtcacctttggctcctttgtgaccctgcactgtacagcaacaggcattcctgtccccaccatcacctggattgaaaacggaaatgctgtttcttctgggtccattcaagagagtgtgaaagaccgagtgattgactcaagactgcagctgtttatcaccaagccaggactctacacatgcatagctaccaataagcatggggagaagttcagtactgccaaggctgcagccaccatcagcatagcagaaatgttgttcatttcttctttcagtaaaccacagaaagataacaaaggctactgcgcccagtacagaggggaggtgtgtaatgcagtcctggcaaaagatgctcttgtttttctcaacacctcctatgcggaccctgaggaggcccaagagctactggtccacacggcctggaatgaactgaaagtagtgagcccagtctgccggccagctgctgaggctttgttgtgtaaccacatcttccaggagtgcagtcctggagtagtgcctactcctattcccatttgcagagagtactgcttggcagtaaaggagctcttctgcgcaaaagaatggctggtaatggaagagaagacccacagaggactctacagatccgagatgcatttgctgtccgtgccagaatgcagcaagcttcccagcatgcattgggaccccacggcctgtgccagactgccacatctagcattcccaccaatgacgtcctcaaagccaagtgtggacattccaaatctgccttcctcctcctcttcttccttctctgtctcacctacatactccatgactgtaataatctccatcatgtccagctttgcaatatttgtgcttcttaccataactactctctattgctgccgaagaagaaaacaatggaaaaataagaaaagagaatcagcagcagtaaccctcaccacactgccttctgagctcttactagatagacttcatcccaaccccatgtaccagaggatgccgctccttctgaaccccaaattgctcagcctggagtatccaaggaataacattgaatatgtgagagacatcggagagggagcgtttggaagggtgtttcaagcaagggcaccaggcttacttccctatgaacctttcactatggtggcagtaaagatgctcaaagaagaagcctcggcagatatgcaagcggactttcagagggaggcagccctcatggcagaatttgacaaccctaacattgtgaagctattaggagtgtgtgctgtcgggaagccaatgtgcctgctctttgaatacatggcctatggtgacctcaatgagttcctccgcagcatgtcccctcacaccgtgtgcagcctcagtcacagtgacttgtctatgagggctcaggtctccagccctgggcccccacccctctcctgtgctgagcagctttgcattgccaggcaggtggcagctggcatggcttacctctcagaacgtaagtttgttcaccgagatttagccaccaggaactgcctggtgggcgagaacatggtggtgaaaattgccgactttggcctctccaggaacatctactcagcagactactacaaagctaatgaaaacgacgctatccctatccgttggatgccaccagagtccattttttataaccgctacactacagagtctgatgtgtgggcctatggcgtggtcctctgggagatcttctcctatggcctgcagccctactatgggatggcccatgaggaggtcatttactacgtgcgagatggcaacatcctctcctgccctgagaactgccccgtggagctgtacaatctcatgcgtctatgttggagcaagctgcctgcagacagacccagtttcaccagtattcaccgaattctggaacgcatgtgtgagagggcagagggaactgtgagtgtctaaggttgaagacgttcaaataaaatgctgcagtttcctctcagactctgtgagccaggggaatcctacaccagaggcccaacaagacccacataggaaagagtaagagtaaacatgagtagtgtgttgtttgcttcccagggagagcaaagacagtgcaaaacccatgtggtagacggacccattgaaagccagtgattggaaacacaggctaggaaatgtgtcagataatggagacaactattcttcttcatgaaggtttgtaatacacactgcacagggaagaatgtcatcctgttcagtttccaaagtagctggtcacagagtaaagctctgctgtattaaattttaatatgaaatgggattcagagcttcattttttaattgagttaattcctgtccattgtgaaagtagcttaatcgtcatgtaagacacttaggtgaagtacagaaaactaaaaagaaggaaaagccactcattctgtctccccccaaagacgagtcttagtgttttattaaatctttcttgcatttaatgcataattttatatttgtttgtattctgcagagttgtggttacattttattgataga

SEQ ID NO: 18764 - DNA, 2754 bp, Homo sapiens
  source 1..2754: mol_type = unassigned DNA
gtggagctgctgacacaaacagtcattagcagacaacccttttgcaacaaagtatgctttaaaatgtaaactgtggagccattttccttgcgttgtccagaaggaacttcgtcctgcgtgagcctggattaatcatgagagagctcgtcaacattccactggtacatattcttactctggttgccttcagcggaactgagaaacttccaaaagctcctgtcatcaccactcctcttgaaacagtggatgccttagttgaagaagtggctactttcatgtgtgcagtggaatcctacccccagcctgagatttcctggactagaaataaaattctcattaaactctttgacacccggtacagcatccgggagaatgggcagctcctcaccatcctgagtgtggaagacagtgatgatggcatttactgctgcacggccaacaatggtgtgggaggagctgtggagagttgtggagccctgcaagtgaagatgaaacctaaaataactcgtcctcccataaatgtgaaaataatagagggattaaaagcagtcctaccatgtactacaatgggtaatcccaaaccatcagtgtcttggataaagggagacagccctctcagggaaaattcccgaattgcagttcttgaatctgggagcttgaggattcataacgtacaaaaggaagatgcaggacagtatcgatgtgtggcaaaaaacagcctcgggacagcatattccaaagtggtgaagctggaagttgaggtttttgccaggatcctgcgggctcctgaatcccacaatgtcacctttggctcctttgtgaccctgcactgtacagcaacaggcattcctgtccccaccatcacctggattgaaaacggaaatgctgtttcttctgggtccattcaagagagtgtgaaagaccgagtgattgactcaagactgcagctgtttatcaccaagccaggactctacacatgcatagctaccaataagcatggggagaagttcagtactgccaaggctgcagccaccatcagcatagcagctttcagtaaaccacagaaagataacaaaggctactgcgcccagtacagaggggaggtgtgtaatgcagtcctggcaaaagatgctcttgtttttctcaacacctcctatgcggaccctgaggaggcccaagagctactggtccacacggcctggaatgaactgaaagtagtgagcccagtctgccggccagctgctgaggctttgttgtgtaaccacatcttccaggagtgcagtcctggagtagtgcctactcctattcccatttgcagagagtactgcttggcagtaaaggagctcttctgcgcaaaagaatggctggtaatggaagagaagacccacagaggactctacagatccgagatgcatttgctgtccgtgccagaatgcagcaagcttcccagcatgcattgggaccccacggcctgtgccagactgccacatctagattataacaaagaaaacctaaaaacattcccaccaatgacgtcctcaaagccaagtgtggacattccaaatctgccttcctcctcctcttcttccttctctgtctcacctacatactccatgactgtaataatctccatcatgtccagctttgcaatatttgtgcttcttaccataactactctctattgctgccgaagaagaaaacaatggaaaaataagaaaagagaatcagcagcagtaaccctcaccacactgccttctgagctcttactagatagacttcatcccaaccccatgtaccagaggatgccgctccttctgaaccccaaattgctcagcctggagtatccaaggaataacattgaatatgtgagagacatcggagagggagcgtttggaagggtgtttcaagcaagggcaccaggcttacttccctatgaacctttcactatggtggcagtaaagatgctcaaagaagaagcctcggcagatatgcaagcggactttcagagggaggcagccctcatggcagaatttgacaaccctaacattgtgaagctattaggagtgtgtgctgtcgggaagccaatgtgcctgctctttgaatacatggcctatggtgacctcaatgagttcctccgcagcatgtcccctcacaccgtgtgcagcctcagtcacagtgacttgtctatgagggctcaggtctccagccctgggcccccacccctctcctgtgctgagcagctttgcattgccaggcaggtggcagctggcatggcttacctctcagaacgtaagtttgttcaccgagatttagccaccaggaactgcctggtgggcgagaacatggtggtgaaaattgccgactttggcctctccaggaacatctactcagcagactactacaaagctaatgaaaacgacgctatccctatccgttggatgccaccagagtccattttttataaccgctacactacagagtctgatgtgtgggcctatggcgtggtcctctgggagatcttctcctatggcctgcagccctactatgggatggcccatgaggaggtcatttactacgtgcgagatggcaacatcctctcctgccctgagaactgccccgtggagctgtacaatctcatgcgtctatgttggagcaagctgcctgcagacagacccagtttcaccagtattcaccgaattctggaacgcatgtgtgagagggcagagggaactgtgagtgtctaaggttgaagac

SEQ ID NO: 18765 - DNA, 2496 bp, Homo sapiens
  source 1..2496: mol_type = unassigned DNA
gtggagctgctgacacaaacagtcattagcagacaacccttttgcaacaaagtatgctttaaaatgtaaactgtggagccattttccttgcgttgtccagaaggaacttcgtcctgcgtgagcctggattaatcatgagagagctcgtcaacattccactggtacatattcttactctggttgccttcagcggaactgagaaacttccaaaagctcctgtcatcaccactcctcttgaaacagtggatgccttagttgaagaagtggctactttcatgtgtgcagtggaatcctacccccagcctgagatttcctggactagaaataaaattctcattaaactctttgacacccggtacagcatccgggagaatgggcagctcctcaccatcctgagtgtggaagacagtgatgatggcatttactgctgcacggccaacaatggtgtgggaggagctgtggagagttgtggagccctgcaagtgaagatgaaacctaaaataactcgtcctcccataaatgtgaaaataatagagggattaaaagcagtcctaccatgtactacaatgggtaatcccaaaccatcagtgtcttggataaagggagacagccctctcagggaaaattcccgaattgcagttcttgaatctgggagcttgaggattcataacgtacaaaaggaagatgcaggacagtatcgatgtgtggcaaaaaacagcctcgggacagcatattccaaagtggtgaagctggaagttgaggaagaaagtgaacccgaacaagatactaaagtttttgccaggatcctgcgggctcctgaatcccacaatgtcacctttggctcctttgtgaccctgcactgtacagcaacaggcattcctgtccccaccatcacctggattgaaaacggaaatgctgtttcttctgggtccattcaagagagtgtgaaagaccgagtgattgactcaagactgcagctgtttatcaccaagccaggactctacacatgcatagctaccaataagcatggggagaagttcagtactgccaaggctgcagccaccatcagcatagcagcctggaaaaagtactgcttggcagtaaaggagctcttctgcgcaaaagaatggctggtaatggaagagaagacccacagaggactctacagatccgagatgcatttgctgtccgtgccagaatgcagcaagcttcccagcatgcattgggaccccacggcctgtgccagactgccacatctagcattcccaccaatgacgtcctcaaagccaagtgtggacattccaaatctgccttcctcctcctcttcttccttctctgtctcacctacatactccatgactgtaataatctccatcatgtccagctttgcaatatttgtgcttcttaccataactactctctattgctgccgaagaagaaaacaatggaaaaataagaaaagagaatcagcagcagtaaccctcaccacactgccttctgagctcttactagatagacttcatcccaaccccatgtaccagaggatgccgctccttctgaaccccaaattgctcagcctggagtatccaaggaataacattgaatatgtgagagacatcggagagggagcgtttggaagggtgtttcaagcaagggcaccaggcttacttccctatgaacctttcactatggtggcagtaaagatgctcaaagaagaagcctcggcagatatgcaagcggactttcagagggaggcagccctcatggcagaatttgacaaccctaacattgtgaagctattaggagtgtgtgctgtcgggaagccaatgtgcctgctctttgaatacatggcctatggtgacctcaatgagttcctccgcagcatgtcccctcacaccgtgtgcagcctcagtcacagtgacttgtctatgagggctcaggtctccagccctgggcccccacccctctcctgtgctgagcagctttgcattgccaggcaggtggcagctggcatggcttacctctcagaacgtaagtttgttcaccgagatttagccaccaggaactgcctggtgggcgagaacatggtggtgaaaattgccgactttggcctctccaggaacatctactcagcagactactacaaagctaatgaaaacgacgctatccctatccgttggatgccaccagagtccattttttataaccgctacactacagagtctgatgtgtgggcctatggcgtggtcctctgggagatcttctcctatggcctgcagccctactatgggatggcccatgaggaggtcatttactacgtgcgagatggcaacatcctctcctgccctgagaactgccccgtggagctgtacaatctcatgcgtctatgttggagcaagctgcctgcagacagacccagtttcaccagtattcaccgaattctggaacgcatgtgtgagagggcagagggaactgtgagtgtctaaggttgaagac

SEQ ID NO: 18766 - DNA, 6422 bp, Homo sapiens
  source 1..6422: mol_type = unassigned DNA
ttacatcttatagcacccagtgaattatgatatggggctgcggtttatttgctctggcgacaatatggcttacttgccgtggaatatcccggtatttcagaagtaacatattatttttaaagagggagctttgctttctctaaatcacatggtgcaaagttgggaatacagtggcctgtaaattacaaatattatttacaaactagaaggaaagctgacatgtgtttgtgcctgtgtgacagtttcactaaggaattccaaaactgtggatagcctgttacttgagaaaaatacacggtggcagtcttgcagatgtttttcccgcctgttagccctccaggttcaaaaactgtttggtgcattttaaggcggcagtctcaccagatcgcaggattctagtctaattggcttctaaccttcaatctaaccttgccggcttccttgcaaagcccggtgcaagggcctctttcaaaatgaacccactggtgtgcctagcagtcggtagaagaagcgggagggcgtccggtctgcacgcccgccgcgaggttacaatgctgaacgcatgagatggaagataccaacgggaggccgaggggatccacggcgcccgcgcgggctccggcttcctcctgctctcggcgccgctgggcgaccgcccatgacccgctcttgcgggctctgtccggttgacaggcgaccctgtggcccggggaagcgcgggagggcgccggcggaaagttgaagagcgtttttctcgccgccgcgtgcattaggagctcgacgagtccgccctgggcttcctggtggggctgggcgggcgggggaggggccgcgcagcagcagcggaagccagacctcggcgataagaggctgcacagcgacatgcaacagtcttttcactgcagctgaatgagttgtggcgcccacaatgctcccatgacaaggagctgacaagttccattttccgtcgcgggcatcttggaatcatgactcccacaatgccttgggcacttggtcgacagtggggccgcctctgaaaaaaaaatgtgagaggttggtactaagaagtgcctttcctgacgtctctgctgcttggaaccgcttctagagcagtctctgcttttgccttgcttgctgccagctagactgtgacgacagcacatccaccctccacctctagcccagacacccccatttctacttataatcaagagaaaagctctaagtatctggcattgccctaggctgctttagtgttaaaagaaaagtttgctgaaaaagtaagatatcttctgccaggaaatcaaggaggaaaaaaaaaatcattttctcgattttgctctaaactgctgcatctgtctatgccaaactaatcaataccgattgcaccaccaaactccattgcaaattcagctgtgaggagattccctttcagacaactttgctgaaagcagcttggaaattcggtgtcgaagggtctgccacgttttcatgcttgcattttgggctccaaattggcactgggaaggggttactgagagcacaaggctgataccaggccctacttttaaacgttcatctacttacaatcctagtatttctctaaaaaccaaaacctctttgaattaacagtttcatgctgtgaatttctagtgggagatcttttccttgatattgacgacacaattttccatgtacttttaaagcagggagtggggaaaagtattttgaggggacattttcatcatcagttcagctttttttttttggttgttgctcttttttgggggggttgggtttgttggtttcactgaaacatttaactacctgtaaaatctaaacatggctgttagtgtcacaccaattcgggacacaaaatggctaacactggaagtatgtagagagttccagagggggacttgctcacggccagacacggaatgtaaatttgcacatccttcgaaaagctgccaagttgaaaatggacgagtaatcgcctgctttgattcattgaaaggccgttgctccagggagaactgcaaatatcttcatccacccccacatttaaaaacgcagttggagataaatggacgcaataacttgattcagcagaagaacatggccatgttggcccagcaaatgcaactagccaatgccatgatgcctggtgccccattacaacccgtgccaatgttttcagttgcaccaagcttagccaccaatgcatcagcagccgcctttaatccctatctgggacctgtttctccaagcctggtcccggcagagatcttgccgactgcaccaatgttggttacagggaatccgggtgtccctgtacctgcagctgctgcagctgctgcacagaaattaatgcgaacagacagacttgaggtatgtcgagagtaccaacgtggcaattgcaaccgaggagaaaatgattgtcggtttgctcatcctgctgacagcacaatgattgacaccaatgacaacacagtcactgtgtgtatggattacatcaaagggagatgctctcgggaaaagtgcaaatactttcatccccctgcacatttgcaagccaagatcaaggctgcccaataccaggtcaaccaggctgcagctgcacaggctgcagccaccgcagctgccatgactcagtcggctgtcaaatcactgaagcgacccctcgaggcaacctttgacctgggaattcctcaagctgtacttcccccattaccaaagaggcctgctcttgaaaaaaccaacggtgccaccgcagtctttaacactggtattttccaataccaacaggctctagccaacatgcagttacaacagcatacagcatttctcccaccagttcccatggtgcacggtgctacgccagccactgtgtccgcagcaacaacatctgccacaagtgttcccttcgctgcaacagccacagccaaccagatacccataatatctgccgaacatctgactagccacaagtatgttacccagatgtagaattttcatcactaaacaatcatgctaaagaggaaaggacagtgtgcttggttagagtaaaggacgaggtcattagccatattgtatatatcgtcaagcaacacacacaaaagttcctcagccacaagacatccacatattgcatgttaaccagaagaaaagacaacattttccggaaatccactgcacactgttgcctatacactttgtacatttaattgatatttgtgctgaggtgatattcctgtctaaaagaacaacattgtctttcttttctagcacagagttatgcattcaaagatgcatacctagttagtttcctatatattcatgccatcttgaaaagacagactatggtgtaaccatgattctattatgtattggtacgtctgtagaccaagatataattttttaaaaataagtttatttctttcaaggtttacaaataacaaaggtgcaccttgtatttaaaattgccattatagatgagagcgtgcatgcacagtcatttttgtttaagagtaatatttttaatgtaatagattgtaagacgtggtgagggagggatctgacagagatgaatgtgccaagcaaaaccacaactgtgtatattttaaagcacatcatggctttaagtaccatgttgttaaggattctcatgaagtgccatagactgtacatcaaattagagtattatttcttcagtgttattgttttcagagccacattttgttgcatatttgctagtactaatcagtcaaagggcaccattctttttttttttttttgaaaccaaagctgtctcagaaatggccaatttaactttacagtaacaatagacagcacaacacaaactctctcaatacagataaactcacacatactggagatatatatataatagatatatataaaattattttaatgcattgtagtgtaatatttatgcatactatactgtataacatgttattcaaaagggattgccatttctgagacacagtaacaaaaaaatgaggaaattattttgcttctatttatagcctctgtcaaaagtcaaaagactataaatgctttgcaaaaatggtttcacgtttgcttaaatgcttcatcacagtcacattcaaaatagtgactctaaacaaagaagaaagcagcactgtcatcagatgcatgataaaccaaaatatgaaaatgggaaatgtttaattaacctagtaattgggtgggttaagtacatgggtgaattttatatgtgatttttgttttgttttgttttgttcagattaactgcttatagccttagaaagccttttacaaaattaaaaaaaaaatagatgtgcattcagtttttaagaatggaatcatccaaaggaattcctttttttgaggtttggatgttgcagctagtaaaggatatttttgctctgttcagcagttctaaaaattgctgaagtaggggccaggtcactggtagttatagtatggaatgggagaagtgaaagttcagttatagaactttccatacttccaagtttactgcaagtttttatgcttgagagagatgctttctaatataagactgatgtgttgattttactgattgtactgtacatctattaaagccttagattattacattacgggttggaacccataccaatgtaatttcaatcgtgttaagaaagtaatggtgacttcacatgttattgtagttagttacattatagaatattacttatttttcttgttaaaatgtagtttttcatttcctacatttattagattttcattttctattaacaattgaataccatttcagtttatagacttgttttattagattttaccaatgaatttttcaaaatacaaaaaaaagtagtttttccttcataacatactcagttttgaattacatgtagtgtcacatgaatattcgtattgttaactaaatgatttatattttactgatttaatattacagtgtaagaatgtcagtcattgttagttcttgtctagttttcattaaaagaacaaagatcttttatatggatatcttataaatatataatcattgctaagtaagaagttaagttgttgctatcgcaacaatcctggcagacaattgagtaatattttgatgatttattttgtttgtaattagttattataagaagatctagatcctagatattagaataaaatttattttctactgtatccatttcaaatgttaaaatattgtttaatatttttgaaatccctgagtatcaggccttgttataaataagctgcataatcaataaatagaacaagggactttttgttgataatccaaatactcaaagtttacgtaatgaaaattatagcgtgtgtgcaaactcttgagggttgattatgctgcaatttagcatgttggaacgtctagggagaaggttgactttttgcacttctgtatatagtcaaaagagagaaacctgtataatagtaagatcttattttgaataaaaacgtctataattacaaggagttttgttaaggctaatacaatgacagactgagcaaaattgcttgcaaaagtggcacagagttagcactccataccccttcaaacatgttgctttgctttcttgtggacagcttgtagtttgccaggattttttcagctggaaagatacgccatcctttcaaaccctcatgactgacaaaaactccatggggccaaatctgcctgaagatcattaccaaaaatagcaggtacttctaccattaaggtgaaatcatggatcagatattccttacatttttcaaaactactgcatgtttaaaacttcaacaaaaaaagagagaaagaactatactaagaacatatattattcagatcagtttctgccaatttcagtggtttattgttcacaaaaaaatcttcaaaacaagtattgactttcacaaaatttaaatcataaacaggcaaaccaaacagcacactgtagctatagttgttatgtgattgttttttaattgctgtaggatcctgttctttcagcaggtgaaaaataaaacgcagttcaaatttcatggttttaattttcaactcagaagcactcaaaaatgcaaaatgtgataatgggcacttgtttaaaagaattagtgtatccagccttcactccagctggttaaaaatgttgcacttatcagcaaccctaccactttcatctgctgaaaggacaaatgtgcttggttttactattatgtaatcacaacttactttctgcttgtagttgcttaaaattatgtattttgtcttgggctgcaatttgttttatgcttattttattattactgcagtagttgactttgctgtatggaaaaataaagtgaaattgccctaataaaacttctctttcttaagt

SEQ ID NO: 18767 - DNA, 6164 bp, Homo sapiens
  source 1..6164: mol_type = unassigned DNA
ttacatcttatagcacccagtgaattatgatatggggctgcggtttatttgctctggcgacaatatggcttacttgccgtggaatatcccggtatttcagaagtaacatattatttttaaagagggagctttgctttctctaaatcacatggtgcaaagttgggaatacagtggcctgtaaattacaaatattatttacaaactagaaggaaagctgacatgtgtttgtgcctgtgtgacagtttcactaaggaattccaaaactgtggatagcctgttacttgagaaaaatacacggtggcagtcttgcagatgtttttcccgcctgttagccctccaggttcaaaaactgtttggtgcattttaaggcggcagtctcaccagatcgcaggattctagtctaattggcttctaaccttcaatctaaccttgccggcttccttgcaaagcccggtgcaagggcctctttcaaaatgaacccactggtgtgcctagcagtcggtagaagaagcgggagggcgtccggtctgcacgcccgccgcgaggttacaatgctgaacgcatgagatggaagataccaacgggaggccgaggggatccacggcgcccgcgcgggctccggcttcctcctgctctcggcgccgctgggcgaccgcccatgacccgctcttgcgggctctgtccggttgacaggcgaccctgtggcccggggaagcgcgggagggcgccggcggaaagttgaagagcgtttttctcgccgccgcgtgcattaggagctcgacgagtccgccctgggcttcctggtggggctgggcgggcgggggaggggccgcgcagcagcagcggaagccagacctcggcgataagaggctgcacagcgacatgcaacagtcttttcactgcagctgaatgagttgtggcgcccacaatgctcccatgacaaggagctgacaagttccattttccgtcgcgggcatcttggaatcatgactcccacaatgccttgggcacttggtcgacagtggggccgcctctgaaaaaaaaatgtgagaggttggtactaagaagtgcctttcctgacgtctctgctgcttggaaccgcttctagagcagtctctgcttttgccttgcttgctgccagctagactgtgacgacagcacatccaccctccacctctagcccagacacccccatttctacttataatcaagagaaaagctctaagtatctggcattgccctaggctgctttagtgttaaaagaaaagtttgctgaaaaagtaagatatcttctgccaggaaatcaaggaggaaaaaaaaaatcattttctcgattttgctctaaactgctgcatctgtctatgccaaactaatcaataccgattgcaccaccaaactccattgcaaattcagctgtgaggagattccctttcagacaactttgctgaaagcagcttggaaattcggtgtcgaagggtctgccacgttttcatgcttgcattttgggctccaaattggcactgggaaggggttactgagagcacaaggctgataccaggccctacttttaaacgttcatctacttacaatcctagtatttctctaaaaaccaaaacctctttgaattaacagtttcatgctgtgaatttctagtgggagatcttttccttgatattgacgacacaattttccatgtacttttaaagcagggagtggggaaaagtattttgaggggacattttcatcatcagttcagctttttttttttggttgttgctcttttttgggggggttgggtttgttggtttcactgaaacatttaactacctgtaaaatctaaacatggctgttagtgtcacaccaattcgggacacaaaatggctaacactggaagtatgtagagagttccagagggggacttgctcacggccagacacggaatgtaaatttgcacatccttcgaaaagctgccaagttgaaaatggacgagtaatcgcctgctttgattcattgaaaggccgttgctccagggagaactgcaaatatcttcatccacccccacatttaaaaacgcagttggagataaatggacgcaataacttgattcagcagaagaacatggccatgttggcccagcaaatgcaactagccaatgccatgatgcctggtgccccattacaacccgtggtatgtcgagagtaccaacgtggcaattgcaaccgaggagaaaatgattgtcggtttgctcatcctgctgacagcacaatgattgacaccaatgacaacacagtcactgtgtgtatggattacatcaaagggagatgctctcgggaaaagtgcaaatactttcatccccctgcacatttgcaagccaagatcaaggctgcccaataccaggtcaaccaggctgcagctgcacaggctgcagccaccgcagctgccatgggaattcctcaagctgtacttcccccattaccaaagaggcctgctcttgaaaaaaccaacggtgccaccgcagtctttaacactggtattttccaataccaacaggctctagccaacatgcagttacaacagcatacagcatttctcccaccagttcccatggtgcacggtgctacgccagccactgtgtccgcagcaacaacatctgccacaagtgttcccttcgctgcaacagccacagccaaccagatacccataatatctgccgaacatctgactagccacaagtatgttacccagatgtagaattttcatcactaaacaatcatgctaaagaggaaaggacagtgtgcttggttagagtaaaggacgaggtcattagccatattgtatatatcgtcaagcaacacacacaaaagttcctcagccacaagacatccacatattgcatgttaaccagaagaaaagacaacattttccggaaatccactgcacactgttgcctatacactttgtacatttaattgatatttgtgctgaggtgatattcctgtctaaaagaacaacattgtctttcttttctagcacagagttatgcattcaaagatgcatacctagttagtttcctatatattcatgccatcttgaaaagacagactatggtgtaaccatgattctattatgtattggtacgtctgtagaccaagatataattttttaaaaataagtttatttctttcaaggtttacaaataacaaaggtgcaccttgtatttaaaattgccattatagatgagagcgtgcatgcacagtcatttttgtttaagagtaatatttttaatgtaatagattgtaagacgtggtgagggagggatctgacagagatgaatgtgccaagcaaaaccacaactgtgtatattttaaagcacatcatggctttaagtaccatgttgttaaggattctcatgaagtgccatagactgtacatcaaattagagtattatttcttcagtgttattgttttcagagccacattttgttgcatatttgctagtactaatcagtcaaagggcaccattctttttttttttttttgaaaccaaagctgtctcagaaatggccaatttaactttacagtaacaatagacagcacaacacaaactctctcaatacagataaactcacacatactggagatatatatataatagatatatataaaattattttaatgcattgtagtgtaatatttatgcatactatactgtataacatgttattcaaaagggattgccatttctgagacacagtaacaaaaaaatgaggaaattattttgcttctatttatagcctctgtcaaaagtcaaaagactataaatgctttgcaaaaatggtttcacgtttgcttaaatgcttcatcacagtcacattcaaaatagtgactctaaacaaagaagaaagcagcactgtcatcagatgcatgataaaccaaaatatgaaaatgggaaatgtttaattaacctagtaattgggtgggttaagtacatgggtgaattttatatgtgatttttgttttgttttgttttgttcagattaactgcttatagccttagaaagccttttacaaaattaaaaaaaaaatagatgtgcattcagtttttaagaatggaatcatccaaaggaattcctttttttgaggtttggatgttgcagctagtaaaggatatttttgctctgttcagcagttctaaaaattgctgaagtaggggccaggtcactggtagttatagtatggaatgggagaagtgaaagttcagttatagaactttccatacttccaagtttactgcaagtttttatgcttgagagagatgctttctaatataagactgatgtgttgattttactgattgtactgtacatctattaaagccttagattattacattacgggttggaacccataccaatgtaatttcaatcgtgttaagaaagtaatggtgacttcacatgttattgtagttagttacattatagaatattacttatttttcttgttaaaatgtagtttttcatttcctacatttattagattttcattttctattaacaattgaataccatttcagtttatagacttgttttattagattttaccaatgaatttttcaaaatacaaaaaaaagtagtttttccttcataacatactcagttttgaattacatgtagtgtcacatgaatattcgtattgttaactaaatgatttatattttactgatttaatattacagtgtaagaatgtcagtcattgttagttcttgtctagttttcattaaaagaacaaagatcttttatatggatatcttataaatatataatcattgctaagtaagaagttaagttgttgctatcgcaacaatcctggcagacaattgagtaatattttgatgatttattttgtttgtaattagttattataagaagatctagatcctagatattagaataaaatttattttctactgtatccatttcaaatgttaaaatattgtttaatatttttgaaatccctgagtatcaggccttgttataaataagctgcataatcaataaatagaacaagggactttttgttgataatccaaatactcaaagtttacgtaatgaaaattatagcgtgtgtgcaaactcttgagggttgattatgctgcaatttagcatgttggaacgtctagggagaaggttgactttttgcacttctgtatatagtcaaaagagagaaacctgtataatagtaagatcttattttgaataaaaacgtctataattacaaggagttttgttaaggctaatacaatgacagactgagcaaaattgcttgcaaaagtggcacagagttagcactccataccccttcaaacatgttgctttgctttcttgtggacagcttgtagtttgccaggattttttcagctggaaagatacgccatcctttcaaaccctcatgactgacaaaaactccatggggccaaatctgcctgaagatcattaccaaaaatagcaggtacttctaccattaaggtgaaatcatggatcagatattccttacatttttcaaaactactgcatgtttaaaacttcaacaaaaaaagagagaaagaactatactaagaacatatattattcagatcagtttctgccaatttcagtggtttattgttcacaaaaaaatcttcaaaacaagtattgactttcacaaaatttaaatcataaacaggcaaaccaaacagcacactgtagctatagttgttatgtgattgttttttaattgctgtaggatcctgttctttcagcaggtgaaaaataaaacgcagttcaaatttcatggttttaattttcaactcagaagcactcaaaaatgcaaaatgtgataatgggcacttgtttaaaagaattagtgtatccagccttcactccagctggttaaaaatgttgcacttatcagcaaccctaccactttcatctgctgaaaggacaaatgtgcttggttttactattatgtaatcacaacttactttctgcttgtagttgcttaaaattatgtattttgtcttgggctgcaatttgttttatgcttattttattattactgcagtagttgactttgctgtatggaaaaataaagtgaaattgccctaataaaacttctctttcttaagt

SEQ ID NO: 18768 - DNA, 5225 bp, Homo sapiens
  source 1..5225: mol_type = unassigned DNA
gttggtactaagaagtgcctttcctgacgtctctgctgcttggaaccgcttctagagcagtctctgcttttgccttgcttgctgccagctagactgtgacgacagcacatccaccctccacctctagcccagacacccccatttctacttataatcaagagaaaagctctaagtatctggcattgccctaggctgctttagtgttaaaagaaaagtttgctgaaaaagtaagatatcttctgccaggaaatcaaggaggaaaaaaaaaatcattttctcgattttgctctaaactgctgcatctgtctatgccaaactaatcaataccgattgcaccaccaaactccattgcaaattcagctgtgaggagattccctttcagacaactttgctgaaagcagcttggaaattcggtgtcgaagggtctgccacgttttcatgcttgcattttgggctccaaattggcactgggaaggggttactgagagcacaaggctgataccaggccctacttttaaacgttcatctacttacaatcctagtatttctctaaaaaccaaaacctctttgaattaacagtttcatgctgtgaatttctagtgggagatcttttccttgatattgacgacacaattttccatgtacttttaaagcagggagtggggaaaagtattttgaggggacattttcatcatcagttcagctttttttttttggttgttgctcttttttgggggggttgggtttgttggtttcactgaaacatttaactacctgtaaaatctaaacatggctgttagtgtcacaccaattcgggacacaaaatggctaacactggaagtatgtagagagttccagagggggacttgctcacggccagacacggaatgtaaatttgcacatccttcgaaaagctgccaagttgaaaatggacgagtaatcgcctgctttgattcattgaaaggccgttgctccagggagaactgcaaatatcttcatccacccccacatttaaaaacgcagttggagataaatggacgcaataacttgattcagcagaagaacatggccatgttggcccagcaaatgcaactagccaatgccatgatgcctggtgccccattacaacccgtgccaatgttttcagttgcaccaagcttagccaccaatgcatcagcagccgcctttaatccctatctgggacctgtttctccaagcctggtcccggcagagatcttgccgactgcaccaatgttggttacagggaatccgggtgtccctgtacctgcagctgctgcagctgctgcacagaaattaatgcgaacagacagacttgaggtatgtcgagagtaccaacgtggcaattgcaaccgaggagaaaatgattgtcggtttgctcatcctgctgacagcacaatgattgacaccaatgacaacacagtcactgtgtgtatggattacatcaaagggagatgctctcgggaaaagtgcaaatactttcatccccctgcacatttgcaagccaagatcaaggctgcccaataccaggtcaaccaggctgcagctgcacaggctgcagccaccgcagctgccatgttcccatggtgcacggtgctacgccagccactgtgtccgcagcaacaacatctgccacaagtgttcccttcgctgcaacagccacagccaaccagccccatccttgatgcttctacactgttgggtgcaacatcctgtcctgcagcagcaggaaaaatgatacccataatatctgccgaacatctgactagccacaagtatgttacccagatgtagaattttcatcactaaacaatcatgctaaagaggaaaggacagtgtgcttggttagagtaaaggacgaggtcattagccatattgtatatatcgtcaagcaacacacacaaaagttcctcagccacaagacatccacatattgcatgttaaccagaagaaaagacaacattttccggaaatccactgcacactgttgcctatacactttgtacatttaattgatatttgtgctgaggtgatattcctgtctaaaagaacaacattgtctttcttttctagcacagagttatgcattcaaagatgcatacctagttagtttcctatatattcatgccatcttgaaaagacagactatggtgtaaccatgattctattatgtattggtacgtctgtagaccaagatataattttttaaaaataagtttatttctttcaaggtttacaaataacaaaggtgcaccttgtatttaaaattgccattatagatgagagcgtgcatgcacagtcatttttgtttaagagtaatatttttaatgtaatagattgtaagacgtggtgagggagggatctgacagagatgaatgtgccaagcaaaaccacaactgtgtatattttaaagcacatcatggctttaagtaccatgttgttaaggattctcatgaagtgccatagactgtacatcaaattagagtattatttcttcagtgttattgttttcagagccacattttgttgcatatttgctagtactaatcagtcaaagggcaccattctttttttttttttttgaaaccaaagctgtctcagaaatggccaatttaactttacagtaacaatagacagcacaacacaaactctctcaatacagataaactcacacatactggagatatatatataatagatatatataaaattattttaatgcattgtagtgtaatatttatgcatactatactgtataacatgttattcaaaagggattgccatttctgagacacagtaacaaaaaaatgaggaaattattttgcttctatttatagcctctgtcaaaagtcaaaagactataaatgctttgcaaaaatggtttcacgtttgcttaaatgcttcatcacagtcacattcaaaatagtgactctaaacaaagaagaaagcagcactgtcatcagatgcatgataaaccaaaatatgaaaatgggaaatgtttaattaacctagtaattgggtgggttaagtacatgggtgaattttatatgtgatttttgttttgttttgttttgttcagattaactgcttatagccttagaaagccttttacaaaattaaaaaaaaaatagatgtgcattcagtttttaagaatggaatcatccaaaggaattcctttttttgaggtttggatgttgcagctagtaaaggatatttttgctctgttcagcagttctaaaaattgctgaagtaggggccaggtcactggtagttatagtatggaatgggagaagtgaaagttcagttatagaactttccatacttccaagtttactgcaagtttttatgcttgagagagatgctttctaatataagactgatgtgttgattttactgattgtactgtacatctattaaagccttagattattacattacgggttggaacccataccaatgtaatttcaatcgtgttaagaaagtaatggtgacttcacatgttattgtagttagttacattatagaatattacttatttttcttgttaaaatgtagtttttcatttcctacatttattagattttcattttctattaacaattgaataccatttcagtttatagacttgttttattagattttaccaatgaatttttcaaaatacaaaaaaaagtagtttttccttcataacatactcagttttgaattacatgtagtgtcacatgaatattcgtattgttaactaaatgatttatattttactgatttaatattacagtgtaagaatgtcagtcattgttagttcttgtctagttttcattaaaagaacaaagatcttttatatggatatcttataaatatataatcattgctaagtaagaagttaagttgttgctatcgcaacaatcctggcagacaattgagtaatattttgatgatttattttgtttgtaattagttattataagaagatctagatcctagatattagaataaaatttattttctactgtatccatttcaaatgttaaaatattgtttaatatttttgaaatccctgagtatcaggccttgttataaataagctgcataatcaataaatagaacaagggactttttgttgataatccaaatactcaaagtttacgtaatgaaaattatagcgtgtgtgcaaactcttgagggttgattatgctgcaatttagcatgttggaacgtctagggagaaggttgactttttgcacttctgtatatagtcaaaagagagaaacctgtataatagtaagatcttattttgaataaaaacgtctataattacaaggagttttgttaaggctaatacaatgacagactgagcaaaattgcttgcaaaagtggcacagagttagcactccataccccttcaaacatgttgctttgctttcttgtggacagcttgtagtttgccaggattttttcagctggaaagatacgccatcctttcaaaccctcatgactgacaaaaactccatggggccaaatctgcctgaagatcattaccaaaaatagcaggtacttctaccattaaggtgaaatcatggatcagatattccttacatttttcaaaactactgcatgtttaaaacttcaacaaaaaaagagagaaagaactatactaagaacatatattattcagatcagtttctgccaatttcagtggtttattgttcacaaaaaaatcttcaaaacaagtattgactttcacaaaatttaaatcataaacaggcaaaccaaacagcacactgtagctatagttgttatgtgattgttttttaattgctgtaggatcctgttctttcagcaggtgaaaaataaaacgcagttcaaatttcatggttttaattttcaactcagaagcactcaaaaatgcaaaatgtgataatgggcacttgtttaaaagaattagtgtatccagccttcactccagctggttaaaaatgttgcacttatcagcaaccctaccactttcatctgctgaaaggacaaatgtgcttggttttactattatgtaatcacaacttactttctgcttgtagttgcttaaaattatgtattttgtcttgggctgcaatttgttttatgcttattttattattactgcagtagttgactttgctgtatggaaaaataaagtgaaattgccctaataaaacttctctttcttaagt

SEQ ID NO: 18769 - DNA, 5465 bp, Homo sapiens
  source 1..5465: mol_type = unassigned DNA
ccacaatgctcccatgacaaggagctgacaagttccattttccgtcgcgggcatcttggaatcatgactcccacaatgccttgggcacttggtcgacagtggggccgcctctgaaaaaaaaatgtgagaggttggtactaagaagtgcctttcctgacgtctctgctgcttggaaccgcttctagagcagtctctgcttttgccttgcttgctgccagctagactgtgacgacagcacatccaccctccacctctagcccagacacccccatttctacttataatcaagagaaaagctctaagtatctggcattgccctaggctgctttagtgttaaaagaaaagtttgctgaaaaagtaagatatcttctgccaggaaatcaaggaggaaaaaaaaaatcattttctcgattttgctctaaactgctgcatctgtctatgccaaactaatcaataccgattgcaccaccaaactccattgcaaattcagctgtgaggagattccctttcagacaactttgctgaaagcagcttggaaattcggtgtcgaagggtctgccacgttttcatgcttgcattttgggctccaaattggcactgggaaggggttactgagagcacaaggctgataccaggccctacttttaaacgttcatctacttacaatcctagtatttctctaaaaaccaaaacctctttgaattaacagtttcatgctgtgaatttctagtgggagatcttttccttgatattgacgacacaattttccatgtacttttaaagcagggagtggggaaaagtattttgaggggacattttcatcatcagttcagctttttttttttggttgttgctcttttttgggggggttgggtttgttggtttcactgaaacatttaactacctgtaaaatctaaacatggctgttagtgtcacaccaattcgggacacaaaatggctaacactggaagtatgtagagagttccagagggggacttgctcacggccagacacggaatgtaaatttgcacatccttcgaaaagctgccaagttgaaaatggacgagtaatcgcctgctttgattcattgaaaggccgttgctccagggagaactgcaaatatcttcatccacccccacatttaaaaacgcagttggagataaatggacgcaataacttgattcagcagaagaacatggccatgttggcccagcaaatgcaactagccaatgccatgatgcctggtgccccattacaacccgtgccaatgttttcagttgcaccaagcttagccaccaatgcatcagcagccgcctttaatccctatctgggacctgtttctccaagcctggtcccggcagagatcttgccgactgcaccaatgttggttacagggaatccgggtgtccctgtacctgcagctgctgcagctgctgcacagaaattaatgcgaacagacagacttgaggtatgtcgagagtaccaacgtggcaattgcaaccgaggagaaaatgattgtcggtttgctcatcctgctgacagcacaatgattgacaccaatgacaacacagtcactgtgtgtatggattacatcaaagggagatgctctcgggaaaagtgcaaatactttcatccccctgcacatttgcaagccaagatcaaggctgcccaataccaggtcaaccaggctgcagctgcacaggctgcagccaccgcagctgccatgggaattcctcaagctgtacttcccccattaccaaagaggcctgctcttgaaaaaaccaacggtgccaccgcagtctttaacactggtattttccaataccaacaggctctagccaacatgcagttacaacagcatacagcatttctcccaccaggctcaatattgtgcatgacacccgctacaagtgttgttcccatggtgcacggtgctacgccagccactgtgtccgcagcaacaacatctgccacaagtgttcccttcgctgcaacagccacagccaaccagatacccataatatctgccgaacatctgactagccacaagtatgttacccagatgtagaattttcatcactaaacaatcatgctaaagaggaaaggacagtgtgcttggttagagtaaaggacgaggtcattagccatattgtatatatcgtcaagcaacacacacaaaagttcctcagccacaagacatccacatattgcatgttaaccagaagaaaagacaacattttccggaaatccactgcacactgttgcctatacactttgtacatttaattgatatttgtgctgaggtgatattcctgtctaaaagaacaacattgtctttcttttctagcacagagttatgcattcaaagatgcatacctagttagtttcctatatattcatgccatcttgaaaagacagactatggtgtaaccatgattctattatgtattggtacgtctgtagaccaagatataattttttaaaaataagtttatttctttcaaggtttacaaataacaaaggtgcaccttgtatttaaaattgccattatagatgagagcgtgcatgcacagtcatttttgtttaagagtaatatttttaatgtaatagattgtaagacgtggtgagggagggatctgacagagatgaatgtgccaagcaaaaccacaactgtgtatattttaaagcacatcatggctttaagtaccatgttgttaaggattctcatgaagtgccatagactgtacatcaaattagagtattatttcttcagtgttattgttttcagagccacattttgttgcatatttgctagtactaatcagtcaaagggcaccattctttttttttttttttgaaaccaaagctgtctcagaaatggccaatttaactttacagtaacaatagacagcacaacacaaactctctcaatacagataaactcacacatactggagatatatatataatagatatatataaaattattttaatgcattgtagtgtaatatttatgcatactatactgtataacatgttattcaaaagggattgccatttctgagacacagtaacaaaaaaatgaggaaattattttgcttctatttatagcctctgtcaaaagtcaaaagactataaatgctttgcaaaaatggtttcacgtttgcttaaatgcttcatcacagtcacattcaaaatagtgactctaaacaaagaagaaagcagcactgtcatcagatgcatgataaaccaaaatatgaaaatgggaaatgtttaattaacctagtaattgggtgggttaagtacatgggtgaattttatatgtgatttttgttttgttttgttttgttcagattaactgcttatagccttagaaagccttttacaaaattaaaaaaaaaatagatgtgcattcagtttttaagaatggaatcatccaaaggaattcctttttttgaggtttggatgttgcagctagtaaaggatatttttgctctgttcagcagttctaaaaattgctgaagtaggggccaggtcactggtagttatagtatggaatgggagaagtgaaagttcagttatagaactttccatacttccaagtttactgcaagtttttatgcttgagagagatgctttctaatataagactgatgtgttgattttactgattgtactgtacatctattaaagccttagattattacattacgggttggaacccataccaatgtaatttcaatcgtgttaagaaagtaatggtgacttcacatgttattgtagttagttacattatagaatattacttatttttcttgttaaaatgtagtttttcatttcctacatttattagattttcattttctattaacaattgaataccatttcagtttatagacttgttttattagattttaccaatgaatttttcaaaatacaaaaaaaagtagtttttccttcataacatactcagttttgaattacatgtagtgtcacatgaatattcgtattgttaactaaatgatttatattttactgatttaatattacagtgtaagaatgtcagtcattgttagttcttgtctagttttcattaaaagaacaaagatcttttatatggatatcttataaatatataatcattgctaagtaagaagttaagttgttgctatcgcaacaatcctggcagacaattgagtaatattttgatgatttattttgtttgtaattagttattataagaagatctagatcctagatattagaataaaatttattttctactgtatccatttcaaatgttaaaatattgtttaatatttttgaaatccctgagtatcaggccttgttataaataagctgcataatcaataaatagaacaagggactttttgttgataatccaaatactcaaagtttacgtaatgaaaattatagcgtgtgtgcaaactcttgagggttgattatgctgcaatttagcatgttggaacgtctagggagaaggttgactttttgcacttctgtatatagtcaaaagagagaaacctgtataatagtaagatcttattttgaataaaaacgtctataattacaaggagttttgttaaggctaatacaatgacagactgagcaaaattgcttgcaaaagtggcacagagttagcactccataccccttcaaacatgttgctttgctttcttgtggacagcttgtagtttgccaggattttttcagctggaaagatacgccatcctttcaaaccctcatgactgacaaaaactccatggggccaaatctgcctgaagatcattaccaaaaatagcaggtacttctaccattaaggtgaaatcatggatcagatattccttacatttttcaaaactactgcatgtttaaaacttcaacaaaaaaagagagaaagaactatactaagaacatatattattcagatcagtttctgccaatttcagtggtttattgttcacaaaaaaatcttcaaaacaagtattgactttcacaaaatttaaatcataaacaggcaaaccaaacagcacactgtagctatagttgttatgtgattgttttttaattgctgtaggatcctgttctttcagcaggtgaaaaataaaacgcagttcaaatttcatggttttaattttcaactcagaagcactcaaaaatgcaaaatgtgataatgggcacttgtttaaaagaattagtgtatccagccttcactccagctggttaaaaatgttgcacttatcagcaaccctaccactttcatctgctgaaaggacaaatgtgcttggttttactattatgtaatcacaacttactttctgcttgtagttgcttaaaattatgtattttgtcttgggctgcaatttgttttatgcttattttattattactgcagtagttgactttgctgtatggaaaaataaagtgaaattgccctaataaaa

SEQ ID NO: 18770 - DNA, 5941 bp, Homo sapiens
  source 1..5941: mol_type = unassigned DNA
cttgccggcttccttgcaaagcccggtgcaagggcctctttcaaaatgaacccactggtgtgcctagcagtcggtagaagaagcgggagggcgtccggtctgcacgcccgccgcgaggttacaatgctgaacgcatgagatggaagataccaacgggaggccgaggggatccacggcgcccgcgcgggctccggcttcctcctgctctcggcgccgctgggcgaccgcccatgacccgctcttgcgggctctgtccggttgacaggcgaccctgtggcccggggaagcgcgggagggcgccggcggaaagttgaagagcgtttttctcgccgccgcgtgcattaggagctcgacgagtccgccctgggcttcctggtggggctgggcgggcgggggaggggccgcgcagcagcagcggaagccagacctcggcgataagaggctgcacagcgacatgcaacagtcttttcactgcagctgaatgagttgtggcgcccacaatgctcccatgacaaggagctgacaagttccattttccgtcgcgggcatcttggaatcatgactcccacaatgccttgggcacttggtcgacagtggggccgcctctgaaaaaaaaatgtgagaggttggtactaagaagtgcctttcctgacgtctctgctgcttggaaccgcttctagagcagtctctgcttttgccttgcttgctgccagctagactgtgacgacagcacatccaccctccacctctagcccagacacccccatttctacttataatcaagagaaaagctctaagtatctggcattgccctaggctgctttagtgttaaaagaaaagtttgctgaaaaagtaagatatcttctgccaggaaatcaaggaggaaaaaaaaaatcattttctcgattttgctctaaactgctgcatctgtctatgccaaactaatcaataccgattgcaccaccaaactccattgcaaattcagctgtgaggagattccctttcagacaactttgctgaaagcagcttggaaattcggtgtcgaagggtctgccacgttttcatgcttgcattttgggctccaaattggcactgggaaggggttactgagagcacaaggctgataccaggccctacttttaaacgttcatctacttacaatcctagtatttctctaaaaaccaaaacctctttgaattaacagtttcatgctgtgaatttctagtgggagatcttttccttgatattgacgacacaattttccatgtacttttaaagcagggagtggggaaaagtattttgaggggacattttcatcatcagttcagctttttttttttggttgttgctcttttttgggggggttgggtttgttggtttcactgaaacatttaactacctgtaaaatctaaacatggctgttagtgtcacaccaattcgggacacaaaatggctaacactggaagtatgtagagagttccagagggggacttgctcacggccagacacggaatgtaaatttgcacatccttcgaaaagctgccaagttgaaaatggacgagtaatcgcctgctttgattcattgaaaggccgttgctccagggagaactgcaaatatcttcatccacccccacatttaaaaacgcagttggagataaatggacgcaataacttgattcagcagaagaacatggccatgttggcccagcaaatgcaactagccaatgccatgatgcctggtgccccattacaacccgtgccaatgttttcagttgcaccaagcttagccaccaatgcatcagcagccgcctttaatccctatctgggacctgtttctccaagcctggtcccggcagagatcttgccgactgcaccaatgttggttacagggaatccgggtgtccctgtacctgcagctgctgcagctgctgcacagaaattaatgcgaacagacagacttgaggtatgtcgagagtaccaacgtggcaattgcaaccgaggagaaaatgattgtcggtttgctcatcctgctgacagcacaatgattgacaccaatgacaacacagtcactgtgtgtatggattacatcaaagggagatgctctcgggaaaagtgcaaatactttcatccccctgcacatttgcaagccaagatcaaggctgcccaataccaggtcaaccaggctgcagctgcacaggctgcagccaccgcagctgccatgggaattcctcaagctgtacttcccccattaccaaagaggcctgctcttgaaaaaaccaacggtgccaccgcagtctttaacactggtattttccaataccaacaggctctagccaacatgcagttacaacagcatacagcatttctcccaccagttcccatggtgcacggtgctacgccagccactgtgtccgcagcaacaacatctgccacaagtgttcccttcgctgcaacagccacagccaaccagatacccataatatctgccgaacatctgactagccacaagtatgttacccagatgtagaattttcatcactaaacaatcatgctaaagaggaaaggacagtgtgcttggttagagtaaaggacgaggtcattagccatattgtatatatcgtcaagcaacacacacaaaagttcctcagccacaagacatccacatattgcatgttaaccagaagaaaagacaacattttccggaaatccactgcacactgttgcctatacactttgtacatttaattgatatttgtgctgaggtgatattcctgtctaaaagaacaacattgtctttcttttctagcacagagttatgcattcaaagatgcatacctagttagtttcctatatattcatgccatcttgaaaagacagactatggtgtaaccatgattctattatgtattggtacgtctgtagaccaagatataattttttaaaaataagtttatttctttcaaggtttacaaataacaaaggtgcaccttgtatttaaaattgccattatagatgagagcgtgcatgcacagtcatttttgtttaagagtaatatttttaatgtaatagattgtaagacgtggtgagggagggatctgacagagatgaatgtgccaagcaaaaccacaactgtgtatattttaaagcacatcatggctttaagtaccatgttgttaaggattctcatgaagtgccatagactgtacatcaaattagagtattatttcttcagtgttattgttttcagagccacattttgttgcatatttgctagtactaatcagtcaaagggcaccattctttttttttttttttgaaaccaaagctgtctcagaaatggccaatttaactttacagtaacaatagacagcacaacacaaactctctcaatacagataaactcacacatactggagatatatatataatagatatatataaaattattttaatgcattgtagtgtaatatttatgcatactatactgtataacatgttattcaaaagggattgccatttctgagacacagtaacaaaaaaatgaggaaattattttgcttctatttatagcctctgtcaaaagtcaaaagactataaatgctttgcaaaaatggtttcacgtttgcttaaatgcttcatcacagtcacattcaaaatagtgactctaaacaaagaagaaagcagcactgtcatcagatgcatgataaaccaaaatatgaaaatgggaaatgtttaattaacctagtaattgggtgggttaagtacatgggtgaattttatatgtgatttttgttttgttttgttttgttcagattaactgcttatagccttagaaagccttttacaaaattaaaaaaaaaatagatgtgcattcagtttttaagaatggaatcatccaaaggaattcctttttttgaggtttggatgttgcagctagtaaaggatatttttgctctgttcagcagttctaaaaattgctgaagtaggggccaggtcactggtagttatagtatggaatgggagaagtgaaagttcagttatagaactttccatacttccaagtttactgcaagtttttatgcttgagagagatgctttctaatataagactgatgtgttgattttactgattgtactgtacatctattaaagccttagattattacattacgggttggaacccataccaatgtaatttcaatcgtgttaagaaagtaatggtgacttcacatgttattgtagttagttacattatagaatattacttatttttcttgttaaaatgtagtttttcatttcctacatttattagattttcattttctattaacaattgaataccatttcagtttatagacttgttttattagattttaccaatgaatttttcaaaatacaaaaaaaagtagtttttccttcataacatactcagttttgaattacatgtagtgtcacatgaatattcgtattgttaactaaatgatttatattttactgatttaatattacagtgtaagaatgtcagtcattgttagttcttgtctagttttcattaaaagaacaaagatcttttatatggatatcttataaatatataatcattgctaagtaagaagttaagttgttgctatcgcaacaatcctggcagacaattgagtaatattttgatgatttattttgtttgtaattagttattataagaagatctagatcctagatattagaataaaatttattttctactgtatccatttcaaatgttaaaatattgtttaatatttttgaaatccctgagtatcaggccttgttataaataagctgcataatcaataaatagaacaagggactttttgttgataatccaaatactcaaagtttacgtaatgaaaattatagcgtgtgtgcaaactcttgagggttgattatgctgcaatttagcatgttggaacgtctagggagaaggttgactttttgcacttctgtatatagtcaaaagagagaaacctgtataatagtaagatcttattttgaataaaaacgtctataattacaaggagttttgttaaggctaatacaatgacagactgagcaaaattgcttgcaaaagtggcacagagttagcactccataccccttcaaacatgttgctttgctttcttgtggacagcttgtagtttgccaggattttttcagctggaaagatacgccatcctttcaaaccctcatgactgacaaaaactccatggggccaaatctgcctgaagatcattaccaaaaatagcaggtacttctaccattaaggtgaaatcatggatcagatattccttacatttttcaaaactactgcatgtttaaaacttcaacaaaaaaagagagaaagaactatactaagaacatatattattcagatcagtttctgccaatttcagtggtttattgttcacaaaaaaatcttcaaaacaagtattgactttcacaaaatttaaatcataaacaggcaaaccaaacagcacactgtagctatagttgttatgtgattgttttttaattgctgtaggatcctgttctttcagcaggtgaaaaataaaacgcagttcaaatttcatggttttaattttcaactcagaagcactcaaaaatgcaaaatgtgataatgggcacttgtttaaaagaattagtgtatccagccttcactccagctggttaaaaatgttgcacttatcagcaaccctaccactttcatctgctgaaaggacaaatgtgcttggttttactattatgtaatcacaacttactttctgcttgtagttgcttaaaattatgtattttgtcttgggctgcaatttgttttatgcttattttattattactgcagtagttgactttgctgtatggaaaaataaagtgaaattgccctaataaaacttctctttcttaagta

SEQ ID NO: 18771 - DNA, 5256 bp, Homo sapiens
  source 1..5256: mol_type = unassigned DNA
gttggtactaagaagtgcctttcctgacgtctctgctgcttggaaccgcttctagagcagtctctgcttttgccttgcttgctgccagctagactgtgacgacagcacatccaccctccacctctagcccagacacccccatttctacttataatcaagagaaaagctctaagtatctggcattgccctaggctgctttagtgttaaaagaaaagtttgctgaaaaagtaagatatcttctgccaggaaatcaaggaggaaaaaaaaaatcattttctcgattttgctctaaactgctgcatctgtctatgccaaactaatcaataccgattgcaccaccaaactccattgcaaattcagctgtgaggagattccctttcagacaactttgctgaaagcagcttggaaattcggtgtcgaagggtctgccacgttttcatgcttgcattttgggctccaaattggcactgggaaggggttactgagagcacaaggctgataccaggccctacttttaaacgttcatctacttacaatcctagtatttctctaaaaaccaaaacctctttgaattaacagtttcatgctgtgaatttctagtgggagatcttttccttgatattgacgacacaattttccatgtacttttaaagcagggagtggggaaaagtattttgaggggacattttcatcatcagttcagctttttttttttggttgttgctcttttttgggggggttgggtttgttggtttcactgaaacatttaactacctgtaaaatctaaacatggctgttagtgtcacaccaattcgggacacaaaatggctaacactggaagtatgtagagagttccagagggggacttgctcacggccagacacggaatgtaaatttgcacatccttcgaaaagctgccaagttgaaaatggacgagtaatcgcctgctttgattcattgaaaggccgttgctccagggagaactgcaaatatcttcatccacccccacatttaaaaacgcagttggagataaatggacgcaataacttgattcagcagaagaacatggccatgttggcccagcaaatgcaactagccaatgccatgatgcctggtgccccattacaacccgtgccaatgttttcagttgcaccaagcttagccaccaatgcatcagcagccgcctttaatccctatctgggacctgtttctccaagcctggtcccggcagagatcttgccgactgcaccaatgttggttacagggaatccgggtgtccctgtacctgcagctgctgcagctgctgcacagaaattaatgcgaacagacagacttgaggtatgtcgagagtaccaacgtggcaattgcaaccgaggagaaaatgattgtcggtttgctcatcctgctgacagcacaatgattgacaccaatgacaacacagtcactgtgtgtatggattacatcaaagggagatgctctcgggaaaagtgcaaatactttcatccccctgcacatttgcaagccaagatcaaggctgcccaataccaggtcaaccaggctgcagctgcacaggctgcagccaccgcagctgccatgggaattcctcaagctgtacttcccccattaccaaagaggcctgctcttgaaaaaaccaacggtgccaccgcagtctttaacactggtattttccaataccaacaggctctagccaacatgcagttacaacagcatacagcatttctcccaccaggctcaatattgtgcatgacacccgctacaagtgttgatacccataatatctgccgaacatctgactagccacaagtatgttacccagatgtagaattttcatcactaaacaatcatgctaaagaggaaaggacagtgtgcttggttagagtaaaggacgaggtcattagccatattgtatatatcgtcaagcaacacacacaaaagttcctcagccacaagacatccacatattgcatgttaaccagaagaaaagacaacattttccggaaatccactgcacactgttgcctatacactttgtacatttaattgatatttgtgctgaggtgatattcctgtctaaaagaacaacattgtctttcttttctagcacagagttatgcattcaaagatgcatacctagttagtttcctatatattcatgccatcttgaaaagacagactatggtgtaaccatgattctattatgtattggtacgtctgtagaccaagatataattttttaaaaataagtttatttctttcaaggtttacaaataacaaaggtgcaccttgtatttaaaattgccattatagatgagagcgtgcatgcacagtcatttttgtttaagagtaatatttttaatgtaatagattgtaagacgtggtgagggagggatctgacagagatgaatgtgccaagcaaaaccacaactgtgtatattttaaagcacatcatggctttaagtaccatgttgttaaggattctcatgaagtgccatagactgtacatcaaattagagtattatttcttcagtgttattgttttcagagccacattttgttgcatatttgctagtactaatcagtcaaagggcaccattctttttttttttttttgaaaccaaagctgtctcagaaatggccaatttaactttacagtaacaatagacagcacaacacaaactctctcaatacagataaactcacacatactggagatatatatataatagatatatataaaattattttaatgcattgtagtgtaatatttatgcatactatactgtataacatgttattcaaaagggattgccatttctgagacacagtaacaaaaaaatgaggaaattattttgcttctatttatagcctctgtcaaaagtcaaaagactataaatgctttgcaaaaatggtttcacgtttgcttaaatgcttcatcacagtcacattcaaaatagtgactctaaacaaagaagaaagcagcactgtcatcagatgcatgataaaccaaaatatgaaaatgggaaatgtttaattaacctagtaattgggtgggttaagtacatgggtgaattttatatgtgatttttgttttgttttgttttgttcagattaactgcttatagccttagaaagccttttacaaaattaaaaaaaaaatagatgtgcattcagtttttaagaatggaatcatccaaaggaattcctttttttgaggtttggatgttgcagctagtaaaggatatttttgctctgttcagcagttctaaaaattgctgaagtaggggccaggtcactggtagttatagtatggaatgggagaagtgaaagttcagttatagaactttccatacttccaagtttactgcaagtttttatgcttgagagagatgctttctaatataagactgatgtgttgattttactgattgtactgtacatctattaaagccttagattattacattacgggttggaacccataccaatgtaatttcaatcgtgttaagaaagtaatggtgacttcacatgttattgtagttagttacattatagaatattacttatttttcttgttaaaatgtagtttttcatttcctacatttattagattttcattttctattaacaattgaataccatttcagtttatagacttgttttattagattttaccaatgaatttttcaaaatacaaaaaaaagtagtttttccttcataacatactcagttttgaattacatgtagtgtcacatgaatattcgtattgttaactaaatgatttatattttactgatttaatattacagtgtaagaatgtcagtcattgttagttcttgtctagttttcattaaaagaacaaagatcttttatatggatatcttataaatatataatcattgctaagtaagaagttaagttgttgctatcgcaacaatcctggcagacaattgagtaatattttgatgatttattttgtttgtaattagttattataagaagatctagatcctagatattagaataaaatttattttctactgtatccatttcaaatgttaaaatattgtttaatatttttgaaatccctgagtatcaggccttgttataaataagctgcataatcaataaatagaacaagggactttttgttgataatccaaatactcaaagtttacgtaatgaaaattatagcgtgtgtgcaaactcttgagggttgattatgctgcaatttagcatgttggaacgtctagggagaaggttgactttttgcacttctgtatatagtcaaaagagagaaacctgtataatagtaagatcttattttgaataaaaacgtctataattacaaggagttttgttaaggctaatacaatgacagactgagcaaaattgcttgcaaaagtggcacagagttagcactccataccccttcaaacatgttgctttgctttcttgtggacagcttgtagtttgccaggattttttcagctggaaagatacgccatcctttcaaaccctcatgactgacaaaaactccatggggccaaatctgcctgaagatcattaccaaaaatagcaggtacttctaccattaaggtgaaatcatggatcagatattccttacatttttcaaaactactgcatgtttaaaacttcaacaaaaaaagagagaaagaactatactaagaacatatattattcagatcagtttctgccaatttcagtggtttattgttcacaaaaaaatcttcaaaacaagtattgactttcacaaaatttaaatcataaacaggcaaaccaaacagcacactgtagctatagttgttatgtgattgttttttaattgctgtaggatcctgttctttcagcaggtgaaaaataaaacgcagttcaaatttcatggttttaattttcaactcagaagcactcaaaaatgcaaaatgtgataatgggcacttgtttaaaagaattagtgtatccagccttcactccagctggttaaaaatgttgcacttatcagcaaccctaccactttcatctgctgaaaggacaaatgtgcttggttttactattatgtaatcacaacttactttctgcttgtagttgcttaaaattatgtattttgtcttgggctgcaatttgttttatgcttattttattattactgcagtagttgactttgctgtatggaaaaataaagtgaaattgccctaataaaacttctctttcttaagt

SEQ ID NO: 18772 - DNA, 5092 bp, Homo sapiens
  source 1..5092: mol_type = unassigned DNA
cgattttgctctaaactgctgcatctgtctatgccaaactaatcaataccgattgcaccaccaaactccattgcaaattcagctgtgaggagattccctttcagacaactttgctgaaagcagcttggaaattcggtgtcgaagggtctgccacgttttcatgcttgcattttgggctccaaattggcactgggaaggggttactgagagcacaaggctgataccaggccctacttttaaacgttcatctacttacaatcctagtatttctctaaaaaccaaaacctctttgaattaacagtttcatgctgtgaatttctagtgggagatcttttccttgatattgacgacacaattttccatgtacttttaaagcagggagtggggaaaagtattttgaggggacattttcatcatcagttcagctttttttttttggttgttgctcttttttgggggggttgggtttgttggtttcactgaaacatttaactacctgtaaaatctaaacatggctgttagtgtcacaccaattcgggacacaaaatggctaacactggaagtatgtagagagttccagagggggacttgctcacggccagacacggaatgtaaatttgcacatccttcgaaaagctgccaagttgaaaatggacgagtaatcgcctgctttgattcattgaaaggccgttgctccagggagaactgcaaatatcttcatccacccccacatttaaaaacgcagttggagataaatggacgcaataacttgattcagcagaagaacatggccatgttggcccagcaaatgcaactagccaatgccatgatgcctggtgccccattacaacccgtgccaatgttttcagttgcaccaagcttagccaccaatgcatcagcagccgcctttaatccctatctgggacctgtttctccaagcctggtcccggcagagatcttgccgactgcaccaatgttggttacagggaatccgggtgtccctgtacctgcagctgctgcagctgctgcacagaaattaatgcgaacagacagacttgaggtatgtcgagagtaccaacgtggcaattgcaaccgaggagaaaatgattgtcggtttgctcatcctgctgacagcacaatgattgacaccaatgacaacacagtcactgtgtgtatggattacatcaaagggagatgctctcgggaaaagtgcaaatactttcatccccctgcacatttgcaagccaagatcaaggctgcccaataccaggtcaaccaggctgcagctgcacaggctgcagccaccgcagctgccatgactcagtcggctgtcaaatcactgaagcgacccctcgaggcaacctttgacctgggaattcctcaagctgtacttcccccattaccaaagaggcctgctcttgaaaaaaccaacggtgccaccgcagtctttaacactggtattttccaataccaacaggctctagccaacatgcagttacaacagcatacagcatttctcccaccagttcccatggtgcacggtgctacgccagccactgtgtccgcagcaacaacatctgccacaagtgttcccttcgctgcaacagccacagccaaccagatacccataatatctgccgaacatctgactagccacaagtatgttacccagatgtagaattttcatcactaaacaatcatgctaaagaggaaaggacagtgtgcttggttagagtaaaggacgaggtcattagccatattgtatatatcgtcaagcaacacacacaaaagttcctcagccacaagacatccacatattgcatgttaaccagaagaaaagacaacattttccggaaatccactgcacactgttgcctatacactttgtacatttaattgatatttgtgctgaggtgatattcctgtctaaaagaacaacattgtctttcttttctagcacagagttatgcattcaaagatgcatacctagttagtttcctatatattcatgccatcttgaaaagacagactatggtgtaaccatgattctattatgtattggtacgtctgtagaccaagatataattttttaaaaataagtttatttctttcaaggtttacaaataacaaaggtgcaccttgtatttaaaattgccattatagatgagagcgtgcatgcacagtcatttttgtttaagagtaatatttttaatgtaatagattgtaagacgtggtgagggagggatctgacagagatgaatgtgccaagcaaaaccacaactgtgtatattttaaagcacatcatggctttaagtaccatgttgttaaggattctcatgaagtgccatagactgtacatcaaattagagtattatttcttcagtgttattgttttcagagccacattttgttgcatatttgctagtactaatcagtcaaagggcaccattctttttttttttttttgaaaccaaagctgtctcagaaatggccaatttaactttacagtaacaatagacagcacaacacaaactctctcaatacagataaactcacacatactggagatatatatataatagatatatataaaattattttaatgcattgtagtgtaatatttatgcatactatactgtataacatgttattcaaaagggattgccatttctgagacacagtaacaaaaaaatgaggaaattattttgcttctatttatagcctctgtcaaaagtcaaaagactataaatgctttgcaaaaatggtttcacgtttgcttaaatgcttcatcacagtcacattcaaaatagtgactctaaacaaagaagaaagcagcactgtcatcagatgcatgataaaccaaaatatgaaaatgggaaatgtttaattaacctagtaattgggtgggttaagtacatgggtgaattttatatgtgatttttgttttgttttgttttgttcagattaactgcttatagccttagaaagccttttacaaaattaaaaaaaaaatagatgtgcattcagtttttaagaatggaatcatccaaaggaattcctttttttgaggtttggatgttgcagctagtaaaggatatttttgctctgttcagcagttctaaaaattgctgaagtaggggccaggtcactggtagttatagtatggaatgggagaagtgaaagttcagttatagaactttccatacttccaagtttactgcaagtttttatgcttgagagagatgctttctaatataagactgatgtgttgattttactgattgtactgtacatctattaaagccttagattattacattacgggttggaacccataccaatgtaatttcaatcgtgttaagaaagtaatggtgacttcacatgttattgtagttagttacattatagaatattacttatttttcttgttaaaatgtagtttttcatttcctacatttattagattttcattttctattaacaattgaataccatttcagtttatagacttgttttattagattttaccaatgaatttttcaaaatacaaaaaaaagtagtttttccttcataacatactcagttttgaattacatgtagtgtcacatgaatattcgtattgttaactaaatgatttatattttactgatttaatattacagtgtaagaatgtcagtcattgttagttcttgtctagttttcattaaaagaacaaagatcttttatatggatatcttataaatatataatcattgctaagtaagaagttaagttgttgctatcgcaacaatcctggcagacaattgagtaatattttgatgatttattttgtttgtaattagttattataagaagatctagatcctagatattagaataaaatttattttctactgtatccatttcaaatgttaaaatattgtttaatatttttgaaatccctgagtatcaggccttgttataaataagctgcataatcaataaatagaacaagggactttttgttgataatccaaatactcaaagtttacgtaatgaaaattatagcgtgtgtgcaaactcttgagggttgattatgctgcaatttagcatgttggaacgtctagggagaaggttgactttttgcacttctgtatatagtcaaaagagagaaacctgtataatagtaagatcttattttgaataaaaacgtctataattacaaggagttttgttaaggctaatacaatgacagactgagcaaaattgcttgcaaaagtggcacagagttagcactccataccccttcaaacatgttgctttgctttcttgtggacagcttgtagtttgccaggattttttcagctggaaagatacgccatcctttcaaaccctcatgactgacaaaaactccatggggccaaatctgcctgaagatcattaccaaaaatagcaggtacttctaccattaaggtgaaatcatggatcagatattccttacatttttcaaaactactgcatgtttaaaacttcaacaaaaaaagagagaaagaactatactaagaacatatattattcagatcagtttctgccaatttcagtggtttattgttcacaaaaaaatcttcaaaacaagtattgactttcacaaaatttaaatcataaacaggcaaaccaaacagcacactgtagctatagttgttatgtgattgttttttaattgctgtaggatcctgttctttcagcaggtgaaaaataaaacgcagttcaaatttcatggttttaattttcaactcagaagcactcaaaaatgcaaaatgtgataatgggcacttgtttaaaagaattagtgtatccagccttcactccagctggttaaaaatgttgcacttatcagcaaccctaccactttcatctgctgaaaggacaaatgtgcttggttttactattatgtaatcacaacttactttctgcttgtagttgcttaaaattatgtattttgtcttgggctgcaatttgttttatgcttattttattattactgcagtagttgactttgctgtatggaaaaataaagtgaaattgccctaataaaacttctctttcttaagta

SEQ ID NO: 18773 - DNA, 1023 bp, Homo sapiens
  source 1..1023: mol_type = unassigned DNA
atggctgttagtgtcacaccaattcgggacacaaaatggctaacactggaagtatgtagagagttccagagggggacttgctcacggccagacacggaatgtaaatttgcacatccttcgaaaagctgccaagttgaaaatggacgagtaatcgcctgctttgattcattgaaaggccgttgctccagggagaactgcaaatatcttcatccacccccacatttaaaaacgcagttggagataaatggacgcaataacttgattcagcagaagaacatggccatgttggcccagcaaatgcaactagccaatgccatgatgcctggtgccccattacaacccgtgccaatgttttcagttgcaccaagcttagccaccaatgcatcagcagccgcctttaatccctatctgggacctgtttctccaagcctggtcccggcagagatcttgccgactgcaccaatgttggttacagggaatccgggtgtccctgtacctgcagctgctgcagctgctgcacagaaattaatgcgaacagacagacttgaggtatgtcgagagtaccaacgtggcaattgcaaccgaggagaaaatgattgtcggtttgctcatcctgctgacagcacaatgattgacaccaatgacaacacagtcactgtgtgtatggattacatcaaagggagatgctctcgggaaaagtgcaaatactttcatccccctgcacatttgcaagccaagatcaaggctgcccaataccaggtcaaccaggctgcagctgcacaggctgcagccaccgcagctgccatgttcccatggtgcacggtgctacgccagccactgtgtccgcagcaacaacatctgccacaagtgttcccttcgctgcaacagccacagccaaccagccccatccttgatgcttctacactgttgggtgcaacatcctgtcctgcagcagcaggaaaaatgatacccataatatctgccgaacatctgactagccacaagtatgttacccagatgtag

SEQ ID NO: 18774 - DNA, 4257 bp, Homo sapiens
  source 1..4257: mol_type = unassigned DNA
cgattttgctctaaactgctgcatctgtctatgccaaactaatcaataccgattgcaccaccaaactccattgcaaattcagctgtgaggagattccctttcagacaactttgctgaaagcagcttggaaattcggtgtcgaagggtctgccacgttttcatgcttgcattttgggctccaaattggcactgggaaggggttactgagagcacaaggctgataccaggccctacttttaaacgttcatctacttacaatcctagtatttctctaaaaaccaaaacctctttgaattaacagtttcatgctgtgaatttctagtgggagatcttttccttgatattgacgacacaattttccatgtacttttaaagcagggagtggggaaaagtattttgaggggacattttcatcatcagttcagctttttttttttggttgttgctcttttttgggggggttgggtttgttggtttcactgaaacatttaactacctgtaaaatctaaacatggctgttagtgtcacaccaattcgggacacaaaatggctaacactggaagtatgtagagagttccagagggggacttgctcacggccagacacggaatgtaaatttgcacatccttcgaaaagctgccaagttgaaaatggacgagtaatcgcctgctttgattcattgaaaggccgttgctccagggagaactgcaaatatcttcatccacccccacatttaaaaacgcagttggagataaatggacgcaataacttgattcagcagaagaacatggccatgttggcccagcaaatgcaactagccaatgccatgatgcctggtgccccattacaacccgtggtatgtcgagagtaccaacgtggcaattgcaaccgaggagaaaatgattgtcggtttgctcatcctgctgacagcacaatgattgacaccaatgacaacacagtcactgtgtgtatggattacatcaaagggagatgctctcgggaaaagtgcaaatactttcatccccctgcacatttgcaagccaagatcaaggctgcccaataccaggtcaaccaggctgcagctgcacaggctgcagccaccgcagctgccatgggaattcctcaagctgtacttcccccattaccaaagaggcctgctcttgaaaaaaccaacggtgccaccgcagtctttaacactggtattttccaataccaacaggctctagccaacatgcagttacaacagcatacagcatttctcccaccagttcccatggtgcacggtgctacgccagccactgtgtccgcagcaacaacatctgccacaagtgttcccttcgctgcaacagccacagccaaccagatacccataatatctgccgaacatctgactagccacaagtatgttacccagatgtagaattttcatcactaaacaatcatgctaaagaggaaaggacagtgtgcttggttagagtaaaggacgaggtcattagccatattgtatatatcgtcaagcaacacacacaaaagttcctcagccacaagacatccacatattgcatgttaaccagaagaaaagacaacattttccggaaatccactgcacactgttgcctatacactttgtacatttaattgatatttgtgctgaggtgatattcctgtctaaaagaacaacattgtctttcttttctagcacagagttatgcattcaaagatgcatacctagttagtttcctatatattcatgccatcttgaaaagacagactatggtgtaaccatgattctattatgtattggtacgtctgtagaccaagatataattttttaaaaataagtttatttctttcaaggtttacaaataacaaaggtgcaccttgtatttaaaattgccattatagatgagagcgtgcatgcacagtcatttttgtttaagagtaatatttttaatgtaatagattgtaagacgtggtgagggagggatctgacagagatgaatgtgccaagcaaaaccacaactgtgtatattttaaagcacatcatggctttaagtaccatgttgttaaggattctcatgaagtgccatagactgtacatcaaattagagtattatttcttcagtgttattgttttcagagccacattttgttgcatatttgctagtactaatcagtcaaagggcaccattctttttttttttttttgaaaccaaagctgtctcagaaatggccaatttaactttacagtaacaatagacagcacaacacaaactctctcaatacagataaactcacacatactggagatatatatataatagatatatataaaattattttaatgcattgtagtgtaatatttatgcatactatactgtataacatgttattcaaaagggattgccatttctgagacacagtaacaaaaaaatgaggaaattattttgcttctatttatagcctctgtcaaaagtcaaaagactataaatgctttgcaaaaatggtttcacgtttgcttaaatgcttcatcacagtcacattcaaaatagtgactctaaacaaagaagaaagcagcactgtcatcagatgcatgataaaccaaaatatgaaaatgggaaatgtttaattaacctagtaattgggtgggttaagtacatgggtgaattttatatgtgatttttgttttgttttgttttgttcagattaactgcttatagccttagaaagccttttacaaaattaaaaaaaaaatagatgtgcattcagtttttaagaatggaatcatccaaaggaattcctttttttgaggtttggatgttgcagctagtaaaggatatttttgctctgttcagcagttctaaaaattgctgaagtaggggccaggtcactggtagttatagtatggaatgggagaagtgaaagttcagttatagaactttccatacttccaagtttactgcaagtttttatgcttgagagagatgctttctaatataagactgatgtgttgattttactgattgtactgtacatctattaaagccttagattattacattacgggttggaacccataccaatgtaatttcaatcgtgttaagaaagtaatggtgacttcacatgttattgtagttagttacattatagaatattacttatttttcttgttaaaatgtagtttttcatttcctacatttattagattttcattttctattaacaattgaataccatttcagtttatagacttgttttattagattttaccaatgaatttttcaaaatacaaaaaaaagtagtttttccttcataacatactcagttttgaattacatgtagtgtcacatgaatattcgtattgttaactaaatgatttatattttactgatttaatattacagtgtaagaatgtcagtcattgttagttcttgtctagttttcattaaaagaacaaagatcttttatatggatatcttataaatatataatcattgctaagtaagaagttaagttgttgctatcgcaacaatcctggcagacaattgagtaatattttgatgatttattttgtttgtaattagttattataagaagatctagatcctagatattagaataaaatttattttctactgtatccatttcaaatgttaaaatattgtttaatatttttgaaatccctgagtatcaggccttgttataaataagctgcataatcaataaatagaacaagggactttttgttgataatccaaatactcaaagtttacgtaatgaaaattatagcgtgtgtgcaaactcttgagggttgattatgctgcaatttagcatgttggaacgtctagggagaaggttgactttttgcacttctgtatatagtcaaaagagagaaacctgtataatagtaagatcttattttgaataaaaacgtctataattacaaggagttttgttaaggctaatacaatgacagactgagcaaaattgcttgcaaaagtggcacagagttagcactccataccccttcaaacatgttgctttgctttcttgtggacagcttgtagtttgccaggattttttcagctggaaagatacgccatcctttcaaaccctcatgactgacaaaaactccatggggccaaatctgcctgaagatcattaccaaaaatagcaggtacttctaccattaaggtgaaatcatggatcagatattccttacatttttcaaaactactgcatgtttaaaacttcaac

SEQ ID NO: 18775 - DNA, 1054 bp, Homo sapiens
  source 1..1054: mol_type = unassigned DNA
atggctgttagtgtcacaccaattcgggacacaaaatggctaacactggaagtatgtagagagttccagagggggacttgctcacggccagacacggaatgtaaatttgcacatccttcgaaaagctgccaagttgaaaatggacgagtaatcgcctgctttgattcattgaaaggccgttgctccagggagaactgcaaatatcttcatccacccccacatttaaaaacgcagttggagataaatggacgcaataacttgattcagcagaagaacatggccatgttggcccagcaaatgcaactagccaatgccatgatgcctggtgccccattacaacccgtgccaatgttttcagttgcaccaagcttagccaccaatgcatcagcagccgcctttaatccctatctgggacctgtttctccaagcctggtcccggcagagatcttgccgactgcaccaatgttggttacagggaatccgggtgtccctgtacctgcagctgctgcagctgctgcacagaaattaatgcgaacagacagacttgaggtatgtcgagagtaccaacgtggcaattgcaaccgaggagaaaatgattgtcggtttgctcatcctgctgacagcacaatgattgacaccaatgacaacacagtcactgtgtgtatggattacatcaaagggagatgctctcgggaaaagtgcaaatactttcatccccctgcacatttgcaagccaagatcaaggctgcccaataccaggtcaaccaggctgcagctgcacaggctgcagccaccgcagctgccatgggaattcctcaagctgtacttcccccattaccaaagaggcctgctcttgaaaaaaccaacggtgccaccgcagtctttaacactggtattttccaataccaacaggctctagccaacatgcagttacaacagcatacagcatttctcccaccaggctcaatattgtgcatgacacccgctacaagtgttgatacccataatatctgccgaacatctgactagccacaagtatgttacccagatgtag

SEQ ID NO: 18776 - DNA, 4205 bp, Homo sapiens
  source 1..4205: mol_type = unassigned DNA
gaatgagttgtggcgcccacaatgctcccatgacaaggagctgacaagttccattttccgtcgcgggcatcttggaatcatgactcccacaatgccttgggcacttggtcgacagtggggccgcctctgaaaaaaaaatgtgagagcagtcactcaggaaatgttgtttaaggggaaccttctggatccttttcatggcaccatggcaagaagaagctgtatcttatctatggaagataaagcatggagttggctaatggatgctgataggaccatctagttgcaggaaaacaagctcagggctcccactgattctacattatgggccgttgctccagggagaactgcaaatatcttcatccacccccacatttaaaaacgcagttggagataaatggacgcaataacttgattcagcagaagaacatggccatgttggcccagcaaatgcaactagccaatgccatgatgcctggtgccccattacaacccgtgccaatgttttcagttgcaccaagcttagccaccaatgcatcagcagccgcctttaatccctatctgggacctgtttctccaagcctggtcccggcagagatcttgccgactgcaccaatgttggttacagggaatccgggtgtccctgtacctgcagctgctgcagctgctgcacagaaattaatgcgaacagacagacttgaggtatgtcgagagtaccaacgtggcaattgcaaccgaggagaaaatgattgtcggtttgctcatcctgctgacagcacaatgattgacaccaatgacaacacagtcactgtgtgtatggattacatcaaagggagatgctctcgggaaaagtgcaaatactttcatccccctgcacatttgcaagccaagatcaaggctgcccaataccaggtcaaccaggctgcagctgcacaggctgcagccaccgcagctgccatgactcagtcggctgtcaaatcactgaagcgacccctcgaggcaacctttgacctgggaattcctcaagctgtacttcccccattaccaaagaggcctgctcttgaaaaaaccaacggtgccaccgcagtctttaacactggtattttccaataccaacaggctctagccaacatgcagttacaacagcatacagcatttctcccaccaggctcaatattgtgcatgacacccgctacaagtgttgttcccatggtgcacggtgctacgccagccactgtgtccgcagcaacaacatctgccacaagtgttcccttcgctgcaacagccacagccaaccagatacccataatatctgccgaacatctgactagccacaagtatgttacccagatgtagaattttcatcactaaacaatcatgctaaagaggaaaggacagtgtgcttggttagagtaaaggacgaggtcattagccatattgtatatatcgtcaagcaacacacacaaaagttcctcagccacaagacatccacatattgcatgttaaccagaagaaaagacaacattttccggaaatccactgcacactgttgcctatacactttgtacatttaattgatatttgtgctgaggtgatattcctgtctaaaagaacaacattgtctttcttttctagcacagagttatgcattcaaagatgcatacctagttagtttcctatatattcatgccatcttgaaaagacagactatggtgtaaccatgattctattatgtattggtacgtctgtagaccaagatataattttttaaaaataagtttatttctttcaaggtttacaaataacaaaggtgcaccttgtatttaaaattgccattatagatgagagcgtgcatgcacagtcatttttgtttaagagtaatatttttaatgtaatagattgtaagacgtggtgagggagggatctgacagagatgaatgtgccaagcaaaaccacaactgtgtatattttaaagcacatcatggctttaagtaccatgttgttaaggattctcatgaagtgccatagactgtacatcaaattagagtattatttcttcagtgttattgttttcagagccacattttgttgcatatttgctagtactaatcagtcaaagggcaccattctttttttttttttttgaaaccaaagctgtctcagaaatggccaatttaactttacagtaacaatagacagcacaacacaaactctctcaatacagataaactcacacatactggagatatatatataatagatatatataaaattattttaatgcattgtagtgtaatatttatgcatactatactgtataacatgttattcaaaagggattgccatttctgagacacagtaacaaaaaaatgaggaaattattttgcttctatttatagcctctgtcaaaagtcaaaagactataaatgctttgcaaaaatggtttcacgtttgcttaaatgcttcatcacagtcacattcaaaatagtgactctaaacaaagaagaaagcagcactgtcatcagatgcatgataaaccaaaatatgaaaatgggaaatgtttaattaacctagtaattgggtgggttaagtacatgggtgaattttatatgtgatttttgttttgttttgttttgttcagattaactgcttatagccttagaaagccttttacaaaattaaaaaaaaaatagatgtgcattcagtttttaagaatggaatcatccaaaggaattcctttttttgaggtttggatgttgcagctagtaaaggatatttttgctctgttcagcagttctaaaaattgctgaagtaggggccaggtcactggtagttatagtatggaatgggagaagtgaaagttcagttatagaactttccatacttccaagtttactgcaagtttttatgcttgagagagatgctttctaatataagactgatgtgttgattttactgattgtactgtacatctattaaagccttagattattacattacgggttggaacccataccaatgtaatttcaatcgtgttaagaaagtaatggtgacttcacatgttattgtagttagttacattatagaatattacttatttttcttgttaaaatgtagtttttcatttcctacatttattagattttcattttctattaacaattgaataccatttcagtttatagacttgttttattagattttaccaatgaatttttcaaaatacaaaaaaaagtagtttttccttcataacatactcagttttgaattacatgtagtgtcacatgaatattcgtattgttaactaaatgatttatattttactgatttaatattacagtgtaagaatgtcagtcattgttagttcttgtctagttttcattaaaagaacaaagatcttttatatggatatcttataaatatataatcattgctaagtaagaagttaagttgttgctatcgcaacaatcctggcagacaattgagtaatattttgatgatttattttgtttgtaattagttattataagaagatctagatcctagatattagaataaaatttattttctactgtatccatttcaaatgttaaaatattgtttaatatttttgaaatccctgagtatcaggccttgttataaataagctgcataatcaataaatagaacaagggactttttgttgataatccaaatactcaaagtttacgtaatgaaaattatagcgtgtgtgcaaactcttgagggttgattatgctgcaatttagcatgttggaacgtctagggagaaggttgactttttgcacttctgtatatagtcaaaagagagaaacctgtataatagtaagatcttattttgaataaaaacgtctataattacaaggagttttgttaaggctaatacaatgacagactgagcaaaattgcttgcaaaagtggcacagagttagcactccataccccttcaaacatgttgctttgctttcttgtggacagcttgtagtttgccaggattttttcagctggaaagatacgccatcctttcaaaccctcatgactgacaaaaactccatggggccaaatctgcctgaagatcattaccaaaaatagcaggtacttctaccattaaggtgaaatcatggatcagatattccttacatttttcaaaactactgcatgtttaaaacttcaacaaaaaaagagagaaa

SEQ ID NO: 18777 - DNA, 5147 bp, Homo sapiens
  source 1..5147: mol_type = unassigned DNA
gttggtactaagaagtgcctttcctgacgtctctgctgcttggaaccgcttctagagcagtctctgcttttgccttgcttgctgccagctagactgtgacgacagcacatccaccctccacctctagcccagacacccccatttctacttataatcaagagaaaagctctaagtatctggcattgccctaggctgctttagtgttaaaagaaaagtttgctgaaaaagtaagatatcttctgccaggaaatcaaggaggaaaaaaaaaatcattttctcgattttgctctaaactgctgcatctgtctatgccaaactaatcaataccgattgcaccaccaaactccattgcaaattcagctgtgaggagattccctttcagacaactttgctgaaagcagcttggaaattcggtgtcgaagggtctgccacgttttcatgcttgcattttgggctccaaattggcactgggaaggggttactgagagcacaaggctgataccaggccctacttttaaacgttcatctacttacaatcctagtatttctctaaaaaccaaaacctctttgaattaacagtttcatgctgtgaatttctagtgggagatcttttccttgatattgacgacacaattttccatgtacttttaaagcagggagtggggaaaagtattttgaggggacattttcatcatcagttcagctttttttttttggttgttgctcttttttgggggggttgggtttgttggtttcactgaaacatttaactacctgtaaaatctaaacatggctgttagtgtcacaccaattcgggacacaaaatggctaacactggaagtatgtagagagttccagagggggacttgctcacggccagacacggaatgtaaatttgcacatccttcgaaaagctgccaagttgaaaatggacgagtaatcgcctgctttgattcattgaaaggccgttgctccagggagaactgcaaatatcttcatccacccccacatttaaaaacgcagttggagataaatggacgcaataacttgattcagcagaagaacatggccatgttggcccagcaaatgcaactagccaatgccatgatgcctggtgccccattacaacccgtggtatgtcgagagtaccaacgtggcaattgcaaccgaggagaaaatgattgtcggtttgctcatcctgctgacagcacaatgattgacaccaatgacaacacagtcactgtgtgtatggattacatcaaagggagatgctctcgggaaaagtgcaaatactttcatccccctgcacatttgcaagccaagatcaaggctgcccaataccaggtcaaccaggctgcagctgcacaggctgcagccaccgcagctgccatgggaattcctcaagctgtacttcccccattaccaaagaggcctgctcttgaaaaaaccaacggtgccaccgcagtctttaacactggtattttccaataccaacaggctctagccaacatgcagttacaacagcatacagcatttctcccaccaggctcaatattgtgcatgacacccgctacaagtgttgttcccatggtgcacggtgctacgccagccactgtgtccgcagcaacaacatctgccacaagtgttcccttcgctgcaacagccacagccaaccagatacccataatatctgccgaacatctgactagccacaagtatgttacccagatgtagaattttcatcactaaacaatcatgctaaagaggaaaggacagtgtgcttggttagagtaaaggacgaggtcattagccatattgtatatatcgtcaagcaacacacacaaaagttcctcagccacaagacatccacatattgcatgttaaccagaagaaaagacaacattttccggaaatccactgcacactgttgcctatacactttgtacatttaattgatatttgtgctgaggtgatattcctgtctaaaagaacaacattgtctttcttttctagcacagagttatgcattcaaagatgcatacctagttagtttcctatatattcatgccatcttgaaaagacagactatggtgtaaccatgattctattatgtattggtacgtctgtagaccaagatataattttttaaaaataagtttatttctttcaaggtttacaaataacaaaggtgcaccttgtatttaaaattgccattatagatgagagcgtgcatgcacagtcatttttgtttaagagtaatatttttaatgtaatagattgtaagacgtggtgagggagggatctgacagagatgaatgtgccaagcaaaaccacaactgtgtatattttaaagcacatcatggctttaagtaccatgttgttaaggattctcatgaagtgccatagactgtacatcaaattagagtattatttcttcagtgttattgttttcagagccacattttgttgcatatttgctagtactaatcagtcaaagggcaccattctttttttttttttttgaaaccaaagctgtctcagaaatggccaatttaactttacagtaacaatagacagcacaacacaaactctctcaatacagataaactcacacatactggagatatatatataatagatatatataaaattattttaatgcattgtagtgtaatatttatgcatactatactgtataacatgttattcaaaagggattgccatttctgagacacagtaacaaaaaaatgaggaaattattttgcttctatttatagcctctgtcaaaagtcaaaagactataaatgctttgcaaaaatggtttcacgtttgcttaaatgcttcatcacagtcacattcaaaatagtgactctaaacaaagaagaaagcagcactgtcatcagatgcatgataaaccaaaatatgaaaatgggaaatgtttaattaacctagtaattgggtgggttaagtacatgggtgaattttatatgtgatttttgttttgttttgttttgttcagattaactgcttatagccttagaaagccttttacaaaattaaaaaaaaaatagatgtgcattcagtttttaagaatggaatcatccaaaggaattcctttttttgaggtttggatgttgcagctagtaaaggatatttttgctctgttcagcagttctaaaaattgctgaagtaggggccaggtcactggtagttatagtatggaatgggagaagtgaaagttcagttatagaactttccatacttccaagtttactgcaagtttttatgcttgagagagatgctttctaatataagactgatgtgttgattttactgattgtactgtacatctattaaagccttagattattacattacgggttggaacccataccaatgtaatttcaatcgtgttaagaaagtaatggtgacttcacatgttattgtagttagttacattatagaatattacttatttttcttgttaaaatgtagtttttcatttcctacatttattagattttcattttctattaacaattgaataccatttcagtttatagacttgttttattagattttaccaatgaatttttcaaaatacaaaaaaaagtagtttttccttcataacatactcagttttgaattacatgtagtgtcacatgaatattcgtattgttaactaaatgatttatattttactgatttaatattacagtgtaagaatgtcagtcattgttagttcttgtctagttttcattaaaagaacaaagatcttttatatggatatcttataaatatataatcattgctaagtaagaagttaagttgttgctatcgcaacaatcctggcagacaattgagtaatattttgatgatttattttgtttgtaattagttattataagaagatctagatcctagatattagaataaaatttattttctactgtatccatttcaaatgttaaaatattgtttaatatttttgaaatccctgagtatcaggccttgttataaataagctgcataatcaataaatagaacaagggactttttgttgataatccaaatactcaaagtttacgtaatgaaaattatagcgtgtgtgcaaactcttgagggttgattatgctgcaatttagcatgttggaacgtctagggagaaggttgactttttgcacttctgtatatagtcaaaagagagaaacctgtataatagtaagatcttattttgaataaaaacgtctataattacaaggagttttgttaaggctaatacaatgacagactgagcaaaattgcttgcaaaagtggcacagagttagcactccataccccttcaaacatgttgctttgctttcttgtggacagcttgtagtttgccaggattttttcagctggaaagatacgccatcctttcaaaccctcatgactgacaaaaactccatggggccaaatctgcctgaagatcattaccaaaaatagcaggtacttctaccattaaggtgaaatcatggatcagatattccttacatttttcaaaactactgcatgtttaaaacttcaacaaaaaaagagagaaagaactatactaagaacatatattattcagatcagtttctgccaatttcagtggtttattgttcacaaaaaaatcttcaaaacaagtattgactttcacaaaatttaaatcataaacaggcaaaccaaacagcacactgtagctatagttgttatgtgattgttttttaattgctgtaggatcctgttctttcagcaggtgaaaaataaaacgcagttcaaatttcatggttttaattttcaactcagaagcactcaaaaatgcaaaatgtgataatgggcacttgtttaaaagaattagtgtatccagccttcactccagctggttaaaaatgttgcacttatcagcaaccctaccactttcatctgctgaaaggacaaatgtgcttggttttactattatgtaatcacaacttactttctgcttgtagttgcttaaaattatgtattttgtcttgggctgcaatttgttttatgcttattttattattactgcagtagttgactttgctgtatggaaaaataaagtgaaattgccctaataaaacttctctttcttaagt

SEQ ID NO: 18778 - DNA, 1575 bp, Homo sapiens
  source 1..1575: mol_type = unassigned DNA
aattcatttttaatcctttaatagtccacagtaatattgtcctaaagagggtacattggattttaattttgctttcaatatgacggctgtcaatgttgccctgattcgtgataccaagtggctgactttagaagtctgtagagaatttcagagaggaacttgctctcgagctgatgcagattgcaagtttgcccatccaccaagagtttgccatgtggaaaatggtcgtgtggtggcctgttttgattctctaaagggtcggtgtacccgagagaactgcaagtaccttcaccctcctccacacttaaaaacgcagctggagattaatgggcggaacaatctgattcaacagaagactgccgcagccatgttcgcccagcagatgcagcttatgctccaaaacgctcaaatgtcatcacttggttcttttcctatgactccatcaattccagctaatcctcccatggctttcaatccttacataccacatcctgggatgggcctcgttcctgcagaacttgtaccaaatacacctgttctgattcctggaaacccacctcttgcaatgccaggagctgttggcccaaaactgatgcgttcagataaactggaggtttgccgagaatttcagcgtggaaattgtacccgtggggagaatgattgccgctatgctcaccctactgatgcttccatgattgaagcgagtgataatactgtgacaatctgcatggattacatcaaaggtcgatgctcgcgggagaaatgcaagtactttcatcctcctgcacacttgcaagccagactcaaggcagctcatcatcagatgaaccattcagctgcctctgccatggctctgactaacctgcagctcccacagccggcatttatccctgcagggccaatactgtgcatggcacccgcttcaaatattgtgcccatgatgcacggtgctacacctaccactgtgtctgcagcaacaacacctgccaccagcgttccgttcgctgcaccaactacaggcaatcagataccccaattatcaatagatgaactgaatagcagcatgtttgtttcacagatgtagaagttctcagtagaacactgaaattctgaacagcagagttatggagtatcagaatctttccatggaaacctccatatggcctttctatatatattctcgtatgtcttattctaccaacacaacaataagcgtgttgcagtcaatgtattaagcaaagcaaacctgccagccagcaaattcaaataaaaaataaagcattaaaaatcaatggagatgttaaaacaacacaaatagaaaactagtaactaccatccatcctatttgaattatcaagcagaacatgaccataaaatttggtaacttgttacattactctttgtgattttctaataaccatgctaagtgtatttccacagtgagcttttggcttactatatacattcttggtggataaattgttcatctgtttttgaagtgttaccttactattttgtttacaagatagtctattgggttgattcaggatgtaacaaatatattcagtaccattt

SEQ ID NO: 18779 - DNA, 1643 bp, Homo sapiens
  source 1..1643: mol_type = unassigned DNA
tgcccgcactccgagcgtgagccgcagcgcgactttttggcgctctttgggagcagtgagagagaggcggaggccagagagtccggggtgggcgcgggagccggggcggcccttggccgcattcccgcccgtcccgcagcggcgcgcggagccagtggctgactttagaagtctgtagagaatttcagagaggaacttgctctcgagctgatgcagattgcaagtttgcccatccaccaagagtttgccatgtggaaaatggtcgtgtggtggcctgttttgattctctaaagggtcggtgtacccgagagaactgcaagtaccttcaccctcctccacacttaaaaacgcagctggagattaatgggcggaacaatctgattcaacagaagactgccgcagccatgttcgcccagcagatgcagcttatgctccaaaacgctcaaatgtcatcacttggttcttttcctatgactccatcaattccagctaatcctcccatggctttcaatccttacataccacatcctgggatgggcctcgttcctgcagaacttgtaccaaatacacctgttctgattcctggaaacccacctcttgcaatgccaggagctgttggcccaaaactgatgcgttcagataaactggaggtttgccgagaatttcagcgtggaaattgtacccgtggggagaatgattgccgctatgctcaccctactgatgcttccatgattgaagcgagtgataatactgtgacaatctgcatggattacatcaaaggtcgatgctcgcgggagaaatgcaagtactttcatcctcctgcacacttgcaagccagactcaaggcagctcatcatcagatgaaccattcagctgcctctgccatggccctgcagcctggtacactgcaactgataccaaagagatcagcactggaaaagcccaatggtgccaccccggtctttaatcccactgttttccactgccaacaggctctgactaacctgcagctcccacagccggcatttatccctgcagggccaatactgtgcatggcacccgcttcaaatattgtgcccatgatgcacggtgctacacctaccactgtgtctgcagcaacaacacctgccaccagcgttccgttcgctgcaccaactacaggcaatcagctgaaattctgaacagcagagttatggagtatcagaatctttccatggaaacctccatatggcctttctatatatattctcgtatgtcttattctaccaacacaacaataagcgtgttgcagtcaatgtattaagcaaagcaaacctgccagccagcaaattcaaataaaaaataaagcattaaaaatcaatggagatgttaaaacaacacaaatagaaaactagtaactaccatccatcctatttgaattatcaagcagaacatgaccataaaatttggtaacttgttacattactctttgtgattttctaataaccatgctaagtgtatttccacagtgagcttttggcttactatatacattcttggtggataaattgttcatctgtttttgaagtgttaccttactattttgtttacaagatagtctattgggttgattcaggatgtaacaaatatattcagtaccattt

SEQ ID NO: 18780 - DNA, 1444 bp, Homo sapiens
  source 1..1444: mol_type = unassigned DNA
ggggctgagagtgtcttctactttactctgggcaaatgaaggcctgggagagcctgggctgattccatggagagggcttctaagaatcttaagggtcggtgtacccgagagaactgcaagtaccttcaccctcctccacacttaaaaacgcagctggagattaatgggcggaacaatctgattcaacagaagactgccgcagccatgttcgcccagcagatgcagcttatgctccaaaacgctcaaatgtcatcacttggttcttttcctatgactccatcaattccagctaatcctcccatggctttcaatccttacataccacatcctgggatgggcctcgttcctgcagaacttgtaccaaatacacctgttctgattcctggaaacccacctcttgcaatgccaggagctgttggcccaaaactgatgcgttcagataaactggaggtttgccgagaatttcagcgtggaaattgtacccgtggggagaatgattgccgctatgctcaccctactgatgcttccatgattgaagcgagtgataatactgtgacaatctgcatggattacatcaaaggtcgatgctcgcgggagaaatgcaagtactttcatcctcctgcacacttgcaagccagactcaaggcagctcatcatcagatgaaccattcagctgcctctgccatggccctgcagcctggtacactgcaactgataccaaagagatcagcactggaaaagcccaatggtgccaccccggtctttaatcccactgttttccactgccaacaggctctgactaacctgcagctcccacagccggcatttatccctgcagggccaatactgtgcatggcacccgcttcaaatattgtgcccatgatgcacggtgctacacctaccactgtgtctgcagcaacaacacctgccaccagcgttccgttcgctgcaccaactacaggcaatcagctgaaattctgaacagcagagttatggagtatcagaatctttccatggaaacctccatatggcctttctatatatattctcgtatgtcttattctaccaacacaacaataagcgtgttgcagtcaatgtattaagcaaagcaaacctgccagccagcaaattcaaataaaaaataaagcattaaaaatcaatggagatgttaaaacaacacaaatagaaaactagtaactaccatccatcctatttgaattatcaagcagaacatgaccataaaatttggtaacttgttacattactctttgtgattttctaataaccatgctaagtgtatttccacagtgagcttttggcttactatatacattcttggtggataaattgttcatctgtttttgaagtgttaccttactattttgtttacaagatagtctattgggttgattcaggatgtaacaaatatattcagtaccatttc

SEQ ID NO: 18781 - DNA, 2661 bp, Homo sapiens
  source 1..2661: mol_type = unassigned DNA
aattcatttttaatcctttaatagtccacagtaatattgtcctaaagagggtacattggattttaattttgctttcaatatgacggctgtcaatgttgccctgattcgtgataccaagtggctgactttagaagtctgtagagaatttcagagaggaacttgctctcgagctgatgcagattgcaagtttgcccatccaccaagagtttgccatgtggaaaatggtcgtgtggtggcctgttttgattctctaaagggtcggtgtacccgagagaactgcaagtaccttcaccctcctccacacttaaaaacgcagctggagattaatgggcggaacaatctgattcaacagaagactgccgcagccatgttcgcccagcagatgcagcttatgctccaaaacgctcaaatgtcatcacttggttcttttcctatgactccatcaattccagctaatcctcccatggctttcaatccttacataccacatcctgggatgggcctcgttcctgcagaacttgtaccaaatacacctgttctgattcctggaaacccacctcttgcaatgccaggagctgttggcccaaaactgatgcgttcagataaactggaggtttgccgagaatttcagcgtggaaattgtacccgtggggagaatgattgccgctatgctcaccctactgatgcttccatgattgaagcgagtgataatactgtgacaatctgcatggattacatcaaaggtcgatgctcgcgggagaaatgcaagtactttcatcctcctgcacacttgcaagccagactcaaggcagctcatcatcagatgaaccattcagctgcctctgccatggccctgcagcctggtacactgcaactgataccaaagagatcagcactggaaaagcccaatggtgccaccccggtctttaatcccactgttttccactgccaacaggctctgactaacctgcagctcccacagccggcatttatccctgcagggccaatactgtgcatggcacccgcttcaaatattgtgcccatgatgcacggtgctacacctaccactgtgtctgcagcaacaacacctgccaccagcgttccgttcgctgcaccaactacaggcaatcagctgaaattctgaacagcagagttatggagtatcagaatctttccatggaaacctccatatggcctttctatatatattctcgtatgtcttattctaccaacacaacaataagcgtgttgcagtcaatgtattaagcaaagcaaacctgccagccagcaaattcaaataaaaaataaagcattaaaaatcaatggagatgttaaaacaacacaaatagaaaactagtaactaccatccatcctatttgaattatcaagcagaacatgaccataaaatttggtaacttgttacattactctttgtgattttctaataaccatgctaagtgtatttccacagtgagcttttggcttactatatacattcttggtggataaattgttcatctgtttttgaagtgttaccttactattttgtttacaagatagtctattgggttgattcaggatgtaacaaatatattcagtaccatttcttgtgttgtattgtgttgtgctgtgttaggtttttacatactgtagtgttttgctgtatatgtgtggtgtttgatttcaactaaagtgttattagtggggaacagaagtatatgtgcttaagaacatgacaggttcatgcaaatatgctctctttctttagaatatttctgtaggtttcttgggactgacatttaaaacgcctcacttttgaatgtgcacaaaacctgctcattaacatgcatgtgtataatttgtacctgcagatctgatgttgcataatacaatcaaattactagattttttaaagagagaaataattacctgcacaaagcagagaacttcataaaacattaacccctaattcactcttcttaaatagcttggcaaataagactttacctttaaatgaatttctcagcatttatactaaaaattatgtaaagtgctcattagattttttgtgtgtgtggcttgagaatcccatctcctaaattgagtgtctaaaactgagccatttgtcatcttcagctgagaaactggtacttgggagcttaaaaatatgctaattacaagttataaatcaaacggagagatgggggcatggagatagtttttacgtactggaggaaagtgtgtaaaaccatggcaatgtcaccttttacacaaatgccattttccaaatgcaaatggctcatgctctttagactactctttgaataacaagtaagatgcaatctagcaaaagtcagtcagggtgaaagagaattggttgcaaatgaggacttccctccccaaatggacagtcttctctgttgatcacagagggagcctgagtacaggcttggagaaatggctaggacagggaacagggaagcacttacaattattccttgatttattcaaaagaactgggaaagatggttgtagttgtctttagcttcggttcaactgagtttcgttttgttaaacagttcagtgaaggagaaagcacctgtgatatatggcaagtgtccccctgcccaaactttaacatcagaccctctcacatcataa

SEQ ID NO: 18782 - DNA, 8760 bp, Homo sapiens
  source 1..8760: mol_type = unassigned DNA
tcctttaatagtccacagtaatattgtcctaaagagggtacattggattttaattttgctttcaatatgacggctgtcaatgttgccctgattcgtgataccaagtggctgactttagaagtctgtagagaatttcagagaggaacttgctctcgagctgatgcagattgcaagtttgcccatccaccaagagtttgccatgtggaaaatggtcgtgtggtggcctgttttgattctctaaagggtcggtgtacccgagagaactgcaagtaccttcaccctcctccacacttaaaaacgcagctggagattaatgggcggaacaatctgattcaacagaagactgccgcagccatgttcgcccagcagatgcagcttatgctccaaaacgctcaaatgtcatcacttggttcttttcctatgactccatcaattccagctaatcctcccatggctttcaatccttacataccacatcctgggatgggcctcgttcctgcagaacttgtaccaaatacacctgttctgattcctggaaacccacctcttgcaatgccaggagctgttggcccaaaactgatgcgttcagataaactggaggtttgccgagaatttcagcgtggaaattgtacccgtggggagaatgattgccgctatgctcaccctactgatgcttccatgattgaagcgagtgataatactgtgacaatctgcatggattacatcaaaggtcgatgctcgcgggagaaatgcaagtactttcatcctcctgcacacttgcaagccagactcaaggcagctcatcatcagatgaaccattcagctgcctctgccatggccctgcagcctggtacactgcaactgataccaaagagatcagcactggaaaagcccaatggtgccaccccggtctttaatcccactgttttccactgccaacaggctctgactaacctgcagctcccacagccggcatttatccctgcagtgcccatgatgcacggtgctacacctaccactgtgtctgcagcaacaacacctgccaccagcgttccgttcgctgcaccaactacaggcaatcagctgaaattctgaacagcagagttatggagtatcagaatctttccatggaaacctccatatggcctttctatatatattctcgtatgtcttattctaccaacacaacaataagcgtgttgcagtcaatgtattaagcaaagcaaacctgccagccagcaaattcaaataaaaaataaagcattaaaaatcaatggagatgttaaaacaacacaaatagaaaactagtaactaccatccatcctatttgaattatcaagcagaacatgaccataaaatttggtaacttgttacattactctttgtgattttctaataaccatgctaagtgtatttccacagtgagcttttggcttactatatacattcttggtggataaattgttcatctgtttttgaagtgttaccttactattttgtttacaagatagtctattgggttgattcaggatgtaacaaatatattcagtaccatttcttgtgttgtattgtgttgtgctgtgttaggtttttacatactgtagtgttttgctgtatatgtgtggtgtttgatttcaactaaagtgttattagtggggaacagaagtatatgtgcttaagaacatgacaggttcatgcaaatatgctctctttctttagaatatttctgtaggtttcttgggactgacatttaaaacgcctcacttttgaatgtgcacaaaacctgctcattaacatgcatgtgtataatttgtacctgcagatctgatgttgcataatacaatcaaattactagattttttaaagagagaaataattacctgcacaaagcagagaacttcataaaacattaacccctaattcactcttcttaaatagcttggcaaataagactttacctttaaatgaatttctcagcatttatactaaaaattatgtaaagtgctcattagattttttgtgtgtgtggcttgagaatcccatctcctaaattgagtgtctaaaactgagccatttgtcatcttcagctgagaaactggtacttgggagcttaaaaatatgctaattacaagttataaatcaaacggagagatgggggcatggagatagtttttacgtactggaggaaagtgtgtaaaaccatggcaatgtcaccttttacacaaatgccattttccaaatgcaaatggctcatgctctttagactactctttgaataacaagtaagatgcaatctagcaaaagtcagtcagggtgaaagagaattggttgcaaatgaggacttccctccccaaatggacagtcttctctgttgatcacagagggagcctgagtacaggcttggagaaatggctaggacagggaacagggaagcacttacaattattccttgatttattcaaaagaactgggaaagatggttgtagttgtctttagcttcggttcaactgagtttcgttttgttaaacagttcagtgaaggagaaagcacctgtgatatatggcaagtgtccccctgcccaaactttaacatcagaccctctcacatcataaccaagcctcttttatgcttgtttggattcgtttgcctttatatatgtttgaaaatgacaatagaaagggttttatcaccctttgaatgagacagagtggctatactccacagagctcagctgagttcacattactaatatttatgaaagaattttacaaccaaataattcctgtggtgtgtgacatatctcatccactctactcatttattaatgttattatacagtggtggaaacacatgacattttacatcaagtaatagatttaatattttctagtaaataggcgctcttccaccagaaagtataaaaccatcatatacatatatatatatatatataatggtttttctccttcatgaaaatgacaagtaaaaagcaaatctgattgaggataccttaagctggctagaagtgtttgaatcacagaacaatggaattagcaaaatcctttttatagttgatggaactgaatccaggggcatatgacttgcccaaggctaccttagccattgtgggacccagaaatatctcctgcttcccattgttcctccttttcacattgtttttgcttcagaacatttgatgctctcttccaaagcagacccatttggctcagaatataagagagcaaaattagctttctgggaattgatactctgttgatcttaattatccatccaaatcctgatcaacagtgctttctaaacagccttgcttgtattgagtcattgtcagctgttgacaatgttgcgtggaattagagatcaagagttgtcctgacctttacctatggactctttgaaccagttaatttctatttctgaaatcttaacattgctatagaagaaagtagtgtatgcctttttgaaattcatcatgtatggaactgagttttgtatgatccgtgccagtgcctctccagaagggcagatctgattacatgaatccaggagggatgcacctgagctagtctggatatattccttaaaggagacaagaacttttttgtgcaaaatgaacttttgtgtagtttgacatctgcatgcagtgaactgtctcacttaactttttcaactttgggcaaagatatacataaaccatagataatagacctacagtacagctgttttcatgttgcgttaagcactggaagacattaacaatgacttaccttaaagtaaaaggttccgtgaggggtatttagggccactgtatttttggtgccacaattttctacattgttggcattttaaaagttgttttctaaatgaacttaaagaaagaaagctcaaagccctaaagttttgatcaaattcaatagagttttcagaaaaaaatacaattttaagatagcactctttaaactagatgtgcaatgacttattcaaattatctttattcaagaaaagagaaaagaagaaagataagtcattagactataaatttccatttaaaaagacaagtcacaaaactaatcagtgactctaaacaaaaatttactggatgaattgtatatataaaattctaatcacttatgattcttagttaacattttataagctttgtattttacaggggcctctatttatccaaatttattgtttttgtccatttttctcagccttttgcaaaaaatatgcaagagtgctgaaacttggataaaacgggtcatgtatacagagaaaataatctaaaagttatctttaagagggttttagtagtgtcaactttttaaaaaagtactatgtgaccataacatacgtatattttaaagagggattaagattaaattaaaataaatggattcataaaattgctatttaaatacagtatttacttttgtaattgaagcatgattccacaaccagctgtggcattttatttcacttttctagatcagaggctttaatttgtagttaatcatgatgtggaaagtcatcttctctctactccatcaatttttttcatccgtttttgaacatgctgaagcactttgatcttgccataagtgttgtcctataccactaggtggtgttcactaatgggagggcctcagctcaccggctctccaatttgggaaaaagcaagtacctcctccctaccatcagcagaaactgaatgaaattaatctttgcaacttgaatctgttttaagtagcattaccaataagcatagtggtatctgaataaggaatgacatttacattacattttattaaataagagagaaagttaatgtgctacttgaaatgttatttggttctttgtccccctcattgcagagtatagataaggatgctcttaggtaaaatgcagccacaagttttccgagttcctttagtctgtagggtaggctatgaggtacagaatgattagaaactgaaatcctcattatttttctctcaaatacatttcacatacattgaaacagaaataggcaaaatttatgagggaaatctgatttcccaattctgatgaatagatatactaagacagtagccttgtttaaccagtgcctgtagaaggcactagaataaatagcatgtccaagagtataacaactttttttgtaaatttagttactagcctaatcaaactgtaaatataactcactaattggtaccatattttcatttttcttattgttcatctttaaggtttcattttattgcttttttgtagctctaagtaactaatcaatttaatttcaaaggaaagttaaagaaagtttaagcttttactgcatggattctgcccgcctagctaggttctgaactgacactgaagtatgacaagatacagattatagtccaaaactatcctttacagttcacaatttaagaacaaatttaactttatatacaaataataattgttatctaattatatttagttgttgctttggcaacaaaattacaacatggctacctttagacatttgtgtatgtgaacattttacttgtaaactataggtgatttgtgacagtatgagcctgtagaaaatacagctcaaaactatgaaaacagacatggttgagttcttttttaatcccaaaggcccatatataaaagctgaatttgtgtccttgtgtgactttttgtgaaaaagtttataacacatggattctagaatcaggctttatagtttatagaatttgttgtgtggatagggttattccacagtatttagacttcaaaacgcaatcattgcatttttaatacattacctaactttttttataacttaattcaaaattaccccattcaagtggcatagctgtagctgcaaaaattctgttttctggaattacatgagcaaatatagctatatgaggattaatgtatgactaaagcctcttttgaaattaattcatatttttaaaactatacataaagatactgtggaatgaccccttaacagtgtttaagaaacatatgctgcagttaattgactgtctcagttagggtgcggatgtgtgagacacaccttttttgcacttatgtacatagtccatgaaagcaatccttggagctttttttaaatgtaagaagtctgtgataatagtggaaaagttagtaagagagagttatttctaaggctttgaaaaggagggtgtttttgctctaagacttaactaaagcataatgttgctttgctgttacggaggctttctagtttgctacaggtcaccaaaagagaaggctagtaacaggtaacaggtcagcctcagctaacagcactgaacaagagtagaataacttcatcttttaacaagatcattagcaaagattgtttgctttttaaattaatcccccctataaacacacacacacgtgtgcacacacacacacacacacacacaccgggcagtttctagaacaagttttcctttttcagtggttgtaagcagtgaaatacctcatgtattacaagatagatattaccgttatgatagaataagatttcatctttcacagaaagtgatcagctgatatatgtgtcagttaaaatgtttatcaattaataggtatttaagtgacaaattgttaatgttgaccattgttcctcctttaagatccagtaaccaaaaccaaatcggtaaccattgaaagatgatatttaacagttaaggatggccagcatagggccgttcattcccttcaacaaagggaaaaaaaatgctcctggcacaactttataactggcttcatttacattatacctgttcagtggaagctgttttttgacctacctttaccagattacaaagtagttaactgtgccacttcagcctcccactgttttgttttaactaaacagaagagaaccagccaaaatcttacgtaacacaggagctggaagacaatgtttcaatctgaccatctctgccaattttagctcccacgccacctatagatagccagttaactttctttttgcccccaggcaatgaggcctagaagaggtcaaggttagaaaggttaagcatttgatcactacaggtacttgtagtacctagagaaggaacccatcctggggttggtggagttggtattgctactcgttttgatagttctcatttacagagaaagaaaaataagccaaagccagaaagcaatccaagccttacagttgtccaatacctcagggccagttggctagaattttcttttccctcagcccataatcacttagagttagccatacaacaaacagcctgacaatctgaccagcatttccattgatataaaatgtaagcattccttcattctgtagttaggaactccaacttcagccttatctccaacataatttcccaatttaacctatgtactgatatggacatttctttgtgaatatgccagattcaagaatgtatttttctaaggtcaatagagatacgacattttaagtcaggaaaaatcacctataaattagtaggaataactgtagaagcatcacaaaagataccccatgaatagatggcatggtgtgcatgctgacagccacggggtcatactctggagtttcaacatagaggctgtgtttcaataaataagacaaattggggaattaagtaaaacaaatggatgtaactgaggcccccccccaaaaaaagccctctattactaacctcaagaaaatatttagtttgactaatttgtgcagtttccagctcttctacttgttcttgcctgtaagagaatcactaatactcaaaagctggattattgaagagaaattttatctttaaatagaatccatccacaattatggtatatgtaaaaaaaatgtatgactatgaaataagtcgcagctctttgcagatattgcaaaatccttgctaggcatctacatcatattagttttttaaaaaatacctctgtaacaagacctaaaagtaacctaactattaagcagtgcttttttctctgaaaacacacaacctaaagatttatctgtcataaaactgcatggttccagagctttatttctgtgtagagatgctatttgttagtgatggaaacaaattactttgttgctatgtcttttgtgtctagcagttgagagaatgatatgaccatcatatcactggattatgggaatgaatgcccttttcaaaataaacttatttattaatattttaatattattttaatattataatattaataatattttaatattattgttgctgctttaacagaaaatgagccatttgtccccatgctcccaaattacaatgatttaaattaaaaaacttttgaaggattttcctaaatatattcttttttaaaggactaactttgtgcattcatataacaacaatttggaataatgtgaaaaatggaggcacataatttgggtggaaaatggcgattaaaaatatatataagaaaattattagccatgtgtaacatatttaaataatgaccagaatatttcatgagtaccaactcttcccatagtaattttcctccaaaatgcaatagctcattccctcaactgcagacgctttgattttttttcaagttatagtgctgtagtgcttgtttatgtttaaaagtgcacattatgcagctcattttagtatgctacttctatgtttattttttgttcttctaataaaatgcataaacttcttg

SEQ ID NO: 18783 - DNA, 11263 bp, Homo sapiens
  source 1..11263: mol_type = unassigned DNA
ccttaaatttccttgcagctgatcagggtcggtgtacccgagagaactgcaagtaccttcaccctcctccacacttaaaaacgcagctggagattaatgggcggaacaatctgattcaacagaagactgccgcagccatgttcgcccagcagatgcagcttatgctccaaaacgctcaaatgtcatcacttggttcttttcctatgactccatcaattccagctaatcctcccatggctttcaatccttacataccacatcctgggatgggcctcgttcctgcagaacttgtaccaaatacacctgttctgattcctggaaacccacctcttgcaatgccaggagctgttggcccaaaactgatgcgttcagataaactggaggtttgccgagaatttcagcgtggaaattgtacccgtggggagaatgattgccgctatgctcaccctactgatgcttccatgattgaagcgagtgataatactgtgacaatctgcatggattacatcaaaggtcgatgctcgcgggagaaatgcaagtactttcatcctcctgcacacttgcaagccagactcaaggcagctcatcatcagatgaaccattcagctgcctctgccatggccctgcagcctggtacactgcaactgataccaaagagatcagcactggaaaagcccaatggtgccaccccggtctttaatcccactgttttccactgccaacaggctctgactaacctgcagctcccacagccggcatttatccctgcagggccaatactgtgcatggcacccgcttcaaatattgtgcccatgatgcacggtgctacacctaccactgtgtctgcagcaacaacacctgccaccagcgttccgttcgctgcaccaactacaggcaatcagctgaaattctgaacagcagagttatggagtatcagaatctttccatggaaacctccatatggcctttctatatatattctcgtatgtcttattctaccaacacaacaataagcgtgttgcagtcaatgtattaagcaaagcaaacctgccagccagcaaattcaaataaaaaataaagcattaaaaatcaatggagatgttaaaacaacacaaatagaaaactagtaactaccatccatcctatttgaattatcaagcagaacatgaccataaaatttggtaacttgttacattactctttgtgattttctaataaccatgctaagtgtatttccacagtgagcttttggcttactatatacattcttggtggataaattgttcatctgtttttgaagtgttaccttactattttgtttacaagatagtctattgggttgattcaggatgtaacaaatatattcagtaccatttcttgtgttgtattgtgttgtgctgtgttaggtttttacatactgtagtgttttgctgtatatgtgtggtgtttgatttcaactaaagtgttattagtggggaacagaagtatatgtgcttaagaacatgacaggttcatgcaaatatgctctctttctttagaatatttctgtaggtttcttgggactgacatttaaaacgcctcacttttgaatgtgcacaaaacctgctcattaacatgcatgtgtataatttgtacctgcagatctgatgttgcataatacaatcaaattactagattttttaaagagagaaataattacctgcacaaagcagagaacttcataaaacattaacccctaattcactcttcttaaatagcttggcaaataagactttacctttaaatgaatttctcagcatttatactaaaaattatgtaaagtgctcattagattttttgtgtgtgtggcttgagaatcccatctcctaaattgagtgtctaaaactgagccatttgtcatcttcagctgagaaactggtacttgggagcttaaaaatatgctaattacaagttataaatcaaacggagagatgggggcatggagatagtttttacgtactggaggaaagtgtgtaaaaccatggcaatgtcaccttttacacaaatgccattttccaaatgcaaatggctcatgctctttagactactctttgaataacaagtaagatgcaatctagcaaaagtcagtcagggtgaaagagaattggttgcaaatgaggacttccctccccaaatggacagtcttctctgttgatcacagagggagcctgagtacaggcttggagaaatggctaggacagggaacagggaagcacttacaattattccttgatttattcaaaagaactgggaaagatggttgtagttgtctttagcttcggttcaactgagtttcgttttgttaaacagttcagtgaaggagaaagcacctgtgatatatggcaagtgtccccctgcccaaactttaacatcagaccctctcacatcataaccaagcctcttttatgcttgtttggattcgtttgcctttatatatgtttgaaaatgacaatagaaagggttttatcaccctttgaatgagacagagtggctatactccacagagctcagctgagttcacattactaatatttatgaaagaattttacaaccaaataattcctgtggtgtgtgacatatctcatccactctactcatttattaatgttattatacagtggtggaaacacatgacattttacatcaagtaatagatttaatattttctagtaaataggcgctcttccaccagaaagtataaaaccatcatatacatatatatatatatatataatggtttttctccttcatgaaaatgacaagtaaaaagcaaatctgattgaggataccttaagctggctagaagtgtttgaatcacagaacaatggaattagcaaaatcctttttatagttgatggaactgaatccaggggcatatgacttgcccaaggctaccttagccattgtgggacccagaaatatctcctgcttcccattgttcctccttttcacattgtttttgcttcagaacatttgatgctctcttccaaagcagacccatttggctcagaatataagagagcaaaattagctttctgggaattgatactctgttgatcttaattatccatccaaatcctgatcaacagtgctttctaaacagccttgcttgtattgagtcattgtcagctgttgacaatgttgcgtggaattagagatcaagagttgtcctgacctttacctatggactctttgaaccagttaatttctatttctgaaatcttaacattgctatagaagaaagtagtgtatgcctttttgaaattcatcatgtatggaactgagttttgtatgatccgtgccagtgcctctccagaagggcagatctgattacatgaatccaggagggatgcacctgagctagtctggatatattccttaaaggagacaagaacttttttgtgcaaaatgaacttttgtgtagtttgacatctgcatgcagtgaactgtctcacttaactttttcaactttgggcaaagatatacataaaccatagataatagacctacagtacagctgttttcatgttgcgttaagcactggaagacattaacaatgacttaccttaaagtaaaaggttccgtgaggggtatttagggccactgtatttttggtgccacaattttctacattgttggcattttaaaagttgttttctaaatgaacttaaagaaagaaagctcaaagccctaaagttttgatcaaattcaatagagttttcagaaaaaaatacaattttaagatagcactctttaaactagatgtgcaatgacttattcaaattatctttattcaagaaaagagaaaagaagaaagataagtcattagactataaatttccatttaaaaagacaagtcacaaaactaatcagtgactctaaacaaaaatttactggatgaattgtatatataaaattctaatcacttatgattcttagttaacattttataagctttgtattttacaggggcctctatttatccaaatttattgtttttgtccatttttctcagccttttgcaaaaaatatgcaagagtgctgaaacttggataaaacgggtcatgtatacagagaaaataatctaaaagttatctttaagagggttttagtagtgtcaactttttaaaaaagtactatgtgaccataacatacgtatattttaaagagggattaagattaaattaaaataaatggattcataaaattgctatttaaatacagtatttacttttgtaattgaagcatgattccacaaccagctgtggcattttatttcacttttctagatcagaggctttaatttgtagttaatcatgatgtggaaagtcatcttctctctactccatcaatttttttcatccgtttttgaacatgctgaagcactttgatcttgccataagtgttgtcctataccactaggtggtgttcactaatgggagggcctcagctcaccggctctccaatttgggaaaaagcaagtacctcctccctaccatcagcagaaactgaatgaaattaatctttgcaacttgaatctgttttaagtagcattaccaataagcatagtggtatctgaataaggaatgacatttacattacattttattaaataagagagaaagttaatgtgctacttgaaatgttatttggttctttgtccccctcattgcagagtatagataaggatgctcttaggtaaaatgcagccacaagttttccgagttcctttagtctgtagggtaggctatgaggtacagaatgattagaaactgaaatcctcattatttttctctcaaatacatttcacatacattgaaacagaaataggcaaaatttatgagggaaatctgatttcccaattctgatgaatagatatactaagacagtagccttgtttaaccagtgcctgtagaaggcactagaataaatagcatgtccaagagtataacaactttttttgtaaatttagttactagcctaatcaaactgtaaatataactcactaattggtaccatattttcatttttcttattgttcatctttaaggtttcattttattgcttttttgtagctctaagtaactaatcaatttaatttcaaaggaaagttaaagaaagtttaagcttttactgcatggattctgcccgcctagctaggttctgaactgacactgaagtatgacaagatacagattatagtccaaaactatcctttacagttcacaatttaagaacaaatttaactttatatacaaataataattgttatctaattatatttagttgttgctttggcaacaaaattacaacatggctacctttagacatttgtgtatgtgaacattttacttgtaaactataggtgatttgtgacagtatgagcctgtagaaaatacagctcaaaactatgaaaacagacatggttgagttcttttttaatcccaaaggcccatatataaaagctgaatttgtgtccttgtgtgactttttgtgaaaaagtttataacacatggattctagaatcaggctttatagtttatagaatttgttgtgtggatagggttattccacagtatttagacttcaaaacgcaatcattgcatttttaatacattacctaactttttttataacttaattcaaaattaccccattcaagtggcatagctgtagctgcaaaaattctgttttctggaattacatgagcaaatatagctatatgaggattaatgtatgactaaagcctcttttgaaattaattcatatttttaaaactatacataaagatactgtggaatgaccccttaacagtgtttaagaaacatatgctgcagttaattgactgtctcagttagggtgcggatgtgtgagacacaccttttttgcacttatgtacatagtccatgaaagcaatccttggagctttttttaaatgtaagaagtctgtgataatagtggaaaagttagtaagagagagttatttctaaggctttgaaaaggagggtgtttttgctctaagacttaactaaagcataatgttgctttgctgttacggaggctttctagtttgctacaggtcaccaaaagagaaggctagtaacaggtaacaggtcagcctcagctaacagcactgaacaagagtagaataacttcatcttttaacaagatcattagcaaagattgtttgctttttaaattaatcccccctataaacacacacacacgtgtgcacacacacacacacacacacacaccgggcagtttctagaacaagttttcctttttcagtggttgtaagcagtgaaatacctcatgtattacaagatagatattaccgttatgatagaataagatttcatctttcacagaaagtgatcagctgatatatgtgtcagttaaaatgtttatcaattaataggtatttaagtgacaaattgttaatgttgaccattgttcctcctttaagatccagtaaccaaaaccaaatcggtaaccattgaaagatgatatttaacagttaaggatggccagcatagggccgttcattcccttcaacaaagggaaaaaaaatgctcctggcacaactttataactggcttcatttacattatacctgttcagtggaagctgttttttgacctacctttaccagattacaaagtagttaactgtgccacttcagcctcccactgttttgttttaactaaacagaagagaaccagccaaaatcttacgtaacacaggagctggaagacaatgtttcaatctgaccatctctgccaattttagctcccacgccacctatagatagccagttaactttctttttgcccccaggcaatgaggcctagaagaggtcaaggttagaaaggttaagcatttgatcactacaggtacttgtagtacctagagaaggaacccatcctggggttggtggagttggtattgctactcgttttgatagttctcatttacagagaaagaaaaataagccaaagccagaaagcaatccaagccttacagttgtccaatacctcagggccagttggctagaattttcttttccctcagcccataatcacttagagttagccatacaacaaacagcctgacaatctgaccagcatttccattgatataaaatgtaagcattccttcattctgtagttaggaactccaacttcagccttatctccaacataatttcccaatttaacctatgtactgatatggacatttctttgtgaatatgccagattcaagaatgtatttttctaaggtcaatagagatacgacattttaagtcaggaaaaatcacctataaattagtaggaataactgtagaagcatcacaaaagataccccatgaatagatggcatggtgtgcatgctgacagccacggggtcatactctggagtttcaacatagaggctgtgtttcaataaataagacaaattggggaattaagtaaaacaaatggatgtaactgaggcccccccccaaaaaaagccctctattactaacctcaagaaaatatttagtttgactaatttgtgcagtttccagctcttctacttgttcttgcctgtaagagaatcactaatactcaaaagctggattattgaagagaaattttatctttaaatagaatccatccacaattatggtatatgtaaaaaaaatgtatgactatgaaataagtcgcagctctttgcagatattgcaaaatccttgctaggcatctacatcatattagttttttaaaaaatacctctgtaacaagacctaaaagtaacctaactattaagcagtgcttttttctctgaaaacacacaacctaaagatttatctgtcataaaactgcatggttccagagctttatttctgtgtagagatgctatttgttagtgatggaaacaaattactttgttgctatgtcttttgtgtctagcagttgagagaatgatatgaccatcatatcactggattatgggaatgaatgcccttttcaaaataaacttatttattaatattttaatattattttaatattataatattaataatattttaatattattgttgctgctttaacagaaaatgagccatttgtccccatgctcccaaattacaatgatttaaattaaaaaacttttgaaggattttcctaaatatattcttttttaaaggactaactttgtgcattcatataacaacaatttggaataatgtgaaaaatggaggcacataatttgggtggaaaatggcgattaaaaatatatataagaaaattattagccatgtgtaacatatttaaataatgaccagaatatttcatgagtaccaactcttcccatagtaattttcctccaaaatgcaatagctcattccctcaactgcagacgctttgattttttttcaagttatagtgctgtagtgcttgtttatgtttaaaagtgcacattatgcagctcattttagtatgctacttctatgtttattttttgttcttctaataaaatgcataaacttcttggttatgtctttttttatgaatccatattcacacattaggagttcacttgaaggctattcatgctctagtatattaatcctaatatttagtaattctaaaatgaaatttaaatttctgatttggctcaatgttatatttcatacatagagtaaatttatttccaaatataccatcagtattttgaattatgtagataatatatccgttgtgttagacctattactcttataagattgaagttactgacacaagaaaaacacttctattttaataaaagaatacttaaaattttgagagaatgcttactagtttctcttgtgcctcagaaatcctgaggcatattctaagatgcattattagaagtttctctttcccagttattcatgtctatcctgcatccctagtgtaacatatgaaaccagtgttgtttatttcatactttccagatgggcatcaatcatttcataacaatgagatgcatgaatttttccattaaaatgttttctctcacttaaaattggttatcttcaacaaatggcacagtaataaaaggatgatcatttttgttctttaagaaagtaaatgtaatttagtaatactttattctgccttatttcaaaatgcttcaaaaatgcgaatctggaacttctctgcattgaccactgttctggagttgggctgatagaaaactgcggtgaagagagtttagatcagaggctatggcagagcaaagtattactgatgtgtctcttaacagtgaagagggtcggggaggaggttgggtccttgtcaagtgtcagctgccctatacatagttctcttgccccttgtgccctgttttactatttctaaggtggttcccatgatggcatttcttgataagcccactttgagccgtttaatgttttgtaggtgtttctgtgagtctgataataccagcactaaaaacagttcagtatatagacatttacaagaggtcttaggcctcttcagaattcagttaatgtctttctctttgaggctgctgaatgttaggtaagaattcagggcaagcattcccgaccatcatcaaattggagacttggagtttctattggctggaagaaagttgacccacaggcaaaaccagatgtaaaccaagtttgtcttgggtacttttcaaattcttttcacagcatccttttctcatccctcatggtggcctctggccctggaaaatcctcatgatagcaacttatcaggcctgtttcctctgatagatctggacttttccccttaagtgctttcctgttgggcttctcagactatggagaactgctcatagttgagatctaagagacaaattaccctatggtgttcaagaatggccgtatttagtatactgcctgtcctggaagtgttcacatttaaaaaggcatgactttccaatgggcaaatatcagacacctacatgcatagataagggaaatatgttttacttaagcaaacttctaggcattgaatctcagtgtttaggtgcagagatggaattcctataagcaatgcagtcattcaccacatcaggaaggccaaaaaatgaacactctcgtaattttgttattatctggaaagttctgatatgataatgaacctaaaatactgaatagatagtgaacatcctaaaattccactgaccagaatccattcccatggtcatcatctgtagagggcatgatacaatgacaggcctgaggtatgattataattctggagtaatttaaagcctatatttgttaaactttaacagatggacacacattctctgattttctacttggctctttcctgtactagaaatgcgcatttaactaaaccttcccagcttttctgttcagtgcctgacttacactactcccttaggcaggaggacagtgggtgtctggggaataaaagccaagagctccaaacagaggattttggatacaaagggcagccaccaggaaatagctttgtgagagggacagactatctgattcccatttgtacaaacatgtccaaagcaaaagcacagcattctaaagtggatgcagaaattagtatacaatggcagttctggccagtgcagcccagcatttttctgttgtgcatggaaagaacacagtgaaaaggcaggcagggcatccggtgcaaagtgcaacagacatagacacacaaatccagttttcctgatgagagagggagctatctcttcataagtgatgcaatgcaatgcaggcatgtacaagtacaaggaaagatttatttttaaaaaatcatagtgtaactggatgaataccagcaacagcacctgctaaagcaaacagcctgttcattaaaaactggacttgagggaatggagaaagaatctgaggagcctgcagtcagcatgcttgcagagaccttatggctacagaagacgatgattaacccatagaggttcaatgtagttttcaagaagagggtgggaaagcataagatggggactaagactttgcctttaaccttcatgacatgaagaattgaatgactctttgttggaaaaaatggcagttatgagataattggatccatgttaattatatatatttctgtatatatagtaagtggttattgatgtgcctttgttaaccatttcactatttaataaatgtgtgtgtagtttattc

SEQ ID NO: 18784 - DNA, 946 bp, Homo sapiens
  source 1..946: mol_type = unassigned DNA
atgcacccctgctaaaggctctcccggcaccggggccacctcgcgcagcgctgcttttgcttctgccgctaacagatggcatgtgccgctgtcgctgccgctgcccctgctgctgccgctgagagcagggccccttagcctctgggtttgcgctagcagcgtaagggtcggtgtacccgagagaactgcaagtaccttcaccctcctccacacttaaaaacgcagctggagattaatgggcggaacaatctgattcaacagaagactgccgcagccatgttcgcccagcagatgcagcttatgctccaaaacgctcaaatgtcatcacttggttcttttcctatgactccatcaattccagctaatcctcccatggctttcaatccttacataccacatcctgggatgggcctcgttcctgcagaacttgtaccaaatacacctgttctgattcctggaaacccacctcttgcaatgccaggagctgttggcccaaaactgatgcgttcagataaactggaggtttgccgagaatttcagcgtggaaattgtacccgtggggagaatgattgccgctatgctcaccctactgatgcttccatgattgaagcgagtgataatactgtgacaatctgcatggattacatcaaaggtcgatgctcgcgggagaaatgcaagtactttcatcctcctgcacacttgcaagccagactcaaggcagctcatcatcagatgaaccattcagctgcctctgccatggccctgcagcctggtacactgcaactgataccaaagagatcagcactggaaaagcccaatggtgccaccccggtctttaatcccactgttttccactgccaacaggctctgactaacctgcagctcccacagccggcatttatccctgcagggccaatactgtgcatggcacccgcttcaaatattg

SEQ ID NO: 18785 - DNA, 891 bp, Homo sapiens
  source 1..891: mol_type = unassigned DNA
ggggcggcccttggccgcattcccgcccgtcccgcagcggcgcgcggagccagggtcggtgtacccgagagaactgcaagtaccttcaccctcctccacacttaaaaacgcagctggagattaatgggcggaacaatctgattcaacagaagactgccgcagccatgttcgcccagcagatgcagcttatgctccaaaacgctcaaatgtcatcacttggttcttttcctatgactccatcaattccagctaatcctcccatggctttcaatccttacataccacatcctgggatgggcctcgttcctgcagaacttgtaccaaatacacctgttctgattcctggaaacccacctcttgcaatgccaggagctgttggcccaaaactgatgcgttcagataaactggaggtttgccgagaatttcagcgtggaaattgtacccgtggggagaatgattgccgctatgctcaccctactgatgcttccatgattgaagcgagtgataatactgtgacaatctgcatggattacatcaaaggtcgatgctcgcgggagaaatgcaagtactttcatcctcctgcacacttgcaagccagactcaaggcagctcatcatcagatgaaccattcagctgcctctgccatggccctgcagcctggtacactgcaactgataccaaagagatcagcactggaaaagcccaatggtgccaccccggtctttaatcccactgttttccactgccaacaggctctgactaacctgcagctcccacagccggcatttatccctgcagggccaatactgtgcatggcacccgcttcaaatattgtgcccatgatgcacggtgctacacctaccactgtgtctgcagcaacaacacctgcca

SEQ ID NO: 18786 - DNA, 840 bp, Homo sapiens
  source 1..840: mol_type = unassigned DNA
atcaaaggtcgatgctcgcgggagaaatgcaagtactttcatcctcctgcacacttgcaagccagactcaaggcagctcatcatcagatgaaccattcagctgcctctgccatggccctgcagcctggtacactgcaactgataccaaagagatcagcactggaaaagcccaatggtgccaccccggtctttaatcccactgttttccactgccaacaggctctgactaacctgcagctcccacagccggcatttatccctgcagggccaatactgtgcatggcacccgcttcaaatattgtgcccatgatgcacggtgctacacctaccactgtgtctgcagcaacaacacctgccaccagcgttccgttcgctgcaccaactacaggcaatcagataccccaattatcaatagatgaactgaatagcagcatgtttgtttcacagatgtagaagttctcagtagaacactgaaattctgaacagcagagttatggagtatcagaatctttccatggaaacctccatatggcctttctatatatattctcgtatgtcttattctaccaacacaacaataagcgtgttgcagtcaatgtattaagcaaagcaaacctgccagccagcaaattcaaataaaaaataaagcattaaaaatcaatggagatgttaaaacaacacaaatagaaaactagtaactaccatccatcctatttgaattatcaagcagaacatgaccataaaatttggtaacttgttacattactctttgtgattttctaataaccatgctaagtgtatttccacagtgagcttttggcttactatatacattcttgg

SEQ ID NO: 18787 - DNA, 11294 bp, Homo sapiens
  source 1..11294: mol_type = unassigned DNA
ggggctgagagtgtcttctactttactctgggcaaatgaaggcctgggagagcctgggctgattccatggagagggcttctaagaatcttaagggtcggtgtacccgagagaactgcaagtaccttcaccctcctccacacttaaaaacgcagctggagattaatgggcggaacaatctgattcaacagaagactgccgcagccatgttcgcccagcagatgcagcttatgctccaaaacgctcaaatgtcatcacttggttcttttcctatgactccatcaattccagctaatcctcccatggctttcaatccttacataccacatcctgggatgggcctcgttcctgcagaacttgtaccaaatacacctgttctgattcctggaaacccacctcttgcaatgccaggagctgttggcccaaaactgatgcgttcagataaactggaggtttgccgagaatttcagcgtggaaattgtacccgtggggagaatgattgccgctatgctcaccctactgatgcttccatgattgaagcgagtgataatactgtgacaatctgcatggattacatcaaaggtcgatgctcgcgggagaaatgcaagtactttcatcctcctgcacacttgcaagccagactcaaggcagctcatcatcagatgaaccattcagctgcctctgccatggccctgcagcctggtacactgcaactgataccaaagagatcagcactggaaaagcccaatggtgccaccccggtctttaatcccactgttttccactgccaacaggctctgactaacctgcagctcccacagccggcatttatccctgcagtgcccatgatgcacggtgctacacctaccactgtgtctgcagcaacaacacctgccaccagcgttccgttcgctgcaccaactacaggcaatcagctgaaattctgaacagcagagttatggagtatcagaatctttccatggaaacctccatatggcctttctatatatattctcgtatgtcttattctaccaacacaacaataagcgtgttgcagtcaatgtattaagcaaagcaaacctgccagccagcaaattcaaataaaaaataaagcattaaaaatcaatggagatgttaaaacaacacaaatagaaaactagtaactaccatccatcctatttgaattatcaagcagaacatgaccataaaatttggtaacttgttacattactctttgtgattttctaataaccatgctaagtgtatttccacagtgagcttttggcttactatatacattcttggtggataaattgttcatctgtttttgaagtgttaccttactattttgtttacaagatagtctattgggttgattcaggatgtaacaaatatattcagtaccatttcttgtgttgtattgtgttgtgctgtgttaggtttttacatactgtagtgttttgctgtatatgtgtggtgtttgatttcaactaaagtgttattagtggggaacagaagtatatgtgcttaagaacatgacaggttcatgcaaatatgctctctttctttagaatatttctgtaggtttcttgggactgacatttaaaacgcctcacttttgaatgtgcacaaaacctgctcattaacatgcatgtgtataatttgtacctgcagatctgatgttgcataatacaatcaaattactagattttttaaagagagaaataattacctgcacaaagcagagaacttcataaaacattaacccctaattcactcttcttaaatagcttggcaaataagactttacctttaaatgaatttctcagcatttatactaaaaattatgtaaagtgctcattagattttttgtgtgtgtggcttgagaatcccatctcctaaattgagtgtctaaaactgagccatttgtcatcttcagctgagaaactggtacttgggagcttaaaaatatgctaattacaagttataaatcaaacggagagatgggggcatggagatagtttttacgtactggaggaaagtgtgtaaaaccatggcaatgtcaccttttacacaaatgccattttccaaatgcaaatggctcatgctctttagactactctttgaataacaagtaagatgcaatctagcaaaagtcagtcagggtgaaagagaattggttgcaaatgaggacttccctccccaaatggacagtcttctctgttgatcacagagggagcctgagtacaggcttggagaaatggctaggacagggaacagggaagcacttacaattattccttgatttattcaaaagaactgggaaagatggttgtagttgtctttagcttcggttcaactgagtttcgttttgttaaacagttcagtgaaggagaaagcacctgtgatatatggcaagtgtccccctgcccaaactttaacatcagaccctctcacatcataaccaagcctcttttatgcttgtttggattcgtttgcctttatatatgtttgaaaatgacaatagaaagggttttatcaccctttgaatgagacagagtggctatactccacagagctcagctgagttcacattactaatatttatgaaagaattttacaaccaaataattcctgtggtgtgtgacatatctcatccactctactcatttattaatgttattatacagtggtggaaacacatgacattttacatcaagtaatagatttaatattttctagtaaataggcgctcttccaccagaaagtataaaaccatcatatacatatatatatatatatataatggtttttctccttcatgaaaatgacaagtaaaaagcaaatctgattgaggataccttaagctggctagaagtgtttgaatcacagaacaatggaattagcaaaatcctttttatagttgatggaactgaatccaggggcatatgacttgcccaaggctaccttagccattgtgggacccagaaatatctcctgcttcccattgttcctccttttcacattgtttttgcttcagaacatttgatgctctcttccaaagcagacccatttggctcagaatataagagagcaaaattagctttctgggaattgatactctgttgatcttaattatccatccaaatcctgatcaacagtgctttctaaacagccttgcttgtattgagtcattgtcagctgttgacaatgttgcgtggaattagagatcaagagttgtcctgacctttacctatggactctttgaaccagttaatttctatttctgaaatcttaacattgctatagaagaaagtagtgtatgcctttttgaaattcatcatgtatggaactgagttttgtatgatccgtgccagtgcctctccagaagggcagatctgattacatgaatccaggagggatgcacctgagctagtctggatatattccttaaaggagacaagaacttttttgtgcaaaatgaacttttgtgtagtttgacatctgcatgcagtgaactgtctcacttaactttttcaactttgggcaaagatatacataaaccatagataatagacctacagtacagctgttttcatgttgcgttaagcactggaagacattaacaatgacttaccttaaagtaaaaggttccgtgaggggtatttagggccactgtatttttggtgccacaattttctacattgttggcattttaaaagttgttttctaaatgaacttaaagaaagaaagctcaaagccctaaagttttgatcaaattcaatagagttttcagaaaaaaatacaattttaagatagcactctttaaactagatgtgcaatgacttattcaaattatctttattcaagaaaagagaaaagaagaaagataagtcattagactataaatttccatttaaaaagacaagtcacaaaactaatcagtgactctaaacaaaaatttactggatgaattgtatatataaaattctaatcacttatgattcttagttaacattttataagctttgtattttacaggggcctctatttatccaaatttattgtttttgtccatttttctcagccttttgcaaaaaatatgcaagagtgctgaaacttggataaaacgggtcatgtatacagagaaaataatctaaaagttatctttaagagggttttagtagtgtcaactttttaaaaaagtactatgtgaccataacatacgtatattttaaagagggattaagattaaattaaaataaatggattcataaaattgctatttaaatacagtatttacttttgtaattgaagcatgattccacaaccagctgtggcattttatttcacttttctagatcagaggctttaatttgtagttaatcatgatgtggaaagtcatcttctctctactccatcaatttttttcatccgtttttgaacatgctgaagcactttgatcttgccataagtgttgtcctataccactaggtggtgttcactaatgggagggcctcagctcaccggctctccaatttgggaaaaagcaagtacctcctccctaccatcagcagaaactgaatgaaattaatctttgcaacttgaatctgttttaagtagcattaccaataagcatagtggtatctgaataaggaatgacatttacattacattttattaaataagagagaaagttaatgtgctacttgaaatgttatttggttctttgtccccctcattgcagagtatagataaggatgctcttaggtaaaatgcagccacaagttttccgagttcctttagtctgtagggtaggctatgaggtacagaatgattagaaactgaaatcctcattatttttctctcaaatacatttcacatacattgaaacagaaataggcaaaatttatgagggaaatctgatttcccaattctgatgaatagatatactaagacagtagccttgtttaaccagtgcctgtagaaggcactagaataaatagcatgtccaagagtataacaactttttttgtaaatttagttactagcctaatcaaactgtaaatataactcactaattggtaccatattttcatttttcttattgttcatctttaaggtttcattttattgcttttttgtagctctaagtaactaatcaatttaatttcaaaggaaagttaaagaaagtttaagcttttactgcatggattctgcccgcctagctaggttctgaactgacactgaagtatgacaagatacagattatagtccaaaactatcctttacagttcacaatttaagaacaaatttaactttatatacaaataataattgttatctaattatatttagttgttgctttggcaacaaaattacaacatggctacctttagacatttgtgtatgtgaacattttacttgtaaactataggtgatttgtgacagtatgagcctgtagaaaatacagctcaaaactatgaaaacagacatggttgagttcttttttaatcccaaaggcccatatataaaagctgaatttgtgtccttgtgtgactttttgtgaaaaagtttataacacatggattctagaatcaggctttatagtttatagaatttgttgtgtggatagggttattccacagtatttagacttcaaaacgcaatcattgcatttttaatacattacctaactttttttataacttaattcaaaattaccccattcaagtggcatagctgtagctgcaaaaattctgttttctggaattacatgagcaaatatagctatatgaggattaatgtatgactaaagcctcttttgaaattaattcatatttttaaaactatacataaagatactgtggaatgaccccttaacagtgtttaagaaacatatgctgcagttaattgactgtctcagttagggtgcggatgtgtgagacacaccttttttgcacttatgtacatagtccatgaaagcaatccttggagctttttttaaatgtaagaagtctgtgataatagtggaaaagttagtaagagagagttatttctaaggctttgaaaaggagggtgtttttgctctaagacttaactaaagcataatgttgctttgctgttacggaggctttctagtttgctacaggtcaccaaaagagaaggctagtaacaggtaacaggtcagcctcagctaacagcactgaacaagagtagaataacttcatcttttaacaagatcattagcaaagattgtttgctttttaaattaatcccccctataaacacacacacacgtgtgcacacacacacacacacacacacaccgggcagtttctagaacaagttttcctttttcagtggttgtaagcagtgaaatacctcatgtattacaagatagatattaccgttatgatagaataagatttcatctttcacagaaagtgatcagctgatatatgtgtcagttaaaatgtttatcaattaataggtatttaagtgacaaattgttaatgttgaccattgttcctcctttaagatccagtaaccaaaaccaaatcggtaaccattgaaagatgatatttaacagttaaggatggccagcatagggccgttcattcccttcaacaaagggaaaaaaaatgctcctggcacaactttataactggcttcatttacattatacctgttcagtggaagctgttttttgacctacctttaccagattacaaagtagttaactgtgccacttcagcctcccactgttttgttttaactaaacagaagagaaccagccaaaatcttacgtaacacaggagctggaagacaatgtttcaatctgaccatctctgccaattttagctcccacgccacctatagatagccagttaactttctttttgcccccaggcaatgaggcctagaagaggtcaaggttagaaaggttaagcatttgatcactacaggtacttgtagtacctagagaaggaacccatcctggggttggtggagttggtattgctactcgttttgatagttctcatttacagagaaagaaaaataagccaaagccagaaagcaatccaagccttacagttgtccaatacctcagggccagttggctagaattttcttttccctcagcccataatcacttagagttagccatacaacaaacagcctgacaatctgaccagcatttccattgatataaaatgtaagcattccttcattctgtagttaggaactccaacttcagccttatctccaacataatttcccaatttaacctatgtactgatatggacatttctttgtgaatatgccagattcaagaatgtatttttctaaggtcaatagagatacgacattttaagtcaggaaaaatcacctataaattagtaggaataactgtagaagcatcacaaaagataccccatgaatagatggcatggtgtgcatgctgacagccacggggtcatactctggagtttcaacatagaggctgtgtttcaataaataagacaaattggggaattaagtaaaacaaatggatgtaactgaggcccccccccaaaaaaagccctctattactaacctcaagaaaatatttagtttgactaatttgtgcagtttccagctcttctacttgttcttgcctgtaagagaatcactaatactcaaaagctggattattgaagagaaattttatctttaaatagaatccatccacaattatggtatatgtaaaaaaaatgtatgactatgaaataagtcgcagctctttgcagatattgcaaaatccttgctaggcatctacatcatattagttttttaaaaaatacctctgtaacaagacctaaaagtaacctaactattaagcagtgcttttttctctgaaaacacacaacctaaagatttatctgtcataaaactgcatggttccagagctttatttctgtgtagagatgctatttgttagtgatggaaacaaattactttgttgctatgtcttttgtgtctagcagttgagagaatgatatgaccatcatatcactggattatgggaatgaatgcccttttcaaaataaacttatttattaatattttaatattattttaatattataatattaataatattttaatattattgttgctgctttaacagaaaatgagccatttgtccccatgctcccaaattacaatgatttaaattaaaaaacttttgaaggattttcctaaatatattcttttttaaaggactaactttgtgcattcatataacaacaatttggaataatgtgaaaaatggaggcacataatttgggtggaaaatggcgattaaaaatatatataagaaaattattagccatgtgtaacatatttaaataatgaccagaatatttcatgagtaccaactcttcccatagtaattttcctccaaaatgcaatagctcattccctcaactgcagacgctttgattttttttcaagttatagtgctgtagtgcttgtttatgtttaaaagtgcacattatgcagctcattttagtatgctacttctatgtttattttttgttcttctaataaaatgcataaacttcttggttatgtctttttttatgaatccatattcacacattaggagttcacttgaaggctattcatgctctagtatattaatcctaatatttagtaattctaaaatgaaatttaaatttctgatttggctcaatgttatatttcatacatagagtaaatttatttccaaatataccatcagtattttgaattatgtagataatatatccgttgtgttagacctattactcttataagattgaagttactgacacaagaaaaacacttctattttaataaaagaatacttaaaattttgagagaatgcttactagtttctcttgtgcctcagaaatcctgaggcatattctaagatgcattattagaagtttctctttcccagttattcatgtctatcctgcatccctagtgtaacatatgaaaccagtgttgtttatttcatactttccagatgggcatcaatcatttcataacaatgagatgcatgaatttttccattaaaatgttttctctcacttaaaattggttatcttcaacaaatggcacagtaataaaaggatgatcatttttgttctttaagaaagtaaatgtaatttagtaatactttattctgccttatttcaaaatgcttcaaaaatgcgaatctggaacttctctgcattgaccactgttctggagttgggctgatagaaaactgcggtgaagagagtttagatcagaggctatggcagagcaaagtattactgatgtgtctcttaacagtgaagagggtcggggaggaggttgggtccttgtcaagtgtcagctgccctatacatagttctcttgccccttgtgccctgttttactatttctaaggtggttcccatgatggcatttcttgataagcccactttgagccgtttaatgttttgtaggtgtttctgtgagtctgataataccagcactaaaaacagttcagtatatagacatttacaagaggtcttaggcctcttcagaattcagttaatgtctttctctttgaggctgctgaatgttaggtaagaattcagggcaagcattcccgaccatcatcaaattggagacttggagtttctattggctggaagaaagttgacccacaggcaaaaccagatgtaaaccaagtttgtcttgggtacttttcaaattcttttcacagcatccttttctcatccctcatggtggcctctggccctggaaaatcctcatgatagcaacttatcaggcctgtttcctctgatagatctggacttttccccttaagtgctttcctgttgggcttctcagactatggagaactgctcatagttgagatctaagagacaaattaccctatggtgttcaagaatggccgtatttagtatactgcctgtcctggaagtgttcacatttaaaaaggcatgactttccaatgggcaaatatcagacacctacatgcatagataagggaaatatgttttacttaagcaaacttctaggcattgaatctcagtgtttaggtgcagagatggaattcctataagcaatgcagtcattcaccacatcaggaaggccaaaaaatgaacactctcgtaattttgttattatctggaaagttctgatatgataatgaacctaaaatactgaatagatagtgaacatcctaaaattccactgaccagaatccattcccatggtcatcatctgtagagggcatgatacaatgacaggcctgaggtatgattataattctggagtaatttaaagcctatatttgttaaactttaacagatggacacacattctctgattttctacttggctctttcctgtactagaaatgcgcatttaactaaaccttcccagcttttctgttcagtgcctgacttacactactcccttaggcaggaggacagtgggtgtctggggaataaaagccaagagctccaaacagaggattttggatacaaagggcagccaccaggaaatagctttgtgagagggacagactatctgattcccatttgtacaaacatgtccaaagcaaaagcacagcattctaaagtggatgcagaaattagtatacaatggcagttctggccagtgcagcccagcatttttctgttgtgcatggaaagaacacagtgaaaaggcaggcagggcatccggtgcaaagtgcaacagacatagacacacaaatccagttttcctgatgagagagggagctatctcttcataagtgatgcaatgcaatgcaggcatgtacaagtacaaggaaagatttatttttaaaaaatcatagtgtaactggatgaataccagcaacagcacctgctaaagcaaacagcctgttcattaaaaactggacttgagggaatggagaaagaatctgaggagcctgcagtcagcatgcttgcagagaccttatggctacagaagacgatgattaacccatagaggttcaatgtagttttcaagaagagggtgggaaagcataagatggggactaagactttgcctttaaccttcatgacatgaagaattgaatgactctttgttggaaaaaatggcagttatgagataattggatccatgttaattatatatatttctgtatatatagtaagtggttattgatgtgcctttgttaaccatttcactatttaataaatgtgtgtgtagtttattc

SEQ ID NO: 18788 - DNA, 1815 bp, Homo sapiens
  source 1..1815: mol_type = unassigned DNA
acaacttggaatgtcctgcaatatctaacatgtaagcacgtcgaatcattttctagacagaatctgaacctctgtgtctctcagtctttctctctttctcattctctttcaatatggaacttgaaaagcgtgaaaaaagaagcttattaaacaagaatttagaggagaaactgacggtctctgctggtggttctgaagccaaacctctgatcttcacatttgtccccactgtcagaagactaccaacccatactcagttggctgacacctctaaattccttgttaaaattccagaagaatcaagtgataagagtccagaaactgtaaataggtctaaatccaatgactacttgaccttgaatgctgggagccaacaagagagagaccaagcgaaattgacttgtccttcagaggtcagtggaacgattttacaagaaagggaattcgaagcaaacaaacttcaagggatgcagcaaagtgacctcttcaaagctgaatatgtccttattgtggactccgaaggggaagatgaggctgcaagcagaaaagttgaacaaggccccccaggggggattggcaccgcagctgtccggcccaagtctctagctatctcgtccagtctggtctctgatgtagtgcgtcccaaaacacaggggactgatctcaagacctcatcacatcctgaaatgcttcatgggatggcccctcagcaaaagcatgggcagcaatacaagaccaagtcaagctacaaggcttttgcagcaatccctacaaacacattgcttttggaacagaaggcactagatgaaccagccaagactgaaagtgtctccaaggacaacacattagaaccaccagtggagctctattttcctgcacagctcaggcagcaaactgaagagctctgtgctaccattgataaggtcttacaggattccttgtctatgcattcttctgattctccttcaaggtccccaaagacattgttgggttctgacacagtcaaaactcctacaactcttccaagagcagctggtcgagaaaccaaatatgcaaatctctcctcaccatcttctacagtatctgagagtcagctgactaagcctggagtaattcgcccagtacctgtaaaatccagaatattactgaaaaaagaggaggaagtctatgaacccaaccctttcagtaaatacttggaagataacagcgacctcttttctgaacaggatgtaacagtccctcccaagcctgtctcgctccatcctttatatcagactaaactctatcctcctgctaagtcactgctgcatccacagaccctctcacatgctgactgtcttgccccaggacccttcagtcatctgtccttctccttgagtgatgaacaggagaattctcacaccctcctcagtcacaacgcatgcaacaagctgagtcatccaatggtggctattcctgaacatgaagctcttgattccaaagagcaatgaagttggagcagaggctgaaaacacaggctgctgaagttttttggaatgctggtgctaaccacttgctagatttaacttttttttttttttccagaatgagtgctccctttatgagctgcagtgcagcagaaccaaaaaaaaagtttgctgcaattatatagcatcacagtgctctgctaacagccagcatagaagagatttacctacagctttttgcaccactgttctagcctttaatgccttctacttaatattaagctgaccgcaatactaacgtgcccctatatttggcagccaaataaagaagaatcgtgggtaaatagaa

SEQ ID NO: 18789 - DNA, 1044 bp, Homo sapiens
  source 1..1044: mol_type = unassigned DNA
ttggtttgctcgctcccttatgtgatgaatcaatgctttcagaacaggggcttctgagtgactgcgggaacaattacttccaaatgacctcgtgcatcttatcagggagcattcagaccacaccccaggtctctgctggtggttctgaagccaaacctctgatcttcacatttgtccccactgtcagaagactaccaacccatactcagttggctgacacctctaaattccttgttaaaattccagaagaatcaagtgataagagtccagaaactgtaaataggtctaaatccaatgactacttgaccttgaatgctgggagccaacaagagagagaccaagcgaaattgacttgtccttcagaggtcagtggaacgattttacaagaaagggaattcgaagcaaacaaacttcaagggatgcagcaaagtgacctcttcaaagctgaatatgtccttattgtggactccgaaggggaagatgaggctgcaagcagaaaagttgaacaaggccccccaggggggattggcaccgcagctgtccggcccaagtctctagctatctcgtccagtctggtctctgatgtagtgcgtcccaaaacacaggggactgatctcaagacctcatcacatcctgaaatgcttcatgggatggcccctcagcaaaagcatgggcagactcctacaactcttccaagagcagctggtcgagaaaccaaatatgcaaatctctcctcaccatcttctacagtatctgagagtcagctgactaagcctggagtaattcgcccagtacctgtaaaatccagaatattactgaaaaaagaggaggaagtctatgaacccaaccctttcagtaaatacttggaagataacagcgacctcttttctgaacagctgagtcatccaatggtggctattcctgaacatgaagctcttgattccaaagagcaatgaagttggagcagaggctgaaaacacaggctgctgaagttttttggaatgctggtgctaaccacttgctagatttaactttttttttttt

SEQ ID NO: 18790 - DNA, 1076 bp, Homo sapiens
  source 1..1076: mol_type = unassigned DNA
actgctttcttgacatctgctagtttgacacgtggcaccggattccatgtgcagctggtaccttggatttgaatgttcttctaaatccaatgactacttgaccttgaatgctgggagccaacaagagagagaccaagcgaaattgacttgtccttcagaggtcagtggaacgattttacaagaaagggaattcgaagcaaacaaacttcaagggatgcagcaaagtgacctcttcaaagctgaatatgtccttattgtggactccgaaggggaagatgaggctgcaagcagaaaagttgaacaaggccccccaggggggattggcaccgcagctgtccggcccaagtctctagctatctcgtccagtctggtctctgatgtagtgcgtcccaaaacacaggggactgatctcaagacctcatcacatcctgaaatgcttcatgggatggcccctcagcaaaagcatgggcagactcctacaactcttccaagagcagctggtcgagaaaccaaatatgcaaatctctcctcaccatcttctacagtatctgagagtcagctgactaagcctggagtaattcgcccagtacctgtaaaatccagaatattactgaaaaaagaggaggaagtctatgaacccaaccctttcagtaaatacttggaagataacagcgacctcttttctgaacagctgagtcatccaatggtggctattcctgaacatgaagctcttgattccaaagagcaatgaagttggagcagaggctgaaaacacaggctgctgaagttttttggaatgctggtgctaaccacttgctagatttaacttttttttttttttccagaatgagtgctccctttatgagctgcagtgcagcagaaccaaaaaaaaagtttgctgcaattatatagcatcacagtgctctgctaacagccagcatagaagagatttacctacagctttttgcaccactgttctagcctttaatgccttctacttaatattaagctgaccgcaatactaacgtgcccctatatttggcagccaaataaagaagaatcgtgggtaaatagaa

SEQ ID NO: 18791 - DNA, 1386 bp, Homo sapiens
  source 1..1386: mol_type = unassigned DNA
ttggtttgctcgctcccttatgtgatgaatcaatgctttcagaacaggggcttctgagtgactgcgggaacaattacttccaaatgacctcgtgcatcttatcagggagcattcagaccacaccccaggtctctgctggtggttctgaagccaaacctctgatcttcacatttgtccccactgtcagaagactaccaacccatactcagttggctgacacctctaaattccttgttaaaattccagaagaatcaagtgataagagtccagaaactgtaaataggtctaaatccaatgactacttgaccttgaatgctgggagccaacaagagagagaccaagcgaaattgacttgtccttcagaggtcagtggaacgattttacaagaaagggaattcgaagcaaacaaacttcaagggatgcagcaaagtgacctcttcaaagctgaatatgtccttattgtggactccgaaggggaagatgaggctgcaagcagaaaagttgaacaaggccccccaggggggattggcaccgcagctgtccggcccaagtctctagctatctcgtccagtctggtctctgatgtagtgcgtcccaaaacacaggggactgatctcaagacctcatcacatcctgaaatgcttcatgggatggcccctcagcaaaagcatgggcagcaatacaagaccaagtcaagctacaaggcttttgcagcaatccctacaaacacattgcttttggaacagaaggcactagatgaaccagccaagactgaaagtgtctccaaggacaacacattagaaccaccagtggagactcctacaactcttccaagagcagctggtcgagaaaccaaatatgcaaatctctcctcaccatcttctacagtatctgagagtcagctgactaagcctggagtaattcgcccagtacctgtaaaatccagaatattactgaaaaaagaggaggaagtctatgaacccaaccctttcagtaaatacttggaagataacagcgacctcttttctgaacaggatgtaacagtccctcccaagcctgtctcgctccatcctttatatcagactaaactctatcctcctgctaagtcactgctgcatccacagaccctctcacatgctgactgtcttgccccaggacccttcagtcatctgtccttctccttgagtgatgaacaggagaattctcacaccctcctcagtcacaacgcatgcaacaagctgagtcatccaatggtggctattcctgaacatgaagctcttgattccaaagagcaatgaagttggagcagaggctgaaaacacaggctgctgaagttttttggaatgctggtgctaaccacttgctagatttaactttttttttttt

SEQ ID NO: 18792 - DNA, 11156 bp, Homo sapiens
  source 1..11156: mol_type = unassigned DNA
gctgccagcggtcggtggcggccgctacggtgctgacaagatggcggctggcggagctgtcgctgcggcgcccgagtgccggcttctcccctacgcgctacacaagtggagctccttttcctccacctaccttcccgagaacattttagtggacaaaccaaatgaccaatcttcaagatggtcttcagagagcaactatcctccccagtacttgattctaaagctcgaaaggcctgctatagttcagaatatcacatttggaaaatatgagaaaactcatgtttgcaatttgaagaaatttaaagtctttggtggaatgaatgaagaaaatatgacagagctgttgtccagtggcttaaagaatgattataacaaagaaacattcaccttgaagcataaaattgatgaacagatgttcccttgtcgattcattaaaatagttccactcttgtcctggggacccagctttaactttagcatctggtatgttgaacttagtggcattgatgatcctgatatagtacaaccttgtctcaactggtatagcaagtaccgtgaacaggaagctattcgcctttgcctaaaacacttcagacaacacaactatacagaagcttttgagtcactgcaaaagaaaaccaagattgcactggaacatcccatgttaacagatattcatgacaagctggtgttgaagggtgattttgatgcttgcgaagagttgattgaaaaggctgtaaatgatggcttgttcaatcagtatatcagtcaacaggaatataagccacgatggagtcaaatcattcccaaaagtaccaaaggtgatggggaagataaccgtccaggaatgagaggaggccatcagatggttattgatgttcaaacagagactgtttatttgtttggtggctgggatggaacacaagatcttgctgacttctgggcgtacagtgtgaaggagaaccagtggacatgtatctctagagacactgaaaaagagaatggtcctagtgccagatcgtgtcataaaatgtgcattgatattcaacggaggcaaatctacacattggggcgttacttggattcctctgtgaggaacagcaaatctctgaaaagtgacttctatcgttatgacattgatacaaacacatggatgttactaagtgaggatactgctgctgatggagggccgaaattggtgtttgatcatcagatgtgtatggactcagaaaaacatatgatctacacttttggtggtagaattttgacttgtaatggcagcgtagatgacagcagagccagtgaaccacaattcagtggcttgtttgctttcaactgtcaatgtcaaacctggaaacttcttcgagaggactcctgtaatgctgggcctgaggacatccagtctcgaataggacactgcatgttattccactcaaaaaatcgttgcttatatgtatttggtggccagcgatcaaagacctatttgaatgatttctttagttatgatgtggactctgatcatgtagacataatatcagatggcaccaagaaagactctgggatggttccaatgacaggatttacacagagagcaactattgatccagaactgaatgaaatacacgtcttatctggactcagcaaagataaggaaaagagggaagaaaatgttagaaattcattctggatttatgacattgtgaggaatagttggtcttgtgtctataagaatgatcaagctgcaaaggataatccaactaaaagtcttcaggaagaagaaccatgtccaaggtttgcccatcagcttgtatacgatgagctacacaaggttcattacttatttggtgggaatccaggaaaatcttgctctccaaagatgagattagatgacttctggtcactgaagttgtgtagaccttcaaaagattatttactgaggcattgcaagtacctcataagaaaacacaggtttgaagaaaaggcccaagtggatccccttagtgctctgaaatatttacaaaatgatctttatataactgtggatcattcagacccagaagagacaaaagagtttcagctcctggcatcagctctattcaaatctggttcagattttacagctctgggcttttctgatgtggatcacacctatgctcaaagaactcagctctttgacaccttagtaaatttctttcctgacagcatgactcctcctaaaggcaacctggtagacctcatcacactgtaactgaagagtcactggacacagaaatggaaaacaggagtcgattttccgtcttttggattgcagctccactgactgacagtaaagctgcagtgattgaggactgcaccagagttctgaagggatcttaaccatcacaagtttttaccctcttccttcatgcctgacctcaaccccgctctcctcatcctattcctaaattaggctaataaagtgaaattggtatactttccagttaaatatatatatatatatattttttcttactttatcttttaagaattaatgagtataaaagaaaaattaggcagtttacccttttcagatttttatttcttttttttttaattgggggaaataagcactattaacagattcagcactacaagtattttgaatgttgttgctgttggtcatttggcctgccttttcccttcctatttcactttgcctcccatcacacaactgcgtgtaaatggtgtcacttgttcacctctttacttcattcttaacaagtgtatagttctctaggacagttgatgtatgttaaggtgatatctgtgtctgtattgacttgtcttgtgttacattaaacagtaggcagaactgaggtctcaagtttgcactcttggccatagaactaaaaatgaaacctgagattgacccaagcacctatctgagattggtatataatatttctataatgatatattttatagtagatattacaatagcatctgactttgagtcacagaaaccttaaactgaggagacaatagttcagaacctttttaagagccattctaaaagtgaccagcaggagggatctagtagtgaataatatcttaatagcaattttaggagaaaatgactctttcgtccagaagagctctgcagaaccagggctcccgtttatcttgtgctatctctgtagtattttcatttgagagaggaggctgagtttccagagctttgctttcatttatttttatacacattgtctctctatatctgcttgtggatattgttattttgaagagaaatggtttgtggttgtccagtggtatacaactgacaggcatttcattaagcacatagaccagactttgtgaatggttcagatattttttcattaaaaaacaaggtatggcagatggacttttccatgggtcaaattttttgtgtgagagatagaggtacatgtcttctgatgatgtgctgtggaatgcaatgtgggaaacctacatctggctagtgcttacatttgctcaaaaagcatgttgtatgaagctgactgccaccatgctaaagcagattcatattaagaagtgtcggtcgatccagtggctcttaagagtgaatagctttatggaatcaagtatgtccctgagtagcaagattaggcctcaccaaagaagaaattaacctgcactttcaaaaagtaccatgtataggaatgaaacattgaggtcccactttattctgtctttagtacatggttttacttattttggggatggatagaaatatatttttgctagttctaggcttgaatcatgggctccttggctttcctagcatcccaaagcagtcaacagtgatttcttaagcaatttgatctgtacctttacttgtgaaaggtatgctatataattcagcaagtaccaacttgtgtagctgcagaataaccaagtggctatccagtcaagtaaatacagtttgcttacatacttcaacagtttcataaaacgattcccctgagtgacacaagaacataaaatgttaatatcactaatatagcctgttaaatcttttgtggagacaggtgcaaatcagaagattgacaaggaagaacttgagcttgctaaataagacttcctaaatttaaaagctctagttttgcttagtgtgaattctggcactttaaaaagattaagcaagtgaaattctgctgccctccaccatttatttttacagtgctttgtaatttttttcatcagttccttaaatgttatttggaggaaactaagttcttgacctcagtaattttatttttgtttttccctaaatgtttccctactagtctttttggaaaacatgtttgttttaatttcatcttccctcactttatttaggtagaatttttcccccttcatttctgaaattttttgctcaccgccatgtttaaatggggttgaatcatagcgagccatttgctcttgccaaagtgagatagatgtactgaggagataattgaaaagtcagactctgtactgtggggctttaatcggagcactgctggaaatgattgcagagaatgtagtgcttcatatatccatgaccaagattgacatgttgctcacaacatgtcacaatttagtgaggagctacatgtatttccaagaattccagcatagattataatttaaataatcgaatttggtatttaggtacattgtttatatagccaagtgtatatgctttactacctaacaattattctagcctaggtgaatccctaattgaaacacctggctaacactttagacacataaattaagtgggatacagttttctcatttgtattatctccagcttcaacctcatttatcctttttcctagtataatacattgttttcaaccagaaattaaagtagatatccaacattattttcagtgcttgtacttcatgagaaataatctgattttcaagacacctcttaagtgcatttgcattttattttggtaatggcagagacctcatgtggccagtttgattgattgaagaatgtatcactcttattcaagcaaaggaattcagacttaaatgcctacctctgtgctgaagctgacagacagtattaactcttatcaaggccatcttttagacctgattttcatttatatgaaaacagacctgtccatgtctaataagtaaaaactgatagaatacattaaaaagtcactggtttatcatagaaaagtttgatgggtttagagctcagtgatttaagcttgtaaaactgcattcttgggcaaaatatttatattgtatataaatggttggcagcttattccagttgatctcttcacatctgccttaaaagtgctatgtagagatacattaacagagttataataaaacagtgttttaaaatctagcctataaacaaaaactagtttgaggcacccaagcatttagtgagagattgagaatgatgcttaatggatcaaaaaagcaattaggagtatgttcctgattttattctctaaattatactcaatttcatggtaattacatgaagaagttacctgcaattattcttaacactacatggaattcactgggtaattgtgggtcatttatttcctgaaagtcacgtgaaatccttagctggttgaatgttgcacagtatttgagaattacggtttgaagtgatttctgtgggagggaatcattgcaatgtatattctaaataaagtcatctaactattaaaaaaaaaacacccttcctaacccttcttttcttaaaattccacattcatccacaatctcatccctttgtagaaattcttgcctgaattctcaccaagttttgaattcctaaggtagccccgatctaggatgtgaaggctgcccagaaaaagtttatggctggaggagtatcatacagtgtctacatatgatagtacttacagattaggtctttggatgctttaacacaaaagatttttgttatccttattagtcaaataacgctattcttttgtggttctagaccctggcttctatctccctgtgatttgttttaatgctgaaatgacttggctatccaaagcttctagtctagaggtctgttggttgaaggcagacatttccaagtttgttgaaataatacgaagctgactagcttacgtgaatgatgttgccctcatttgttttgggtgaggactcattactgcagtatattgatctcttcaccaaatgctttttctttttctgaataaatgctgtattagaggttctatttatatatgatttttaaaactttggtttccttctatccaccaaatactgtgaattgtttttccatttatttttcttagctaatgtaactttattcttcacttttttttagccctagacttcctagattttctgtggcattctgtaggacattgtattgcttggaaaaaaaaagatcaaaatcattctggggcaaatgctctattatccttatttatgacaagagaataatgaaattcataagaaattaataacattcagatattgctataaatgtacttgagtcattttcatttggggatagtaataatggctgtggcagctttaatggagaaacctgtgttggcctctttttctggcattaggatctcttgtcatagaactattggtaaagtacaggtttgatagcagagttcctgaattcagcatatcatcagaatttccatttaccttttgtcttttctttttattgtattttttaacctttttgtttctattcctacctcccatgagtaacattgatttctgctgaagttagaatttgtgttaagaattgactttaaacttctgaaatagttgaatattagaagtggcttcagttgccatgaaatgattgcttttctttttctttttttttccttaaataaaaataatgcagccttatatatgtctcttcccctcaagaatgtgaatttaggctgggcatagtgactcacgcctgtaatcccagacctttgggaggctgacacgggaagattgcttgagcccaggaatttcagaccagcctgggcaacacaggaagactccatctctacttaaaatatttttgttttttagccaggtgtggtggtatgtgcctgtagtcccagctacttgggaggctgaggtgggaggatcacttgaacccaggagtttggggtgcagtgagctatgattgcgacactgcactccagcctgggcaacagagcaagaccctgtctcaaaaaaaaaaaaaaaaaaagaatgtgaatttagctccaattccaaatgactaactcttaggccagtcatagccaatgaaatcatctgacggtagcttctgtagcccttaacctaaggagtcattagaggttatagtaaattagtttctctagtggtgcagagagaaatgccatcggggaaattatcactgtctttttggctaaagttttatattgtgaactggatcccacttaacagcttaaaaacacaaaaatgaaagggtagtcctagtttatcttcttaattagaatcattatttggaaataagatttgcaatgtgctgtctatccccaaacactgctgagcttgctggaaaacagaatttaacatgaatgttgtctgaaagctgtaggatcaatggcaaaaaaggggaaatgtttggtagggaattggaccagttctaaggtatcacttttaattataaaataatgtcttcctttttatctgcttttcagacagcctcagtgaactattaaacatttgtgtgcaaagtcctattttgcttatctaaggcattttgacttggaagtattaaacttcaggaacgagctagagaagacaatgagggtatgttagagaaggaaaaataggagctttttgcttatggattttagaggtccacaaatcgaaaggaaaaataaatttcttcatttctaaccctaaaataattttgttaatgagatgctgggaagaagactaccaaaaggcctcaaagctcatgcttctagaatattcagtaattctgaatagtctttgggaagtagcatttcttgggaagtagcatttcccttcttccaaataactgtttgagatcttaaaacagaaaatccagtgttaatgggctctagatcttaaactaggtgagcagcttcttacatacaaccagttccttgttaaggatccagcaggaaaaccagccataaaacatttcaacatgcagtttgggggctcccttgcttattcactgagtttaagctcttgctgcaacatagctctgtaccatctgggatgctagcagtcacagcagttagctcagatatctgagctgtctgccacacaaagcctgaggagatcatcattcttcagtttcattcattacttaatgaatgccaaattaattggcaggaagaagaaacactgtgtgatatactgaacaagcctgtgtgcatgaataaggagccactcaaaaagccaattttgagctttatttctccgttgttaacaaatctcaagaaagcctttgttacagtttagctcatgtcatttggttggttttattttctagccctttaacataggaggaaaattgtcatttcatgtataacttgtaacacagaattgaactgatactagtttccttgccttaaattaattatatgtcatcccaagggtctctgttaattctgctttgccaagcaataatgagatctgggtttggcattagaagtatttcataattttggttttttatttaggtttcctccacatctgtaaagtgattgattaaattagaggaggcgtgtagaataaatcccaatcccattgcaactggcagagctttataaatctttataaattcagttacaacaaaggagaggatcctacaccattagagccatgccatcaggtgtttgcaagtgacagctgtagtgtgttgcctcaaataataccaagttataaataataccaagtaattatcaactcactcccaaatttaataagatatcaaagtccaaaaggttacttaggagtagtcttccgtgggggaagataaatttattaaagagtcatgtactgatctttttcttgggattttttttcctttcccagaaaaaaaaattattttggtgactgatcaattgtaaacaattttcttccttacttacaaatcatccgttcagaaaaataaaagtggacttcctttcctaagcattacaattagcctgggcaagaggtgttatgattgtcttattctttaagccggcttactttttggatttgtgtgaaatgtcttttgaaaagaaagtagatagtatagtattaattaactactttgtatagtcttctgcataatttagagttgaaaataatgtaacattttcctgtgaacagattcctttatgcgtacatactttataaatatacatacatacacatacacatacatttttaaaatgctctttttaaagagattcttatcttgctcccactccaaaagctatgtacagttgagttattagcctcagaggaagagtacaggaaagcgaagatgaggacctccttttcttgtgttggtcttgggaacaaacagtattccgtctttcaaatatggcatatttctaaacagtttgggaaagatgttagaattttttaaaagtcagctcttttataaattggaagtactcagtagtcagaaattaagatcccctctgatagagatagattctcaaaaccaaaattggactgaaaattagattgagaagaaagatacaacttcctccatagccaataaaatctgtctttccaagtctgcttattaatgctgtgaatcgctccttctgtttgtgaaaacatctcctggactggaaatgtggtgctgtaaccagctgagccgaaagttggagaatgttaaatatcttatatgggacttacgataaaatgtattgatgttagtgattgtcaaaataggtttatcatttaaaaaactaggaaattactaagtataaagaagaaaaaccagtattaattaagtgatgagacctgttcattttgttttccctgacttatttccattaccaaacatagtaaaggccagaaaagattaaaaaaaaaattaacacagccattccattgttttttaccacatggagaaaggaccaggctggaagcatatgtccccccacccttatttatattcctttgagcattgccgttttctagacagacaatccgaaaataattgtgttgataggtctgtttaagcctgaactctgggtgtaaaatgttatccagaagctatagggagctgccttgctcaggtcattggaaatttcaaccctaagactcattggaatttctaagtccgttatgcaccattatgggcatatggagcatattcataccatgaggaggagtctttgtttatgatggactttttaatatggccataattaaactcacactcaaaaaggatgagctattgtcaaaagccaaaagaaaaacagacaaaatgaacatgaagcaaggagtccataaaacaagagttctttaccacgtttaagcaaatgtctctcaaaaaaaattgtatttctgtgcacattagctgagattcacacattttgcacctcagtagtatttcagatgagactcaatgtgtggagaaaaccgctaacttgtttggttctactcttaccccctcttctgtggcaatgtggggtcagggccgtatcctaaagtatccacatggtcttaaatggaaatcatgggactctggaaagctggcatgagctggttggagcttttaaacagaagtgctttatgggtatcagatctcttctgacatcaattgtttcaaatcattgttgggctctgtcgtgttctgcaatcttccccattcccctcatgatctctggcttatcttttatccaatctgtatggactttttaggattttttttttcttatagtacaaataattttcagatcccagctttggtaaatgtgttaattctactttgtgaataaataaatgagtgatctgctaaaaatggcaattgtagaattatgttgtatgtaatgtacatatggagaaagaatgtattttgttcattttcttaataaaatgttatatatggatgctacaag

SEQ ID NO: 18793 - DNA, 2408 bp, Homo sapiens
  source 1..2408: mol_type = unassigned DNA
ggccgctacggtgctgacaagatggcggctggcggagctgtcgctgcggcgcccgagtgccggcttctcccctacgcgctacacaagtggagctccttttcctccacctaccttcccgagaacattttagtggacaaaccaaatgaccaatcttcaagatggtcttcagagagcaactatcctccccagtacttgattctaaagctcgaaaggcctgctatagttcagaatatcacatttggaaaatatgagaaaactcatgtttgcaatttgaagaaatttaaagtctttggtggaatgaatgaagaaaatatgacagagctgttgtccagtggcttaaagaatgattataacaaagaaacattcaccttgaagcataaaattgatgaacagatgttcccttgtcgattcattaaaatagttccactcttgtcctggggacccagctttaactttagcatctggtatgttgaacttagtggcattgatgatcctgatatagtacaaccttgtctcaactggtatagcaagtaccgtgaacaggaagctattcgcctttgcctaaaacacttcagacaacacaactatacagaagcttttgagtcactgcaaaagaaaaccaagattgcactggaacatcccatgttaacagatattcatgacaagctggtgttgaagggtgattttgatgcttgcgaagagttgattgaaaaggctgtaaatgatggcttgttcaatcagtatatcagtcaacaggaatataagccacgatggagtcaaatcattcccaaaagtaccaaaggtgatggggaagataaccgtccaggaatgagaggaggccatcagatggttattgatgttcaaacagagactgtttatttgtttggtggctgggatggaacacaagatcttgctgacttctgggcgtacagtgtgaaggagaaccagtggacatgtatctctagagacactgaaaaagagaatggtcctagtgccagatcgtgtcataaaatgtgcattgatattcaacggaggcaaatctacacattggggcgttacttggattcctctgtgaggaacagcaaatctctgaaaagtgacttctatcgttatgacattgatacaaacacatggatgttactaagtgaggatactgctgctgatggagggccgaaattggtgtttgatcatcagatgtgtatggactcagaaaaacatatgatctacacttttggtggtagaattttgacttgtaatggcagcgtagatgacagcagagccagtgaaccacaattcagtggcttgtttgctttcaactgtcaatgtcaaacctggaaacttcttcgagaggactcctgtaatgctgggcctgaggacatccagtctcgaataggacactgcatgttattccactcaaaaaatcgttgcttatatgtatttggtggccagcgatcaaagacctatttgaatgatttctttagttatgatgtggactctgatcatgtagacataatatcagatggcaccaagaaagactctgggatggttccaatgacaggatttacacagagagcaactattgatccagaactgaatgaaatacacgtcttatctggactcagcaaagataaggaaaagagggaagaaaatgttagaaattcattctggatttatgacattgtgaggaatagttggtcttgtgtctataagaatgatcaagctgcaaaggataatccaactaaaagtcttcaggaagaagaaccatgtccaaggtttgcccatcagcttgtatacgatgagctacacaaggttcattacttatttggtgggaatccaggaaaatcttgctctccaaagatgagattagatgacttctggtcactgaagttgtgtagaccttcaaaagattatttactgaggcattgcaagtacctcataagaaaacacaggtttgaagaaaaggcccaagtggatccccttagtgctctgaaatatttacaaaatgatctttatataactgtggatcattcagacccagaagagacaaaagaggcttttctgatgtggatcacacctatgctcaaagaactcagctctttgacaccttagtaaatttctttcctgacagcatgactcctcctaaaggcaacctggtagacctcatcacactgtaactgaagagtcactggacacagaaatggaaaacaggagtcgattttccgtcttttggattgcagctccactgactgacagtaaagctgcagtgattgaggactgcaccagagttctgaagggatcttaaccatcacaagtttttaccctcttccttcatgcctgacctcaaccccgctctcctcatcctattcctaaattaggctaataaagtgaaattggtatactttccagtt

SEQ ID NO: 18794 - DNA, 3476 bp, Homo sapiens
  source 1..3476: mol_type = unassigned DNA
atgactccgggcggtcggagaaggtctgccgggagtacacctgccctctgcctgaagcgtccccaagtgtcccgggcccgcgtcgttgccggatgcacaatgctgacacccttcccgggggcttccagtgtattctgcctcctcttgtgttcccgttgccacccttagctccctgactcttccagccaccttcccctcctccctcttccctgaggtgcctcctcgggcgattccagagcgcccatcttcccagtccgggcaaaacccggagaggtggaatccctcgcccggagcgccccggcggccactgggcatgctccgttgtcaggcaagttcggggctgcaggcagcttgcgcgccgcgcggattccagctgcggtcgcgcgtactcctcctcccaagtagggagcgggcgcatgatggcggccgcggcggcagcggctgcggggagctccagcagcggcggcggcggcggcggcagcggcagcagcagcagcagcagcgacacgtccagcaccggcgaggaggagaggatgcggcgcctcttccagacgtgcgacggcgacggggacggatacatcagcagaaatgacttgctaatggtctgtcgccagctgaatatggaagagtctgtggctgagatcatgaaccagttgggagcagatgaaaatgggaagatttcctttcaggatttcacaagatgccgcatgcagcttgttcgagaaattaggaaggaggaagtagatctttctgcaaagtcagacaactcctgtacaaagaagctgagggatagaattgcttcctggcccacgagcagtgacaacagtttgggtgccttatcagcagccagggagagctgggaatacgactctggtgccagggacctccagagcccggatgtgcagagccagtcagccctccagaagctgctcgagtatggcggaagctctttgcatcagcaggctgctctccacaaactgctcacacagtccccgcacattggcaactctgtaggaggaagctatctagagctggccaacacactccattcagcagccctggcatcactaaagggagatatagtggaacttaataaacgtctccagcaaacagagagggaacgggaccttctggaaaagaaattggccaaggcacagtgcgagcagtcccacctcatgagagagcatgaggatgtccaggagcgaacgacacttcgctatgaggaacgcatcacagagctccacagcgtcattgcggagctcaacaagaagatagaccgtctgcaaggcaccaccatcagggaggaagatgagtactcagaactgcgatcagaactcagccagagccaacacgaggtcaacgaggactctcgaagcatggaccaagaccagacctctgtctctatccccgaaaaccagtctaccatggttactgctgacatggacaactgcagtgacctgaactcagaactgcagagggtgctgacagggctggagaatgttgtctgcggcaggaagaagagcagctgcagcctctccgtggccgaggtggacaagcacattgagcagctcaccacagccagcgagcactgtgacctggctattaagacagtcgaggagattgagggggtgcttggccgggacctgtatcccaacctggctgaagagaggtctcggtgggagaaggagctggctgggctgagggaagagaatgagagcctgactgccatgctgtgcagcaaagaggaagaactgaaccggactaaggccaccatgaatgccatccgggaagagcgggaccggctccggaggagggtcagagagcttcaaactcgactacagagcgtgcaggccacaggtccctccagccctggccgcctcacttccaccaaccgcccgattaaccccagcactggggagctgagcacaagcagcagcagcaatgacattcccatcgccaagattgctgagagggtgaagctatcaaagacaaggtccgaatcgtcatcatctgatcggccagtcctgggctcagaaatcagtagcataggggtatccagcagtgtggctgaacacctggcccactcacttcaggactgctccaatatccaagagattttccaaacactctactcacacggatctgccatctcagaaagcaagattagagagtttgaggtggaaacagaacggctgaatagccggattgagcacctcaaatcccaaaatgacctcctgaccataaccttggaggaatgtaaaagcaatgccgagaggatgagcatgctggtgggaaaatacgaatccaatgccacagcgctgaggctggccttgcagtacagcgagcagtgcatcgaagcctacgaactcctcctggcgctggcagagagtgagcagagcctcatcctggggcagttccgagcggcgggcgtggggtcctcccctggagaccagtcgggggatgaaaacatcactcagatgctcaagcgagctcatgactgccggaagacagctgagaacgctgccaaggccctgctcatgaagctggacggcagctgtgggggagcctttgccgtggccggctgcagcgtgcagccctgggagagcctttcctccaacagccacaccagcacaaccagctccacagccagtagttgcgacaccgagttcactaaagaagacgagcagaggctgaaggattatatccagcagctcaagaatgacagggctgcggtcaagctgaccatgctggagctggaaagcatccacatcgatcctctcagctatgacgtcaagcctcggggagacagccagaggctggatctggaaaacgcagtgcttatgcaggagctcatggccatgaaggaggagatggccgagttgaaggcccagctctacctactggagaaagagaagaaggccctggagctgaagctgagcacgcgggaggcccaggagcaggcctacctggtgcacattgagcacctgaagtccgaggtggaggagcagaaggagcagcggatgcgatccctcagctccaccagcagcggcagcaaagacaaacctggcaaggagtgtgctgatgctgcctccccagctctgtccctagccgaactcaggacaacgtgcagcgagaatgagctggctgcggagttcaccaacgccattcgtcgagaaaagaagttgaaggccagagttcaagagctggtgagtgccttggagagactcaccaagagcagtgaaatccgacatcagcaatctgcagagttcgtgaatgatctaaagcgggccaacagcaacctggtggctgcctatgagaaagcaaagaaaaagcatcaaaacaaactgaagaagttagagtcgcagatgatggccatggtggagagacatgagacccaagtgaggatgctcaagcaaagaatagctctgctagaggaggagaactccaggccacacaccaatgaaacttcgctttaa

SEQ ID NO: 18795 - DNA, 2684 bp, Homo sapiens
  source 1..2684: mol_type = unassigned DNA
aggcgcagcgtggccgcgggtgggcggaactggtcgggatgagtggcggagggacagagacccctgtgggttgtgaggccgccccgggcggtggcagcaagaagagggactccctggggactgcgggctcagcgcacctcattatcaaggatcttggagaaattcattcaaggcttttggatcacagaccagttattcaaggtgaaactcgttattttgtaaaagaatttgaagaaaaacgtggtcttcgagaaatgcgagttcttgaaaatttgaagaacatgatccatgaaacaaatgaacatactcttcccaaatgtagagacacaatgcgggacagcctcagccaggttctccagagattgcaagcagctaatgactcagtctgtagactccaacagagggaacaggaacgaaaaaagattcatagtgaccacttagtagctagtgagaaacagcatatgctccagtgggacaacttcatgaaggagcaacccaacaaaagggctgaagtggatgaagagcacagaaaagccatggaaaggcttaaagaacaatatgctgagatggagaaggacctagcgaaattttcaaccttttaagaacttgaaccacaacaatcacaaactaatgagaagatgttcacctctctcctgaaaactattcccaccagaccgtttagcctctgcttcaagcttagcaatatattcagtggcactcttatatcagaagaaagaagtttctactggcattctgattggatatttaaagaagggtgccacatttttccagctttaagtgcctatatatgattatttgaatgaagaggagtaggaaggaaaatggaatcaatatactctttgttagtcagaattgatcatcttttccattgattagctcagagaactgtaggtatagacttcttagaaagataatttcattcatttctatacagggttaacaatagtttattattgtggcttaatgggaaggtatagaagctacctgtcatagcctccttggctgttggaaggatgtataaagtgttactgcatgagtaatgtagacaaaaaaaaaagccagctgtccttggagcagagatcacatttcagagaggtgagagtgaacacattgtctctgctgtggcaaagatggccacgctggtgtttgagctgcctcttgggaagcgttgcatattttacagtgcagcataatgccatgggcttccgtggatgggaagacacatgttaagttttgtggccttccagcacttactattttcagctttttaaagcatgcttagaaggaaaagcttaccaaaaatatattttgacatttagtttttccaagagctataatcttgcccatagtatttacctcatttttgtgtctgttttgctgtgggtaagctttataagataaataatgtctatacatgtttcgactgtttaatgagtaatcaacaaaatctgccagagagtccctctggaaccatataaagttcctggctttgaatgaaccagaagtgtttgcccacacagcaaatggtccatgttaaatgtaaatcctttttagtgttaatgtctgttctcataagcaggtatattatgatgaaacatgtaccagttctgtcatcactgtgatctttaaaaacctgcatttaacagtctaatttgaggctgggtgcagtggctcacacctgtaatctcaacactttgggaggccgaggcaggcggatcatttgaagtcaggagttcaagcctagcctggccaacatggtgaaaccccgtctctactaaaaatacaaaaattagcccggcatgttggtgcacgcttgtaatcccagctactcaggagtctgaggcacgagaatcacctgaactcaggaggcggaggttgcggtgagctgagatggcaccactgcactccagcttgggtgacagagtgagactccatctcaacaaaaaaaaaatctaactgaagaactaagttgattttttatttgccataaaccaagcaaaagtaaatgcaataatttcgagatttatggtaaacaaatttgaggtatggataaatctttcacatattttttattgctctttagtaaagaaaggcacaagaaagaaaatatccagctctcttgtgttatctcagtgtggcgactgcagaaaattgacaatgcctgcctgtgtaaatgtatggcttactgtcaaagcttcattcttggctgcatgttgaaaatgtgattaaagttaatagaggagatgaaataagtatttgagatttttttcaataacactgaacttctgccaactttctctatccgctactgtaggcttgacaggctcatcaatcatttgctggtacctggactaaaaagcgcacttgctgacaccaaggcatgttggaattttcttaattcagtggatggaaaaagaaatacttccaaaaatatcccacacatgaaaagggaggggagccttaaatgaaaattccctttgtaccgtagacactttttggaatgcgattaattgccaacacatcattgaacgaatgctgtaaccaagaaattaagattgtgtgtgtgaagggaatatattcttaactgtggctacccaacttgtatagcaaagatttctgatagtttgtgttcatctcatgtgaataataaatactttacccta

SEQ ID NO: 18796 - DNA, 1273 bp, Homo sapiens
  source 1..1273: mol_type = unassigned DNA
ggtgggcggaactggtcgggatgagtggcggagggacagagacccctgtgggttgtgaggccgccccgggcggtggcagcaagaagagggactccctggggactgcgggctcagcgcacctcattatcaaggatcttggagaaattcattcaaggcttttggatcacagaccagttattcaaggtgaaactcgttattttgtaaaagaatttgaaaatgaagactaaaccatagttaaaggcagacagtgtaatatccagtggctgtgtgttctgacggtgaagatgtagtgtaactatcagaaaatagaaggagatggaaaaacgtggtcttcgagaaatgcgagttcttgaaaatttgaagaacatgatccatgaaacaaatgaacatactcttcccaaatgtagagacacaatgcgggacagcctcagccaggttctccagagattgcaagcagctaatgactcagtctgtagactccaacagagggaacaggaacgaaaaaagattcatagtgaccacttagtagctagtgagaaacagcatatgctccagtgggacaacttcatgaaggagcaacccaacaaaagggctgaagtggatgaagagcacagaaaagccatggaaaggcttaaagaacaatatgctgagatggagaaggacctagcgaaattttcaaccttttaagaacttgaaccacaacaatcacaaactaatgagaagatgttcacctctctcctgaaaactattcccaccagaccgtttagcctctgcttcaagcttagcaatatattcagtggcactcttatatcagaagaaagaagtttctactggcattctgattggatatttaaagaagggtgccacatttttccagctttaagtgcctatatatgattatttgaatgaagaggagtaggaaggaaaatggaatcaatatactctttgttagtcagaattgatcatcttttccattgattagctcagagaactgtaggtatagacttcttagaaagataatttcattcatttctatacagggttaacaatagtttattattgtggcttaatgggaaggtatagaagctacctgtcatagcctccttggctgttggaaggatgtataaagtgttactgcatgagtaatgtagacaaaaaaaaaagccagctgtccttggagcagagatcacatttcagagaggtgagagtgaacacattgtctctgctgtggcaaagatggccacgctggtgtttgagctgcctcttgggaagc

SEQ ID NO: 18797 - DNA, 4558 bp, Homo sapiens
  source 1..4558: mol_type = unassigned DNA
gacctggaagcggctggggccggagcacacgtgtttcgtgtttcggtgagtgtggcggagatggagagccgggatcccgcccagccgatgtcgcctggagaagcgacgcagagtggcgcccggcctgccgaccgctatggcctattgaagcacagtcgcgagttcttggacttcttctgggacattgcgaagcctgagcaggagacgcgacttgcggccacggagaagctgctggagtatctgcgtggcaggccgaaggggtccgagatgaaatatgccctgaagcgtctaatcacgggactcggggtcgggcgagaaacagcccggccctgctacagtttggccctggcacagctgttacagtcttttgaagacctccccttgtgcagcatcctgcagcagatacaagaaaaatatgacctgcatcaggtgaagaaggcaatgctgagacctgctctctttgcaaacctgtttggagtgctcgccctctttcagtcaggtcggctggtgaaggaccaggaggcactgatgaagtcggtgaagctgctgcaggccctggcccagtaccaaaaccacttgcaggagcagccccggaaggccctggtggacatcctctccgaggtctcgaaggccacattgcaggagatcctgccggaggtcctcaaagccgacttgaatataatactcagctcccctgaacagctagagctcttcctcctggcccagcagaaggtgccctccaagctcaagaagctggtgggatccgtgaacctattctcagatgagaatgtccccaggctggtgaatgtgctgaagatggccgcctcctctgtgaagaaggaccgcaagctgcccgccattgctctggacctgctccgcctggcactcaaggaagacaagttcccacggttctggaaggaggtggtggaacaagggctgctgaagatgcagttctggccagccagctacctgtgtttccgcctgctgggcgcggccctgcccctgctgaccaaggagcagctgcacctggtgatgcagggagacgtgatccgccattacggggagcacgtgtgcactgctaagctcccaaagcagttcaagtttgccccagagatggacgattacgtgggcaccttcctagaggggtgccaggatgaccctgagcggcagctggccgtgctagtggccttctcatctgtcaccaaccaaggcctccctgtcacgcctactttctggcgggtcgtgcggttcctgagccctccggccctgcagggctatgtggcctggctgcgggccatgtttctccagccagacctggactccttggttgacttcagcaccaacaaccagaagaaagcccaggattcatcgctccacatgcctgagcgagctgtgttccggctgaggaaatggatcatctttcgattggtgagcattgtggacagcctgcacctggagatggaggaggccttgactgagcaggtggccaggttttgtttgttccactcgttctttgtcacaaagaagcccacatcccagatccctgagacaaagcacccgttctccttccctttggaaaaccaggcccgagaggctgtcagcagtgccttcttcagtctgttgcagaccctcagcacgcagttcaagcaggcaccgggccagacccagggtgggcagccctggacctaccacctggtgcagttcgcagacctcctgttgaatcacagccacaacgtgaccaccgtgacacccttcactgcgcagcagcgccaggcctgggaccggatgctgcagactctgaaggagctggaggcccactccgcagaggccagggctgctgccttccagcaccttctgctcctcgtgggcatccacctcctcaagtcccctgcagagagctgtgacctgctgggtgacatccagacctgcatcaggaaaagtctgggagagaagccccgccggagccgcaccaagaccatcgacccccaggaacccccgtgggtagaggtgctggtggagatcttgctggccctgttggcccagcccagccacctcatgcgccaggtggcccggagcgtgtttggccacatctgctcccacctgaccccgcgtgccctgcagctaattctggatgtgctgaaccccgagaccagtgaggatgagaatgaccgtgtggtggtgacggacgattctgatgagcggcggctgaagggtgcagaggacaagagcgaggaaggtgaggacaacagaagctcagagagtgaagaggagagcgagggggaggagagcgaggaggaggagcgcgacggggacgtggatcagggcttccgggaacagctgatgaccgtgctgcaggctgggaaggcgctgggtggagaggacagtgagaacgaggaggagctgggggatgaggccatgatggccctggaccagagcctcgccagcctctttgccgagcagaagctgcgtatccaggcccggcgagacgagaagaacaagctgcagaaggagaaggctctgcggcgcgacttccagatccgggtgctggacctggtggaggtgctagtgaccaagcagcccgagaatgccctggtcctggagctgctggagccgctgctgagcatcatccggcgcagcctgcgcagcagcagctccaaacaggagcaggaccttctgcacaagacggcgcgcatcttcacgcaccacctgtgccgtgcccggcgctactgccacgacttgggtgagcgcgcaggggccctgcacgcccaggtggagcggttggtgcagcaggctggccgccagcccgactcccccaccgccctctaccacttcaacgcctctctctacctgctccgggtcttgaagggcaacactgctgagggctgcgtgcatgagacacaggagaagcagaaagctggcactgaccccagccacatgcccacgggcccgcaggctgccagctgcttggacttgaacctggtgacccgggtgtactcgacagcactgagctccttcctgaccaagcgcaacagccccctcacagttcccatgttcctcagcctcttctcccggcacccggtgctctgtcagagcctgctccccatcctggtccagcatatcacgggcccggtgcggccccgtcatcaggcctgcctgctgctccagaagaccctgtccatgcgggaggtgaggtcgtgctttgaggaccccgagtggaagcagctgatgggccaggtcctagcaaaggtcaccgagaacttgcgcgtgctgggggaggcgcagaccaaggcgcagcatcagcaggcactgtcctccctggagctgctcaacgttctcttcaggacctgcaaacatgagaagctgaccttggacctgacggtgctcctgggtgtgctgcaggggcaacagcagagcctacagcagggggcacactccaccggctccagccgcctgcacgacctctactggcaggccatgaaaaccctgggagtccagcgccccaagttggagaagaaggatgccaaggagatccccagtgccacccagagccccatcagtaagaagcggaagaaaaagggattcttgccagagacgaagaagcgcaagaaacgcaagtcagaggatggcacgccagcggaggatggcacacctgcagccaccggcgggagccagccccccagcatgggcaggaagaagaggaacaggacaaaggctaaggtcccagcccaggcaaacgggacgccaaccaccaagagtccagcccctggcgcccccacccggagccccagcacccctgccaaatccccaaaactgcagaagaaaaaccagaagccgtcccaggtgaatggagctcccgggtcccccacggaacctgcaggccaaaagcagcatcagaaggctcttcccaaaaagggggtcttgggcaaatcaccactgtccgcgctggcacggaaaaaggcaaggctgtctttggtcatcaggagtcccagcctgcttcagagtggggccaagaagaaagcacaggtgaggaaggcagggaagccctgagcacaggtacgggcccccctcagcccctgcctccatctgcctgagacgcctattttttttttttttttttaaaccatgattttaatacgcaagctgtttctaaggcgctgccactggggagggtggctgttgccgcctgcccgggcatcctgctctggcaagcacagcctgagccattcctgcaggggtcccagggtgcagagacctccccacccccggttctgggctgggaccctggctccagggccatgtccagggctctggtgtttgcctgggttggtgcaggttgatgtgctggctgcaggcaggtgtgaccatctctcgtgcctgccacctctttgcccccaggcttttttgctgtgagggagccaccagggggtgatttaaataggtttatttcttcatttacaagaggaatatatttggcttctctcttaagactctgagattcacaatcagcagctctaaaaaataaaggagcagtttggcttccggaaggaagaggaggcaa

SEQ ID NO: 18798 - DNA, 4104 bp, Homo sapiens
  source 1..4104: mol_type = unassigned DNA
ctgacctggaagcggctggggccggagcacacgtgtttcgtgtttcggtgagtgtggcggagatggagagccgggatcccgcccagccgatgtcgcctggagaagcgacgcagagtggcgcccggcctgccgaccgctatggcctattgaagcacagtcgcgagttcttggacttcttctgggacattgcgaagcctgagcaggagacgcgacttgcggccacggagaagctgctggagtatctgcgtggcaggccgaaggggtccgagatgaaatatgccctgaagcgtctaatcacgggactcggggtcgggcgagaaacagcccggccctgctacagtttggccctggcacagctgttacagtcttttgaagacctccccttgtgcagcatcctgcagcagatacaagaaaaatatgacctgcatcaggtgaagaaggcaatgctgagacctgctctctttgcaaacctgtttggagtgctcgccctctttcagtcaggtcggctggtgaaggaccaggaggcactgatgaagtcggtgaagctgctgcaggccctggcccagtaccaaaaccacttgcaggagcagccccggaaggccctggtggacatcctctccgaggtctcgaaggccacattgcaggagatcctgccggaggtcctcaaagccgacttgaatataatactcagctcccctgaacagctagagctcttcctcctggcccagcagaaggtgccctccaagctcaagaagctggtgggatccgtgaacctattctcagatgagaatgtccccaggctggtgaatgtgctgaagatggccgcctcctctgtgaagaaggaccgcaagctgcccgccattgctctggacctgctccgcctggcactcaaggaagacaagttcccacggttctggaaggaggtggtggaacaagggctgctgaagatgcagttctggccagccagctacctgtgtttccgcctgctgggcgcggccctgcccctgctgaccaaggagcagctgcacctggtgatgcagggagacgtgatccgccattacggggagcacgtgtgcactgctaagctcccaaagcagttcaagtttgccccagagatggacgattacgtgggcaccttcctagaggggtgccaggatgaccctgagcggcagctggccgtgctagtggccttctcatctgtcaccaaccaaggcctccctgtcacgcctactttctggcgggtcgtgcggttcctgagccctccggccctgcagggctatgtggcctggctgcgggccatgtttctccagccagacctggactccttggttgacttcagcaccaacaaccagaagaaagcccaggattcatcgctccacatgcctgagcgagctgtgttccggctgaggaaatggatcatctttcgattggtgagcattgtggacagcctgcacctggagatggaggaggccttgactgagcaggtggccaggttttgtttgttccactcgttctttgtcacaaagaagcccacatcccagatccctgagacaaagcacccgttctccttccctttggaaaaccaggcccgagaggctgtcagcagtgccttcttcagtctgttgcagaccctcagcacgcagttcaagcaggcaccgggccagacccagggtgggcagccctggacctaccacctggtgcagttcgcagacctcctgttgaatcacagccacaacgtgaccaccgtgacacccttcactgcgcagcagcgccaggcctgggaccggatgctgcagactctgaaggagctggaggcccactccgcagaggccagggctgctgccttccagcaccttctgctcctcgtgggcatccacctcctcaagtcccctgcagagagctgtgacctgctgggtgacatccagacctgcatcaggaaaagtctgggagagaagccccgccggagccgcaccaagaccatcgacccccaggaacccccgtgggtagaggtgctggtggagatcttgctggccctgttggcccagcccagccacctcatgcgccaggtggcccggagcgtgtttggccacatctgctcccacctgaccccgcgtgccctgcagctaattctggatgtgctgaaccccgagaccagtgaggatgagaatgaccgtgtggtggtgacggacgattctgatgagcggcggctgaagggtgcagaggacaagagcgaggaaggtgaggacaacagaagctcagagagtgaagaggagagcgagggggaggagagcgaggaggaggagcgcgacggggacgtggatcagggcttccgggaacagctgatgaccgtgctgcaggctgggaaggcgctgggtggagaggacagtgagaacgaggaggagctgggggatgaggccatgatggccctggaccagagcctcgccagcctctttgccgagcagaagctgcgtatccaggcccggcgagacgagaagaacaagctgcagaaggagaaggctctgcggcgcgacttccagatccgggtgctggacctggtggaggtgctagtgaccaagcagcccgagaatgccctggtcctggagctgctggagccgctgctgagcatcatccggcgcagcctgcgcagcagcagctccaaacaggagcaggaccttctgcacaagacggcgcgcatcttcacgcaccacctgtgccgtgcccggcgctactgccacgacttgggtgagcgcgcaggggccctgcacgcccaggtggagcggttggtgcagcaggctggccgccagcccgactcccccaccgccctctaccacttcaacgcctctctctacctgctccgggtcttgaagggcaacactgctgagggctgcgtgcatgagacacaggagaagcagaaagctggcactgaccccagccacatgcccacgggcccgcaggctgccagctgcttggacttgaacctggtgacccgggtgtactcgacagcactgagctccttcctgaccaagcgcaacagccccctcacagttcccatgttcctcagcctcttctcccggcacccggtgctctgtcagagcctgctccccatcctggtccagcatatcacgggcccggtgcggccccgtcatcaggcctgcctgctgctccagaagaccctgtccatgcgggaggtgaggtcgtgctttgaggaccccgagtggaagcagctgatgggccaggtcctagcaaaggtcaccgagaacttgcgcgtgctgggggaggcgcagaccaaggcgcagcatcagcaggcactgtcctccctggagctgctcaacgttctcttcaggacctgcaaacatgagaagctgaccttggacctgacggtgctcctgggtgtgctgcaggggcaacagcagagcctacagcagggggcacactccaccggctccagccgcctgcacgacctctactggcaggccatgaaaaccctgggagtccagcgccccaagttggagaagaaggatgccaaggagatccccagtgccacccagagccccatcagtaagaagcggaagaaaaagggattcttgccagagacgaagaagcgcaagaaacgcaagtcagaggatggcacgccagcggaggatggcacacctgcagccaccggcgggagccagccccccagcatgggcaggaagaagaggaacaggacaaaggctaaggtcccagcccaggcaaacgggacgccaaccaccaagagtccagcccctggcgcccccacccggagccccagcacccctgccaaatccccaaaactgcagaagaaaaaccagaagccgtcccaggtgaatggagctcccgggtcccccacggaacctgcaggccaaaagcagcatcagaaggctcttcccaaaaagggggtcttgggcaaatcaccactgtccgcgctggcacggaaaaaggcaaggctgtctttggtcatcaggagtcccagcctgcttcagagtggggccaagaagaaagcacagactctgagattcacaatcagcagctctaaaaaataaaggagcagtttggcttccggaaggaagaggaggcaacactcgg

SEQ ID NO: 18799 - DNA, 1874 bp, Homo sapiens
  source 1..1874: mol_type = unassigned DNA
ctgacctggaagcggctggggccggagcacacgtgtttcgtgtttcggtgagtgtggcggagatggagagccgggatcccgcccagccgatgtcgcctggagaagcgacgcagagtggcgcccggcctgccgaccgctatggcctattgaagcacagtcgcgagttcttggacttcttctgggacattgcgaagcctgagcaggagacgcgacttgcggccacggagaagctgctggagtatctgcgtggcaggccgaaggggtccgagatgaaatatgccctgaagcgtctaatcacgggactcggggtcgggcgagaaacagcccggccctgctacagtttggccctggcacagctgttacagtcttttgaagacctccccttgtgcagcatcctgcagcagatacaagaaaaatatgacctgcatcaggtgaagaaggcaatgctgagacctgctctctttgcaaacctgtttggagtgctcgccctctttcagtcaggtcggctggtgaaggaccaggaggcactgatgaagtcggtgaagctgctgcaggccctggcccagtaccaaaaccacttgcaggagcagccccggaaggccctggtggacatcctctccgaggtctcgaaggccacattgcaggagatcctgccggaggtcctcaaagccgacttgaatataatactcagctcccctgaacagctagagctcttcctcctggcccagcagaaggtgccctccaagctcaagaagctggtgggatccgtgaacctattctcagatgagaatgtccccaggctggtgaatgtgctgaagatggccgcctcctctgtgaagaaggaccgcaagctgcccgccattgctctggacctgctccgcctggcactcaaggaagacaagttcccacggttctggaaggaggtggtggaacaagggctgctgaagatgcagttctggccagccagctacctgtgtttccgcctgctgggcgcggccctgcccctgctgaccaaggagcagctgcacctggtgatgcagggagacgtgatccgccattacggggagcacgtgtgcactgctaagctcccaaagcagttcaagtttgccccagagatggacgattacgtgggcaccttcctagaggggtgccaggatgaccctgagcggcagctggccgtgctagtggccttctcatctgtcaccaaccaaggcctccctgtcacgcctactttctggcgggtcgtgcggttcctgagccctccggccctgcagggctatgtggcctggctgcgggccatgtttctccagccagacctggactccttggttgacttcagcaccaacaaccagaagaaagcccaggattcatcgctccacatgcctgagcgagctgtgttccggctgaggaaatggatcatctttcgattggtgagcattgtggacagcctgcacctggagatggaggaggccttgactgagcaggtggccaggttttgtttgttccactcgttctttgtcacaaagaagcccacatcccagatccctgagacaaagccccaggagaggtccgaaggcccagcccagccacctcatgcgccaggtggcccggagcgccccaagttggagaagaaggatgccaaggagatccccagtgcggaggatggcacacctgcagccaccggcgggagccagccccccagcatgggcaggaagaagaggaacaggacaaaggctaaggtcccagcccaggcaaacgggacgccaaccaccaagagtccagcccctggcgcccccacccggagccccagcacccctgccaaatccccaaaactgcagaagaaagcacaggtgaggaaggcagggaagccctga

SEQ ID NO: 18800 - DNA, 7785 bp, Homo sapiens
  source 1..7785: mol_type = unassigned DNA
gcgggatctctcgggaggacggacggggtcaggtcccatcatggcggctgaagaggcggatgtggatatcgaaggggacgtggtagcggcggcgggggcacagccaggaagtggtgaaaatacagcatcagttttacaaaaagatcactatcttgattcatcttggagaacagagaatggccttattccttggaccttggataacaccatcagtgaagagaacagagctgttattgagaaaatgttgttggaagaagaatattatttatctaaaaaatcacaaccggaaaaagtctggcttgatcaaaaggaagatgataaaaaatacatgaagagtctgcagaaaacagcaaaaatcatggtacactctcctacaaaaccagccagttactcagtaaagtggacgatagaagaaaaagagctgtttgaacaagggctggctaaatttggccgaagatggaccaaaatttcaaagctaattggaagccgcactgttttacaagtgaagagttatgcaagacagtattttaaaaataaggtcaaatgcggtctggataaagaaacaccaaatcagaagaccggccataatcttcaagttaaaaatgaagataaagggacaaaggcatggacaccatcatgtttaaggggacgtgctgatcccaacttgaatgctgtaaaaattgaaaagttatctgatgatgaagaagtagacatcacagatgaggtggacgagttgtcttctcaaacaccccagaagaattctagcagtgatctcttgttagactttcctaatagtaaaatgcatgaaaccaatcaaggagaattcattacttctgacagccaggaagctctcttttctaagtcttccaggggctgtcttcaaaatgaaaagcaagatgaaacactttcaagctcagaaattacactgtggactgagaaacagagcaatggtgacaaaaaatcaattgaattaaatgaccagaaatttaatgaattgattaaaaactgcaacaagcatgatggaaggggaataatagttgatgccaggcagttgccttctccagagccttgtgaaattcagaaaaatttgaatgataatgaaatgctttttcattcttgccaaatggtagaggaaagccatgaggaagaagagcttaagccaccagaacaggaaatagaaatagatagaaatatcattcaagaagaagaaaaacaagcaattcctgagttttttgaggggcgccaagctaaaacaccagaacgctatttgaaaattagaaattatattttggatcaatgggagatatgcaaaccaaaatacttaaataagacctcagtacgtcctggcctgaagaactgtggagatgttaattgtattggacggattcatacatacctcgaattgataggagcaatcaattttggatgtgaacaggctgtgtataataggccacaaacagttgacaaagtacgaatcagagacagaaaagatgcagtagaagcataccaacttgcccagcgtctgcagtctatgcgtacaaggagacgtagggtccgagacccatggggaaactggtgtgatgcaaaggacttagaaggacaaacgtttgagcatctctctgctgaggagttggcaaaaagaagagaagaggaaaaaggcagacctgttaaatctttaaaagtgccaagaccaacaaaaagctcgtttgatcccttccaactgataccttgtaatttttttagtgaagaaaagcaggagccatttcaggtgaaagtggcttcagaagcacttttaataatggatttgcatgctcatgtttctatggcagaagtgattggtctgttaggaggaagatactcagaagttgataaagtagttgaagtctgtgcagcagaaccatgtaacagtctgagtacaggactacagtgtgagatggatcctgtatcacaaacacaggcctcagaaaccttggctgttagaggcttcagtgttattggatggtatcattctcatcctgcttttgatcctaatccttccttacgagatattgacacacaagctaaataccagagttacttctccagaggaggtgcaaagttcattgggatgattgttagtccctataatcgaaataatcccttaccatattctcagattacctgcctggttataagtgaggaaattagcccagatggctcttatcgcttaccttacaaatttgaagtacagcagatgttagaagaacctcagtggggattagtatttgaaaagacaagatggataatagaaaaatacaggctctcccatagcagcgtccccatggataaaatctttcgccgggattctgacctgacttgtttgcagaaacttttggagtgtatgaggaagactctgagcaaagtgaccaattgctttatggctgaagaattcttgactgaaatagaaaatttgttcctttccaattataaaagcaaccaagagaatggagtaaccgaagagaactgtacaaaggaattgttaatgtgattattttaaagttaagacattttaatcttgacacagtagatcttactttcaaagttataaacttgaagtgattgtagttaacattggcacagctttggtattttttctctatttcacaaaatccaaactttgccacataaatcatgtgaaaaggaagagatacaaatttgttttcatatagtgattatcagagtgttctgcaaaccagggtccaccacggtgttctagtcctttactgagcaatgctgtaggctgtgaaactaagcaacctggtcggctttactgttgtgttcagcttgggatttggactatgtctctaagtcatttcttccctgaactagtcatttatgttccattgtggtatctcctatttcatttaaaagcacttccattctttccatatattctgctgagatttgtttatggctataaatgagatatggatgggtggtcactgagataattaatatggtttagaactactgattaataaatctaacaggagaccaggagaggcatgacaagaaaatcttaaaaacaggaaaaacccaaaggagagaactaaattaccagtttctaatcatagatactatcttccatttcattgtatagcagtagtatcataagatatgccattttctcagctatctgaaaatttttaaccaattttacacacataaaataattagcttcaattgtgagtccacttacattagtaggtgtgataaaacctcatttaactggaacataggtaatcataactcaaactttttttctactgcctactactaggagaaagaggcaaatgataataaagctggaataaatcagagatttaatttttaaaacaagcctttcaggacatgttacatattcagcccagtttcatatgctttctgaatctataatggaggtcagtgaacttttttaatgtaaagggccagtttgtaaataattttggcttttcaggccacatatgatgtctatgagacattcttctttgtgtgtgtgtgtgtgtgtgtgtgtgtgtgtgtgtgttttacagccctttaaaatgataaaaaccattgttaactcacaggcctcataaaacataggctgttggctattattctccaacccttgatctagagaattttaaacattagaattttgttttacatttgttaagctttacgtcatcttcaaatgacaccaaaactcagaattatgatctgcatttaagccaattttaaaataaaataagcagtcaatgctgcctcatttattgaaattcagtagattttagtttatttcttagtagtcagagaattgatttatagctattcaccaaacattcttactaacgtttccttatatctaaatcagattgattctatattttgctttgtttgtaatcaatagccaatgaagaataaggagtattggaagaagcagtgagtcagctttaggtgacctggttcttgtctcaactttgtgatttggggagatacagtttactttccctgagccttaattcttgtgtaactgaagtctaacttaacttcttaatgtccttccagaactaaaattttattgttcattctaatcgttggactactcttgtgaagtttatattttgagttaatacagtttccaaattaacatacatttaaaaaaaaaagggtagtatttttccatttctctgtgtgcacttaggataaacagtgaagtatagcttataaaacaattagtttgagggctgagagtgtaagaggaactataccaaaagtcaggaaacctgagctcttaccctaactctgttaccaactttgctgtgtgaccttaatcaaaacacataacctggaccccatgctcctcaccagtaaatcaagggcctgaattttatggcttagtattcccttccaagctccgaagttgcgtgattctgtgaaaggcagtgattgattcctttgtactcatcttccttttgacctgtttcctcatgatatattggggaacaaatactaaaaagtgttttatactagctttcttgattgacatttccctataatactgatgaatttgggtgatggaaagtaatggaaattgttaaaagttctgctctcaaatctgagtctccttgccctgtgtgccaatgtttaaccatatttgctaatctaagccatattgcgaggatctcaaggatgatacttgtcaagagtttggggccttgagagcacagttttcaaaataatacttagtattttctgactatagagtacatttgtcttgtaaagtatattttaaaatacagagaagtgtgaagtacaaatatctcagtgctactatttaaaaaaacacaattagtatataaatccttccccatttttttgacagtataattttagtatgttaaacttggttacttctttctctcttcctccatcattttccctgcttcctttttcttttgtcatattcttaaaacaattttgcaaccacaggtacccacattgctggcactaccagccttgggctactaccgaggataatggagccagggccttgtagaagcacagaggaagtctagaactgagggggcctatgatacaggaagttcaggaggcagagtctcaaaggaacacctgcctttaataatgtttacagaagtggagaaaggactaaaggacttaaagacatgcaggtgtcttcatcctgattctgtctttgttattgcacaatgactataaaataatgacctaatttttttttttttctggcttggctaatggaaatcgacactagcgcttccccagtattagacttaatctaattccaaagtaacattcaagaaaagaaaaaccagtggaacaggatcagtaagctcagactctccatctccattattttagccttgaccattcttctctaatccttttaaattatcttcagtttccagttcaagttacattgcttcagttacagtttgtttgaccctgtattcagagctgcattatgattcttgtgggccctagatagttttgccatcttagaccccttcttccatacaaaattaaaagtgatattttacaattgtatctgtatgaaatgaatgtattaatattttagattaaaacattttgtttagaagttcagttttttcttatgaggctaaaaaaaattaaaacatttttgtgggcttctaaaaaactgtgggccttaggtactgtgcctaatggataagttggcattgcctgtattctgaagggcatcattggaaaaatagcagtcattattctgtccccttctcccaccaccacagtccttggagaagcctttgccactccatccaggagcactgcagtttccacggttatagatctatagacttgaacttacttccttcccaacctaacgaaaactcacaaggattacttgggaccattcatcctcaaaaaagataggaggcagtggtttgttttagtcttcagatatttttgttttggtcagtccctaatctgtagttttgaaactcgtgccacacttgaaagggaaacatcctactacctttctttcctctccatttcccacaaaccctttccttcatcatcactccctgcattcttacttctcagcatataaatacaagacccttctttctattatttgttgaaagctaggcctgtaaaatagagatggacagaccatgcatgtttccatgaagctatttaatgctgctcccagtcttctgtccataccattccttccctgcccctaggagtggggttgaggtctgtgacatgcagactgtaagcacagtcagaacctctgcagctctcaacccaacagaggagactgtggcttcaacatgccaacctgagcaggtctcctctgcattaccttcctcccatttctcttcctgggtcctgatgaggtgagctggaggaaccaatagtcaggatgccctggaattgatgttgctctgttttgtgctcacaaaacagccatgtaacacatgagcacctgagttgaagccatccagtcgcaagtcagcagacagcagttgatggaattctcagtagaaattcagtaagggtgcccaaattttattttttttttcacctatactctaccaatatatggtatttaggaaaacttcttttatccaagcacaaagaaaagcacacacatttttataatcatctgcttcatcagggtaaataaataatttaacaaatttgatcagcatctctagtttaccagtactttaatattagttttcttacaaattaatgtattttgcaatatttccagaaaatcactgtgggagaataatgtaatatactttaggatatatttcctgaccttttcttaaatggcttcatgtgctattcccccaaattctgctttctctattttcttttttatttaacctataattatactttctagtatattctgagtctatcttctaagccaccttacatttttcctggaacaagggagggaataaatagttgcctccactaaatcaggaaaaaataaaaatatcccaggggagctgtgattatgccaagagctctaaacagaagtttgagaaggtaaaaattaagttgtagtatctgagttgtttttattttcttcctttggtgtttatgaaggtattcataagaactttaatttcaggggaaaaaaatgcctgatttgctatttttgacatttcctcgtctcttaagaagtcagttaaatatgttttcatagtttatattcctgtttcatagattactgtgaaacatgtatttaaacctatgaattataaaatagtatttagattctagcgtgagttaaatagattagtcatatatcttttagatttgtggatttgacatgtaaattatgtgttgtgtataagtaagttagttactaaacatatggcatggttattgataaacttgttgctatttttttccaaatgctatcagtgtttgtggacttttaaaaattagtttgaattttggaatgttctgtgataaaatgtaatttcaactattttgtacatttaaatatgccatgttgtatatgtctgtatttaaaaatgttgtaaatacctgcattttaagaattatgaaagattttcctcaaaaatgacagaactctccatacttaattgtgacacattataagatatctgattttaagcttttggattttgttctaaaaattaagtttaaacatgctgaaaattccataaaaataaaattttgaaaataaagtga

SEQ ID NO: 18801 - DNA, 1349 bp, Homo sapiens
  source 1..1349: mol_type = unassigned DNA
gtgagtggggcgctctcgtgggcatcccagcgccggggcaggccgggtagtgcccgatcccgcggggcgcgcgctgctgctttaggcacccgggctcgggtgcgggtctgggagacctgtcggtcggcgagaagcctcggtggccggcgctgtggttgcgggacctgggacgcgctcccaggcgtcccacctccccggagactggggcagggtgggtggggcccggatctaggggtagggtcgcggaagccttggttacagagagtcgcacacgtggcctgctaatggtcgcgacaccggtgacgagcgcacggaaagtttggaggcttagcaaggagggtggtgccggcctccgcccggtggtggcagaactgcctgtgcgagcacggcttccacgtgggctgcgccgccgggcgtcatgtcgggcctaagagacacgctctacagctgtgaaatctgaagttcaggtttgcatttccttactgctttgtcttgaagacagaacgatgccaaagaaagcaaagcctacagggagtgggaaggaagaggggccggctccctgtaagcagatgaagttagaagcagctggggggccttcagctttaaactttgacagtcccagtagtctctttgaaagtttaatctcgcccatcaagacagagacttttttcaaggaattctgggagcagaagccccttctcattcagagagatgaccctgcactggccacatactatgggtccctgttcaagctaacagatctgaagagtctgtgcagccgggggatgtactatggaagagatgtgaatgtctgccggtgtgtcaatgggaagaagaaggttttaaataaagatggcaaagcacactttcttcagctgagaaaagattttgatcagaaaagggcaacgattcagtttcaccaacctcagagatttaaggatgagctttggaggatccaggagaagctggaatgttactttggctccttggttggctcgaatgtgtacataactcccgcaggatctcagggcctgccgccccattatgatgatgtcgaggttttcatcctgcagctggagggagagaaacactggcgcctctaccaccccactgtgcccctggcacgagagtacagcgtggaggccgaggaaaggatcggcaggccggtgcatgagtttatgctgaagccgggtgatttgttgtactttcccagaggaaccattcatcaagcggacactcctgcggggctggcccactctactcacgtgaccatcagcacctaccagaacaatgatgctggagctagaatgagaagatgtgacttgagggccattgctccccagaaatga

SEQ ID NO: 18802 - DNA, 2923 bp, Homo sapiens
  source 1..2923: mol_type = unassigned DNA
gtgcccacgctgccccgcctccagccgctgcgccgcaacgcagtgggctcgcggccgcgagcaacaggccgtgccgggtgagtggggcgctctcgtgggcatcccagcgccggggcaggccgggtagtgcccgatcccgcggggcgcgcgctgctgctttaggcacccgggctcgggtgcgggtctgggagacctgtcggtcggcgagaagcctcggtggccggcgctgtggttgcgggacctgggacgcgctcccaggcgtcccacctccccggagactggggcagggtgggtggggcccggatctaggggtagggtcgcggaagccttggttacagagagtcgcacacgtggcctgctaatggtcgcgacaccggtgacgagcgcacggaaagtttggaggcttagcaaggagggtggtgccggcctccgcccggtggtggcagaactgcctgtgcgagcacggcttccacgtgggctgcgccgccgggcgtcatgtcgggcctaagagacacgctctacagctgtgaaatctgaagttcaggtttgcatttccttactgctttgtcttgaagacagaacgatgccaaagaaagcaaagcctacagggagtgggaaggaagaggggccggctccctgtaagcagatgaagttagaagcagctggggggccttcagctttaaactttgacagtcccagtagtctctttgaaagtttaatctcgcccatcaagacagagacttttttcaaggaattctgggagcagaagccccttctcattcagagagatgaccctgcactggccacatactatgggtccctgttcaagctaacagatctgaagagtctgtgcagccgggggatgtactatggaagagatgtgaatgtctgccggtgtgtcaatgggaagaagaaggttttaaataaagatggcaaagcacactttcttcagctgagaaaagattttgatcagaaaagggcaacgattcagtttcaccaacctcagagatttaaggatgagctttggaggatccaggagaagctggaatgttactttggctccttggttggctcgaatgtgtacataactcccgcaggatctcagggcctgccgccccattatgatgatgtcgaggttttcatcctgcagctggagggagagaaacactggcgcctctaccaccccactgtgcccctggcacgagagtacagcgtggaggccgaggaaaggatcggcaggccggtgcatgagtttatgctgaagccgggtgatttgttgtactttcccagaggaaccattcatcaagcggacactcctgcggggctggcccactctactcacgtgaccatcagcacctaccagaacaattcatggggagatttccttttggataccatctcggggcttgtatttgatactgcaaaggaagacgtggagttacggaccggcataccccggcagctgctcctgcaggtggaatccacaactgttgctacaagacgattaagtggcttcctgaggacacttgcagaccggctggagggcaccaaagaactgctttcctcagacatgaagaaggattttattatgcacagactccccccttactctgcgggagatggggcagagctgtcaacaccaggtggaaagttaccgaggctggacagtgtagtgagactgcagtttaaagaccacattgtcctcacagtactgccggatcaagatcaatctgatgaagctcaagaaaagatggtgtacatctatcattccttaaagaatagtagagagacacacatgatgggaaatgaggaggaaacagagtttcatggacttcgcttccctttgtcacatttggatgcactgaagcaaatttggaatagtccagctatttctgtcaaggacctgaaacttactacagatgaggaaaaggaaagcctggtattatccctctggacagaatgtttaattcaagtagtctagtgcctttgcagaatcaaatgcctactattttatatgcatatattaaaagaaaagcaaagacctgagccgaggagaggatgaattcaagtttccttacctgcgtatctactaacaaacatgagacctccctgttacaggtggtcagttggccaaatgtactaacgggcacatgaaagaaagaacagcaaattaccaagtgtctcagaaaatgacaaaaccatattttgacaagtttatttaatccagtgtggtagaaaaggcacaattccaatgtatcatttagaattgaatgtcattaacctggctttgttctttggaagaaacaacttctttaaagagcttctttggctctagaaaaatttcaaacaattaaaataagaaaaaattttaaactggttttttataatgaaaatatacatacctttgtgtatagacaagcccatgcccattaaaataaagttatcctgtaacataaattttattaaataatacttccccacagatgagaggcacgcaacacctatggacaaaagggagttacagaggctgcttaaaagatggagaaaagcctgagattgaaggaggaaaaaaacccagtatttaaagtctataaaaaatactcaaaatagtgggtcttcgagtttaaaatagtcattgttattttacattctaaagtgcatgtaggttgatattttttaaaatatcattggagaatttaatctttctttataaaaatagagcatttttctgctttctggcaaaagttggggataaaaggaaaaaaagttgtcaaaatgtaattttcagtccaattcaccaggaaaacatgcttgtgaattgtgcagtaaaaggtggtaatgactactggaagctaagtcaaaggtgatttcctacctgattttacttacttaaataaaagttacttacaatgggagtgaaaaa

SEQ ID NO: 18803 - DNA, 2232 bp, Homo sapiens
  source 1..2232: mol_type = unassigned DNA
acaccggtgacgagcgcacggaaagtttggaggcttagcaaggagggtggtgccggcctccgcccggtggtggcagaactgcctgtgcgagcacggcttccacgtgggctgcgccgccgggcgtcatgtcgggcctaagagacacgctctacagctgtgaaatctgaagttcaggtttgcatttccttactgctttgtcttgaagacagaacgatgccaaagaaagcaaagcctacagggagtgggaaggaagaggggccggctccctgtaagcagatgaagttagaagcagctggggggccttcagctttaaactttgacagtcccagtagtctctttgaaagtttaatctcgcccatcaagacagagacttttttcaaggaattctgggagcagaagccccttctcattcagagagatgaccctgcactggccacatactatgggtccctgttcaagctaacagatctgaagagtctgtgcagccgggggatgtactatggaagagatgtgaatgtctgccggtgtgtcaatgggaagaagaaggttttaaataaagatggcaaagcacactttcttcagctgagaaaagattttgatcagaaaagggcaacgattcagtttcaccaacctcagagatttaaggatgagctttggaggatccaggagaagctggaatgttactttggctccttggttggctcgaatgtgtacataactcccgcaggatctcagggcctgccgccccattatgatgatgtcgaggttttcatcctgcagctggagggagagaaacactggcgcctctaccaccccactgtgcccctggcacgagagtacagcgtggaggccgaggaaaggatcggcaggccggtgcatgagtttatgctgaagccgggtgatttgttgtactttcccagaggaaccattcatcaagcggacactcctgcggggctggcccactctactcacgtgaccatcagcacctaccagaacaattcatggggagatttccttttggataccatctcggggcttgtatttgatactgcaaaggaagacgtggagttacggaccggcataccccggcagctgctcctggtggaatccacaactgttgctacaagacgattaagtggcttcctgaggacacttgcagaccggctggagggcaccaaagaactgctttcctcagacatgaagaaggattttattatgcacagactccccccttactctgcgggagatggggcagagctgtcaacaccaggtggaaagttaccgaggctggacagtgtagtgagactgcagtttaaagaccacattgtcctcacagtactgccggatcaagatcaatctgatgaagctcaagaaaagatggtgtacatctatcattccttaaagaatagtagagagacacacatgatgggaaatgaggaggaaacagagtttcatggacttcgcttccctttgtcacatttggatgcactgaagcaaatttggaatagtccagctatttctgtcaaggacctgaaacttactacagatgaggaaaaggaaagcctggtattatccctctggacagaatgtttaattcaagtagtctagtgcctttgcagaatcaaatgcctactattttatatgcatatattaaaagaaaagcaaagacctgagccgaggagaggatgaattcaagtttccttacctgcgtatctactaacaaacatgagacctccctgttacaggtggtcagttggccaaatgtactaacgggcacatgaaagaaagaacagcaaattaccaagtgtctcagaaaatgacaaaaccatattttgacaagtttatttaatccagtgtggtagaaaaggcacaattccaatgtatcatttagaattgaatgtcattaacctggctttgttctttggaagaaacaacttctttaaagagcttctttggctctagaaaaatttcaaacaattaaaataagaaaaaattttaaactggttttttataatgaaaatatacatacctttgtgtatagacaagcccatgcccattaaaataaagttatcctgtaacataaattttattaaataatacttccccacagatgagaggcacgcaacacctatggacaaaagggagttacagaggctgcttaaaagatggagaaaagcctgagattgaaggaggaaaaaaacccagtatttaaagtctataaaaaatactcaa

SEQ ID NO: 18804 - DNA, 2341 bp, Homo sapiens
  source 1..2341: mol_type = unassigned DNA
acgctgccccgcctccagccgctgcgccgcaacgcagtgggctcgcggccgcgagcaacaggccgtgccgggtttgcatttccttactgctttgtcttgaagacagaacgatgccaaagaaagcaaagcctacagggagtgggaaggaagaggggccggctccctgtaagcagatgaagttagaagcagctggggggccttcagctttaaactttgacagtcccagtagtctctttgaaagtttaatctcgcccatcaagacagagacttttttcaaggaattctgggagcagaagccccttctcattcagagagatgaccctgcactggccacatactatgggtccctgttcaagctaacagatctgaagagtctgtgcagccgggggatgtactatggaagagatgtgaatgtctgccggtgtgtcaatgggaagaagaaggttttaaataaagatggcaaagcacactttcttcagctgagaaaagattttgatcagaaaagggcaacgattcagtttcaccaacctcagagatttaaggatgagctttggaggatccaggagaagctggaatgttactttggctccttggttggctcgaatgtgtacataactcccgcaggatctcagggcctgccgccccattatgatgatgtcgaggttttcatcctgcagctggagggagagaaacactggcgcctctaccaccccactgtgcccctggcacgagagtacagcgtggaggccgaggaaaggatcggcaggccggtgcatgagtttatgctgaagccgggtgatttgttgtactttcccagaggaaccattcatcaagcggacactcctgcggggctggcccactctactcacgtgaccatcagcacctaccagaacaattcatggggagatttccttttggataccatctcggggcttgtatttgatactgcaaaggaagacgtggagttacggaccggcataccccggcagctgctcctgcaggtggaatccacaactgttgctacaagacgattaagtggcttcctgaggacacttgcagaccggctggagggcaccaaagaactgctttcctcagacatgaagaaggattttattatgcacagactccccccttactctgcgggagatggggcagagctgtcaacaccaggtggaaagttaccgaggctggacagtgtagtgagactgcagtttaaagaccacattgtcctcacagtactgccggatcaagatcaatctgatgaagctcaagaaaagatggtgtacatctatcattccttaaagaatagtagagagacacacatgatgggaaatgaggaggaaacagagtttcatggacttcgcttccctttgtcacatttggatgcactgaagcaaatttggaatagtccagctatttctgtcaaggacctgaaacttactacagatgaggaaaaggaaagcctggtattatccctctggacagaatgtttaattcaagtagtctagtgcctttgcagaatcaaatgcctactattttatatgcatatattaaaagaaaagcaaagacctgagccgaggagaggatgaattcaagtttccttacctgcgtatctactaacaaacatgagacctccctgttacaggtggtcagttggccaaatgtactaacgggcacatgaaagaaagaacagcaaattaccaagtgtctcagaaaatgacaaaaccatattttgacaagtttatttaatccagtgtggtagaaaaggcacaattccaatgtatcatttagaattgaatgtcattaacctggctttgttctttggaagaaacaacttctttaaagagcttctttggctctagaaaaatttcaaacaattaaaataagaaaaaattttaaactggttttttataatgaaaatatacatacctttgtgtatagacaagcccatgcccattaaaataaagttatcctgtaacataaattttattaaataatacttccccacagatgagaggcacgcaacacctatggacaaaagggagttacagaggctgcttaaaagatggagaaaagcctgagattgaaggaggaaaaaaacccagtatttaaagtctataaaaaatactcaaaatagtgggtcttcgagtttaaaatagtcattgttattttacattctaaagtgcatgtaggttgatattttttaaaatatcattggagaatttaatctttctttataaaaatagagcatttttctgctttctggcaaaagttggggataaaaggaaaaaaagttgtcaaaatgtaattttcagtccaattcaccaggaaaacatgcttg

SEQ ID NO: 18805 - DNA, 4003 bp, Homo sapiens
  source 1..4003: mol_type = unassigned DNA
atgctccttcaggtaccatgtaattcatggggagatttccttttggataccatctcggggcttgtatttgatactgcaaaggaagacgtggagttacggaccggcataccccggcagctgctcctgcaggtggaatccacaactgttgctacaagacgattaagtggcttcctgaggacacttgcagaccggctggagggcaccaaagaactgctttcctcagacatgaagaaggattttattatgcacagactccccccttactctgcgggagatggggcagagctgtcaacaccaggtggaaagttaccgaggctggacagtgtagtgagactgcagtttaaagaccacattgtcctcacagtactgccggatcaagatcaatctgatgaagctcaagaaaagatggtgtacatctatcattccttaaagaatagtagagagacacacatgatgggaaatgaggaggaaacagagtttcatggacttcgcttccctttgtcacatttggatgcactgaagcaaatttggaatagtccagctatttctgtcaaggacctgaaacttactacagatgaggaaaaggaaagcctggtattatccctctggacagaatgtttaattcaagtagtctagtgcctttgcagaatcaaatgcctactattttatatgcatatattaaaagaaaagcaaagacctgagccgaggagaggatgaattcaagtttccttacctgcgtatctactaacaaacatgagacctccctgttacaggtggtcagttggccaaatgtactaacgggcacatgaaagaaagaacagcaaattaccaagtgtctcagaaaatgacaaaaccatattttgacaagtttatttaatccagtgtggtagaaaaggcacaattccaatgtatcatttagaattgaatgtcattaacctggctttgttctttggaagaaacaacttctttaaagagcttctttggctctagaaaaatttcaaacaattaaaataagaaaaaattttaaactggttttttataatgaaaatatacatacctttgtgtatagacaagcccatgcccattaaaataaagttatcctgtaacataaattttattaaataatacttccccacagatgagaggcacgcaacacctatggacaaaagggagttacagaggctgcttaaaagatggagaaaagcctgagattgaaggaggaaaaaaacccagtatttaaagtctataaaaaatactcaaaatagtgggtcttcgagtttaaaatagtcattgttattttacattctaaagtgcatgtaggttgatattttttaaaatatcattggagaatttaatctttctttataaaaatagagcatttttctgctttctggcaaaagttggggataaaaggaaaaaaagttgtcaaaatgtaattttcagtccaattcaccaggaaaacatgcttgtgaattgtgcagtaaaaggtggtaatgactactggaagctaagtcaaaggtgatttcctacctgattttacttacttaaataaaagttacttacaatgggagtgaaaaactgaggtttctgttatttagtagagaaatcaactccacgtttacttaaagagatggtaaggtcaaggttcaaatgctactgtgttttaatttggatatttgaaatttctcttgaggcaaaaaaaaaaaaaaattgatgcctctccttaaatctaggatgaagtgtcaacatggagacaggtaaccactgttatagagtcttgtcacctaaagggatgtcttggttaacacgtaacagtgcaagtttggccataggttatttatttgtacttttttagtttgaaggactgaggaaacaatagctacagaaaatacttcttgtgccttattcctaacaaagctgaggtccctgcctggggttagttacaagtataaatacttaacgaggtgcgttcattataaaagcctcagtatagaaaccttaaagtttatctaggaaagtttagtatattttcaggtgttgctaaaaaattactcatctgtttgcaaaagtatgacttgacctatagaaatctgtttctttatgctttgtactcatacaagcatctaggtaggatattaataaataatacaggataatagcatcaccagtgtccaataacgggccatcaggaacaggattcacgtttggtggatatgagagaaaataaacacttcaggaaacttgctcaccacagctggagatcaggaatagaacctttccaagatatcataatattttctttataggaacactgagtaatggcaagaatattttgagcttttccatggttaagagcgatagtctcagaggctggagaaaatgttcattctgctcagtgatccaggagtgtgaggacagtagcttcctttccacgtccacaagacaatgacagatgtgtttccttctttgctctttctagggatctttctagggatgttgattctctcacaatatttcaatgtcccatttctgtgtttcttctccctccaggggctgatttacaattacatgagtcttgtcacaataatttcctcctaaaatagaaattccaaaagaaaagattatttgttcaggcaggtgcttagcaatttcacaattttcacaagcttctgttcagctcaccatttcggtggatgaatgtgtcatttacaaagaagtctgaaatgggaagctgagtttgaacaggcttagccattattcacctcaaattggaccttattatgactcaaattgaaatactaaaaggtataatacatgattgtataagtggcgtgccttaatgtgattctttagaacaaagtgctcttgagagaactctggctgaatgtcaggtactgtgtttttgtttctacaccaacaaaactgtgactaacccaattaaagcaacagccatgaataatattggccctgaccttgctgaattcaaaaacaaggttaattgatacctaccataaattctacctgagggtttttaaggaccatggcaattcctggcaaaaagctagagatgtttctaagaaacagatgacattcatttcatggtttatggtgcttgaaatttagaactgttctgagttcacgtagcaaatgaaagttttacaactgtactaatgaacaaaaaccctaagctttgttgtttggctttttctgctaattgttttgtttgtaaaactgcctatcttaattttcttcaagcataattttaaatgacttaacatttctcttatacataaggatgtcctttacccaaaatgaggagatttggaactgaaactaatatccagggacacaacattgggtatcatcaaaggcccacctttaacatcaaggacaagttgatcactgagataagagctgatagttccatttttattcagtctccacttctgcctgaattgcccatgttcagtccatagagctactttagctccaggtgtgtcccggccaccaatcacatcaagacatgtatcactggcctaaaagggttaagaaatgattaattggcagtagtatgtttgctaaagtaagttgaattaggtcccttttatcttaggtaaacaagtcatagacatgaagtgtgtgtgtgtcttatctaaaaaaatactatatagtataatttcagtaagccttttttaatgtcttctttacggctgtgggtaggagatggtacagaaataaaccaactgaaatagaggtacttgtttttaataggatgtctacatctgacaacagatgttcaataaagatttggtgaattggaattaaatgttaaatccctgtttgcttaaaacgtattatgttgagcttggttttcttatgaaaacattgcatgatgggctaaagatatccagacaataattacttttaaaagtttttcatttttgaagcatgagaaaaagtagataatccattggtgatacaataaaacacagtttgaatgttt

SEQ ID NO: 18806 - DNA, 664 bp, Homo sapiens
  source 1..664: mol_type = unassigned DNA
gcttccaattcatttaccagcaaataattccgcaacgattggccgacagctgggttgtccaacaggttactgagaccaggttattcactgttttcaggaaggatagactgggaggaagaggatctgatttcgccactcattagctgtaaatctggtgcctcgggtttcatgtcactgggctcatctttgagcagaggaacctgatttactcagcttcttctgctggtactggtttttgcctcctggacatcaagctttgtaacctcatggtcacgaaaatacattgaggtttgcatttccttactgctttgtcttgaagacagaacgatgccaaagaaagcaaagcctacagggagtgggaaggaagaggggccggctccctgtaagcagatgaagttagaagcagctggggggccttcagctttaaactttgacagtcccagtagtctctttgaaagtttaatctcgcccatcaagacagagacttttttcaaggaattctgggagcagaagccccttctcattcagagagatgaccctgcactggccacatactatgggtccctgttcaagctaacagatctgaagagtctgtgcagccgggggatgtactatggaagagatgtgaatgtctgccggtgtgtcaatgggaagaagaaggttt

SEQ ID NO: 18807 - DNA, 2777 bp, Homo sapiens
  source 1..2777: mol_type = unassigned DNA
ttcctccctcccgccggccggggtgcgcgggcggcggggcggcccgcgggccatgcgttcggcgcggcccagcccggccggccgggggcggcgccccgagcccgggccccgcgcggcccgcgcccccggcccccgctgagccccgggggccccgctgcggccgaggccatgttcccggtgtttccttgcacgctgctggccccccccttccccgtgctgggcctggactcccggggggtgggcggcctcatgaactccttcccgccacctcagggtcacgcccagaaccccctgcaggtcggggctgagctccagtcccgcttctttgcctcccagggctgcgcccagagtccattccaggccgcgccggcgcccccgcccacgccccaggccccggcggccgagcccctccaggtggacttgctcccggtgctcgccgccgcccaggagtccgccgcggctgctgcggccgctgccgccgctgctgccgccgtcgctgccgcgcccccggcccctgccgccgcctctacggtggacacagcggccctgaagcagcctccggcgccccctccgccacccccgccagtgtcggcgcccgcggccgaggccgcgccccccgcctccgccgccactatcgccgcggcggcggccaccgccgtcgtagccccaacctcgacggtcgccgtggccccggtcgcgtctgccttggagaagaagacaaagagcaaggggccctacatctgcgctctgtgcgccaaggagttcaagaacggctacaatctccggaggcacgaagccatccacacgggagccaaggccggccgggtcccctcgggtgctatgaagatgccgaccatggtgcccctgagcctcctgagcgtgccccagctgagcggagccggcgggggagggggagaggcgggtgccggcggcggcgctgccgcagtggccgccggtggcgtggtgaccacgaccgcctcggggaagcgcatccggaagaaccatgcctgcgagatgtgtggcaaggccttccgcgacgtctaccacctgaaccgacacaagctgtcgcactcggacgagaagccctaccagtgcccggtgtgccagcagcgcttcaagcgcaaggaccgcatgagctaccacgtgcgctcacatgacggcgctgtgcacaagccctacaactgctcccactgtggcaagagcttctcccggccggatcacctcaacagtcacgtcagacaagtgcactcaacagaacggcccttcaaatgtgagaaatgtgaggcagctttcgccacgaaggatcggctgcgggcgcacacagtacgacacgaggagaaagtgccatgtcacgtgtgtggcaagatgctgagctcggcttatatttcggaccacatgaaggtgcacagccagggtcctcaccatgtctgtgagctctgcaacaaaggcttcaccacggcagcatacctgcgcatccacgcggtgaaggaccacgggctccaggccccgcgggctgaccgcatcctgtgcaagctgtgcagcgtgcactgcaagacccctgcccagctggccggccacatgcagacccatctggggggggccgccccccctgtcccgggagacgccccccagccacagcccacctgctgagggggacccccgcacccaccaggtactggtgaggtttgtccaatggcggcggcagcggcagcggcggcagcggcagcagcggcagcagtagcagcccctcccacagctgtgggctccctctcgggggcggagggggtgcctgtgagctctcagccacttccctcccaaccctggtgagctccaagttggttgcgggggagaggggagaatggagtagagtcccttggtacaagctcctctcccccctcttttcccaccaactcctatttccctaccaaccaaggagcctccagaaggaaaggaggaagaaatgttttcttaggggaattcgctaggttttaacgatttgtttctcctgctcctcttctgtcagacctgaccccacacaaacctgtcccctcggttgtgttgaagtcccctggacagtgggcaggggtggcagaggacacgagcagccactgcccgtaccccctctcctctctgtaagcccatgccctgtcttcccagggacttgtgagcctcttccctcgacggtcctcttctctccttccagtcctctccccctgctgtctgcagcccctccccggggagttggtgctttcttttccttttttttttttttccagggggagggaggagaggaaggagggggatcagagctgtcccaaagagggaaagcggtgaggtttgaggaggggcagaagcagggccggcaaaggttgtaccttcataaggtggtatggggggttggggtcaggccctgaacatcgtcctacttgagaatctgtcaggggaaaaagtcaaggggagcaggaggaagagccaggagggccagaggcagagaagagatggagtcttaggggccagggtgagcgaggggtccagggcctagaggtgcttcctgggggcgggggaatgcagccagtgtccccctcccctcttccaccccagctccagccctggtcttgtcttttcatccctcttccccacgacagaagaagttgtggccctggccatgtcatcgtgttcctgtgtcccctgcatgtaccccaccctccaccccttccttttgcgcggaccccattacaataaattttaaataaaatcctgtttctggctctggattg

SEQ ID NO: 18808 - DNA, 2552 bp, Homo sapiens
  source 1..2552: mol_type = unassigned DNA
ttcctccctcccgccggccggggtgcgcgggcggcggggcggcccgcgggccatgcgttcggcgcggcccagcccggccggccgggggcggcgccccgagcccgggccccgcgcggcccgcgcccccggcccccgctgagccccgggggccccgctgcggccgaggccatgttcccggtgtttccttgcacgctgctggccccccccttccccgtgctgggcctggactcccggggggtgggcggcctcatgaactccttcccgccacctcagggtcacgcccagaaccccctgcaggtcggggctgagctccagtcccgcttctttgcctcccagggctgcgcccagagtccattccaggccgcgccggcgcccccgcccacgccccaggccccggcggccgagcccctccaggtggacttgctcccggtgctcgccgccgcccaggagtccgccgcggctgctgcggccgctgccgccgctgctgccgccgtcgctgccgcgcccccggcccctgccgccgcctctacggtggacacagcggccctgaagcagcctccggcgccccctccgccacccccgccagtgtcggcgcccgcggccgaggccgcgccccccgcctccgccgccactatcgccgcggcggcggccaccgccgtcgtagccccaacctcgacggtcgccgtggccccggtcgcgtctgccttggagaagaagacaaagagcaaggggccctacatctgcgctctgtgcgccaaggagttcaagaacggctacaatctccggaggcacgaagccatccacacgggagccaaggccggccgggtcccctcgggtgctatgaagatgccgaccatggtgcccctgagcctcctgagcgtgccccagctgagcggagccggcgggggagggggagaggcgggtgccggcggcggcgctgccgcagtggccgccggtggcgtggtgaccacgaccgcctcggggaagcgcatccggaagaaccatgcctgcgagatgtgtggcaaggccttccgcgacgtctaccacctgaaccgacacaagctgtcgcactcggacgagaagccctaccagtgcccggtgtgccagcagcgcttcaagcgcaaggaccgcatgagctaccacgtgcgctcacatgacggcgctgtgcacaagccctacaactgctcccactgtggcaagagcttctcccggccggatcacctcaacagtcacgtcagacaagtgcactcaacagaacggcccttcaaatgtgagaaatgtgaggcagctttcgccacgaaggatcggctgcgggcgcacacagtacgacacgaggagaaagtgccatgtcacgtgtgtggcaagatgctgagctcggcttatatttcggaccacatgaaggtgcacagccagggtcctcaccatgtctgtgagctctgcaacaaaggtactggtgaggtttgtccaatggcggcggcagcggcagcggcggcagcggcagcagcggcagcagtagcagcccctcccacagctgtgggctccctctcgggggcggagggggtgcctgtgagctctcagccacttccctcccaaccctggtgagctccaagttggttgcgggggagaggggagaatggagtagagtcccttggtacaagctcctctcccccctcttttcccaccaactcctatttccctaccaaccaaggagcctccagaaggaaaggaggaagaaatgttttcttaggggaattcgctaggttttaacgatttgtttctcctgctcctcttctgtcagacctgaccccacacaaacctgtcccctcggttgtgttgaagtcccctggacagtgggcaggggtggcagaggacacgagcagccactgcccgtaccccctctcctctctgtaagcccatgccctgtcttcccagggacttgtgagcctcttccctcgacggtcctcttctctccttccagtcctctccccctgctgtctgcagcccctccccggggagttggtgctttcttttccttttttttttttttccagggggagggaggagaggaaggagggggatcagagctgtcccaaagagggaaagcggtgaggtttgaggaggggcagaagcagggccggcaaaggttgtaccttcataaggtggtatggggggttggggtcaggccctgaacatcgtcctacttgagaatctgtcaggggaaaaagtcaaggggagcaggaggaagagccaggagggccagaggcagagaagagatggagtcttaggggccagggtgagcgaggggtccagggcctagaggtgcttcctgggggcgggggaatgcagccagtgtccccctcccctcttccaccccagctccagccctggtcttgtcttttcatccctcttccccacgacagaagaagttgtggccctggccatgtcatcgtgttcctgtgtcccctgcatgtaccccaccctccaccccttccttttgcgcggaccccattacaataaattttaaataaaatcctgtttctggctctggattg

SEQ ID NO: 18809 - DNA, 991 bp, Homo sapiens
  source 1..991: mol_type = unassigned DNA
aaggagttcaagaacggctacaatctccggaggcacgaagccatccacacgggagccaaggccggccgggtcccctcgggtgctatgaagatgccgaccatggtgcccctgagcctcctgagcgtgccccagctgagcggagccggcgggggagggggagaggcgggtgccggcggcggcgctgccgcagtggccgccggtggcgtggtgaccacgaccgcctcggggaagcgcatccggaagaaccatgcctgcgagatgtgtggcaaggccttccgcgacgtctaccacctgaaccgacacaagctgtcgcactcggacgagaagccctaccagtgcccggtgtgccagcagcgcttcaagcgcaaggaccgcatgagctaccacgtgcgctcacatcggcgctgtgcaaagccctacaactgctcccactgtggcaagagcttctcccggccggatcacctcaacagtcacgtcagacaagtgcactcaacagaacggcccttcaaatgtgagaaatgtgaggcagctttcgccacgaaggatcggctgcgggcgcacacagtacgacacgaggagaaagtgccatgtcacgtgtgtggcaagatgctgagctcggcttatatttcggaccacatgaaggtgcacagccagggtcctcaccatgtctgtgagctctgcaacaaaggtactggtgaggtttgtccaatggcggcggcagcggcagcggcggcagcggcagcagcggcagcagtagcagcccctcccacagctgtgggctccctctcgggggcggagggggtgcctgtgagctctcagccacttccctcccaaccctggtgagctccaagttggttgcgggggagaggggagaatggagtagagtcccttggtacaagctcctctcccccctcttttcccaccaactcctatttccctaccaaccaaggagcctccagaaggaaaggaggaagaaatgttttcttagggg

SEQ ID NO: 18810 - DNA, 2333 bp, Homo sapiens
  source 1..2333: mol_type = unassigned DNA
ccagggtgagcgcgagccacctccctccctccctccgccatggatcccagcaactggagcagcttcatcttccagggtcacgcccagaaccccctgcaggtcggggctgagctccagtcccgcttctttgcctcccagggctgcgcccagagtccattccaggccgcgccggcgcccccgcccacgccccaggccccggcggccgagcccctccaggtggacttgctcccggtgctcgccgccgcccaggagtccgccgcggctgctgcggccgctgccgccgctgctgccgccgtcgctgccgcgcccccggcccctgccgccgcctctacggtggacacagcggccctgaagcagcctccggcgccccctccgccacccccgccagtgtcggcgcccgcggccgaggccgcgccccccgcctccgccgccactatcgccgcggcggcggccaccgccgtcgtagccccaacctcgacggtcgccgtggccccggtcgcgtctgccttggagaagaagacaaagagcaaggggccctacatctgcgctctgtgcgccaaggagttcaagaacggctacaatctccggaggcacgaagccatccacacgggagccaaggccggccgggtcccctcgggtgctatgaagatgccgaccatggtgcccctgagcctcctgagcgtgccccagctgagcggagccggcgggggagggggagaggcgggtgccggcggcggcgctgccgcagtggccgccggtggcgtggtgaccacgaccgcctcggggaagcgcatccggaagaaccatgcctgcgagatgtgtggcaaggccttccgcgacgtctaccacctgaaccgacacaagctgtcgcactcggacgagaagccctaccagtgcccggtgtgccagcagcgcttcaagcgcaaggaccgcatgagctaccacgtgcgctcacatgacggcgctgtgcacaagccctacaactgctcccactgtggcaagagcttctcccggccggatcacctcaacagtcacgtcagacaagtgcactcaacagaacggcccttcaaatgtgagaaatgtgaggcagctttcgccacgaaggatcggctgcgggcgcacacagtacgacacgaggagaaagtgccatgtcacgtgtgtggcaagatgctgagctcggcttatatttcggaccacatgaaggtgcacagccagggtcctcaccatgtctgtgagctctgcaacaaaggtactggtgaggtttgtccaatggcggcggcagcggcagcggcggcagcggcagcagcggcagcagtagcagcccctcccacagctgtgggctccctctcgggggcggagggggtgcctgtgagctctcagccacttccctcccaaccctggtgagctccaagttggttgcgggggagaggggagaatggagtagagtcccttggtacaagctcctctcccccctcttttcccaccaactcctatttccctaccaaccaaggagcctccagaaggaaaggaggaagaaatgttttcttaggggaattcgctaggttttaacgatttgtttctcctgctcctcttctgtcagacctgaccccacacaaacctgtcccctcggttgtgttgaagtcccctggacagtgggcaggggtggcagaggacacgagcagccactgcccgtaccccctctcctctctgtaagcccatgccctgtcttcccagggacttgtgagcctcttccctcgacggtcctcttctctccttccagtcctctccccctgctgtctgcagcccctccccggggagttggtgctttcttttccttttttttttttttccagggggagggaggagaggaaggagggggatcagagctgtcccaaagagggaaagcggtgaggtttgaggaggggcagaagcagggccggcaaaggttgtaccttcataaggtggtatggggggttggggtcaggccctgaacatcgtcctacttgagaatctgtcaggggaaaaagtcaaggggagcaggaggaagagccaggagggccagaggcagagaagagatggagtcttaggggccagggtgagcgaggggtccagggcctagaggtgcttcctgggggcgggggaatgcagccagtgtccccctcccctcttccaccccagctccagccctggtcttgtcttttcatccctcttccccacgacagaagaagttgtggccctggccatgtcatcgtgttcctgtgtcccctgcatgtaccccaccctccaccccttccttttgcgcggaccccattacaataaattttaaataaaat

SEQ ID NO: 18811 - DNA, 3186 bp, Homo sapiens
  source 1..3186: mol_type = unassigned DNA
tggtgacgtcacggcgctcgtcggcgccgcctgtggcgtcacaggccgggcccgcagggctttctaggggtccgtcgctcttgaagccgccggcggcgggcgcgtgcgcggcccgatgaagaaggaggtttccaagccgtctccgcccaagttgatcggtggatgcgcgcccccgcgcggggcaccggttgctgtggacgcagtggcggccgttggctggcgggtgcggcgcagcctcggtgtctctgggccggcggtgcagggcaacgtttcatggtgccgggcggcaccatgaagtctctaaagaaggattcccgcctcagaataactccgaccagattattagaggcctcagagaatgtcaaagaaaagaagcgggcaaagggacctgaacaacccacacccacaattcaggaagagcctgaacctgttagcaatgtcctacaaggagatgacattcttgccttggccattaagaaggaagacttgaaggagcaacacattcctcgccttactgaaaaggaagataaacgtgtcatcacccagaaatttatcatccgtaaactcaaacccatggatcctaggaggaaggtctgccaccttgtagcacgtcctgcgaatcctgatgaagccacaaagcctctggactactccggtcccggtgacagcttcgatggcagtgaccagatcctgccccaccacatcttggggagtctccaggattttaagagaattgcacttgctcgagggaacacccagctggctgagcggatacctacctcaccctgtctgatgaccctcatctctgctgaaggagagtcaaagcaaaaagccccaaaagaagagaagagacctccctgggccccacctcctcagcacaactttctgaaaaactggcagcgtaacacagccctgcggaagaagcagcaggaagccctcagcgaacacctaaagaagccagtgagtgagctgctcatgcacaccggggagacctacagacggatccaggaggagcgggagctcattgactgcacacttccaacccggcgtgataggaaaagctgggagaacagtgggttctggagtcgactggaatacttgggagatgagatgacaggtctggtcatgaccaagacaaaaactcagcgtggcctcatggagcccatcactcacatcaggaagccccactccatccgggtggagacaggattaccagcccagagggacgcttcataccgctacacctgggatcggagtctgtttctgatctaccgacgcaaggagctgcagagaatcatggaagagctggatttcagccagcaggatattgatggcctggaggtggtgggcaaagggtggcccttctcggctgttactgtggaagactacacagtgtttgaaagaagtcagggaagctcctctgaagacacagcatacttaggcacattggccagttcctctgatgtctccatgcctattctcggcccttctctgctgttctgtgggaagccagcttgctggatcagaggcagtaatccacaggacaagaggcaggttgggattgctgctcacttgacctttgaaaccctagaaggcgagaaaacctcctcagaactgactgtggtcaataatggcaccgtggccatttggtatgactggcgacggcagcaccagccggacactttccaagaccttaagaaaaacaggatgcagcgattttactttgacaaccgggaaggtgtgattctgcctggagaaattaaaacatttaccttcttcttcaagtctttgactgctggggtcttcagggaattttgggagtttcgaacccatcctactctattaggaggtgctatactgcaggtcaatctccacgcggtctccctgacccaggacgtttttgaggatgagaggaaagtactggagagcaagctgactgcccatgaggcagtcaccgtcgttcgcgaagtgctgcaggagctgctgatgggggtcttgaccccggagcgcacaccatcacctgtggatgcctatctcaccgaggaagacttgttccggcacagaaatcctccgctgcattatgagcaccaagtggtgcaaagcctgcaccaactgtggcgccagtacatgaccctgcccgccaaggctgaggaggccaggccaggggacaaggagcacgtcagccccatagccacagagaaggcctctgtgaatgctgagctgttaccacgctttaggagccccatctccgaaactcaagtgccccggcctgagaacgaggccctcagggaatccgggtcccagaaggccagagtggggaccaagagtcctcagcggaagagcatcatggaggagatcctggtggaggaaagcccagatgtggacagcaccaagagcccctgggagccggatggccttcccctgctggagtggaacctctgcttggaggacttcagaaaggcagtgatggtgctccctgatgagaaccacagagaggatgcgttgatgaggctcaacaaagcagccctggagctgtgccagaagccaaggccattgcagtccaacctcctgcaccagatgtgtttgcagctgtggcgagatgtgattgacagcctggtgggccattccatgtggctgaggtctgtgctgggcctgcctgagaaggagaccatctatttgaatgtgcctgaagagcaagatcaaaaatcacctcctatcatggaagtgaaggtacctgtggggaaagctgggaaggaggagcggaaaggagcagcccaggaaaagaagcaactggggatcaaagacaaagaagacaagaaaggagccaagctgctcgggaaagaggaccgtcccaacagcaagaagcacaaggcaaaggatgacaagaaagtcataaaatctgcaagtcaggacaggttttctttggaagaccctacccctgacatcatcctctcttctcaagaacccatagaccccctggtcatggggaaatacacccagagcctgcacagtgaggtccgtgggctgctggacaccctggtgactgacctgatggtcctggctgatgagctcagccccataaagaatgtcgaggaggctttgcgcctctgcaggtgactctcgggcccaagcaaccttctggaaaacgggttaataaataaatcaataaagaaccttcaagtttct

SEQ ID NO: 18812 - DNA, 3111 bp, Homo sapiens
  source 1..3111: mol_type = unassigned DNA
ggtgtctctgggccggcggtgcagggcaacgtttcatggtgccgggcggcaccatgaagtctctaaagaaggattcccgcctcagaataactccgaccagattattagaggcctcagagaatgtcaaagaaaagaagcgggcaaagggacctgaacaacccacacccacaattcaggaagagcctgaacctgttagcaatgtcctacaaggagatgacattcttgccttggccattaagaaggaagacttgaaggagcaacacattcctcgccttactgaaaaggaagataaacgtgtcatcacccagaaatttatcatccgtaaactcaaacccatggatcctaggaggaaggtctgccaccttgtagcacgtcctgcgaatcctgatgaagccacaaagcctctggactactccggtcccggtgacagcttcgatggcagtgaccagatcctgccccaccacatcttggggagtctccaggattttaagagaattgcacttgctcgagggaacacccagctggctgagcggatacctacctcaccctgtctgatgaccctcatctctgctgaaggagagtcaaagcaaaaagccccaaaagaagagaagagacctccctgggccccacctcctcagcacaactttctgaaaaactggcagcgtaacacagccctgcggaagaagcagcaggaagccctcagcgaacacctaaagaagccagtgagtgagctgctcatgcacaccggggagacctacagacggatccaggaggagcgggagctcattgactgcacacttccaacccggcgtgataggaaaagctgggagaacagtgggttctggagtcgactggaatacttgggagatgagatgacaggtctggtcatgaccaagacaaaaactcagcgtggcctcatggagcccatcactcacatcaggaagccccactccatccgggtggagacaggattaccagcccagagggacgcttcataccgctacacctgggatcggagtctgtttctgatctaccgacgcaaggagctgcagagaatcatggaagagctggatttcagccagcaggatattgatggcctggaggtggtgggcaaagggtggcccttctcggctgttactgtggaagactacacagtgtttgaaagaagtcagggaagctcctctgaagacacagcatacttaggcacattggccagttcctctgatgtctccatgcctattctcggcccttctctgctgttctgtgggaagccagcttgctggatcagaggcagtaatccacaggacaagaggcaggttgggattgctgctcacttgacctttgaaaccctagaaggcgagaaaacctcctcagaactgactgtggtcaataatggcaccgtggccatttggtatgactggcgacggcagcaccagccggacactttccaagaccttaagaaaaacaggatgcagcgattttactttgacaaccgggaaggtgtgattctgcctggagaaattaaaacatttaccttcttcttcaagtctttgactgctggggtcttcagggaattttgggagtttcgaacccatcctactctattaggaggtgctatactgcaggtcaatctccacgcggtctccctgacccaggacgtttttgaggatgagaggaaagtactggagagcaagctgactgcccatgaggcagtcaccgtcgttcgcgaagtgctgcaggagctgctgatgggggtcttgaccccggagcgcacaccatcacctgtggatgcctatctcaccgaggaagacttgttccggcacagaaatcctccgctgcattatgagcaccaagtggtgcaaagcctgcaccaactgtggcgccagtacatgaccctgcccgccaaggctgaggaggccaggccaggggacaaggagcacgtcagccccatagccacagagaaggcctctgtgaatgctgagctgttaccacgctttaggagccccatctccgaaactcaagtgccccggcctgagaacgaggccctcagggaatccgggtcccagaaggccagagtggggaccaagagtcctcagcggaagagcatcatggaggagatcctggtggaggaaagcccagatgtggacagcaccaagagcccctgggagccggatggccttcccctgctggagtggaacctctgcttggaggacttcagaaaggcagtgatggtgctccctgatgagaaccacagagaggatgcgttgatgaggctcaacaaagcagccctggagctgtgccagaagccaaggccattgcagtccaacctcctgcaccagatgtgtttgcagctgtggcgagatgtgattgacagcctggtgggccattccatgtggctgaggtctgtgctgggcctgcctgagaaggagaccatctatttgaatgtgcctgaagagcaagatcaaaaatcacctcctatcatggaagtgaaggtacctgtggggaaagctgggaaggaggagcggaaaggagcagcccaggaaaagaagcaactggggatcaaagacaaagaagacaagaaaggagccaagctgctcgggaaagaggaccgtcccaacagcaagaagcacaaggcaaaggatgacaagaaagtcataaaatctgcaagtcaggacaggttttctttggaagaccctacccctgacatcatcctctcttctcaagaacccatagaccccctggtcatggggaaatacacccagagcctgcacagtgaggtgcatcctggcagatgcgttccttgggagaacaccatgcagggtgcattcccatcaactaccaggtgcggtggctcgtgcctgtaatcccagcactttgggaggccaaggtgggcagattgcctgagctcaggagttcaagaccagcctgggcaacatggtccgtgggctgctggacaccctggtgactgacctgatggtcctggctgatgagctcagccccataaagaatgtcgaggaggctttgcgcctctgcaggtgactctcgggcccaagcaaccttctggaaaacgggttaataaataaatcaataaagaaccttcaagtttctact

SEQ ID NO: 18813 - DNA, 2390 bp, Homo sapiens
  source 1..2390: mol_type = unassigned DNA
aagtgggggcctagaccctggaaggcaggggactgcgagctgggctggcggagcagaggtgcagaagcaactgagtccaagttgtctggcggcttcaggtggacccagaagacgtccccaactcagggagattcagcgatcactcactcgctgtacagaatgatattcctcacggcactgcctctgttctggattatgatttcagcctcccgagggggtcactggggtgcctggatgccctcgtccatctcggccttcgaaggcacgtgcgtctccatcccctgccgctttgacttcccggatgagctgcggcccgctgtggtgcatggtgtctggtacttcaatagcccctaccccaagaactaccccccggtggtcttcaagtcgcgcacccaagtagtccacgagagcttccagggccgcagccgcctcctgggggacctgggcctgcgaaactgcaccctcctgctcagcaacgtcagccccgagctgggcgggaagtactacttccgtggggacctgggcggctacaaccagtacaccttctcagagcacagcgtcctggatatcgtcaacacccccaacatcgtggtgcccccagaggtggtggcaggcacggaggtggaggtcagctgcatggtgccggacaactgcccagagctgcgccctgagctgagctggctgggccacgaggggctgggggagcccgctgtgctgggccggctgcgggaggacgagggcacctgggtgcaggtgtcactgctgcacttcgtgcccacgagggaggccaacggccacaggctgggctgccaggcctccttccccaacaccaccctgcagttcgagggctacgccagcatggacgtcaagtaccccccggtgattgtggagatgaactcctcggtggaggccatcgagggctcccacgtgagcctgctctgtggggctgacagcaaccccccgccgctgctgacctggatgcgggacgggacagtcctccgggaggcggtggccgagagcctgctcctggagctggaggaggtgacccccgccgaagacggcgtctatgcctgcctggccgagaatgcctatggccaggacaaccgcaccgtggggctcagtgtcatgtatgcaccctggaagccaacagtgaacgggacaatggtggccgtagagggggagacggtctctatcttgtgctccacacagagcaacccggaccctattctcaccatcttcaaggagaagcagatcctgtccacggtcatctacgagagcgagctgcagctggagctgccggccgtgtcacccgaggatgatggagagtactggtgtgtggctgagaaccagtatggccagagggccaccgccttcaacctgtctgtggagttcgcccctgtgctcctcctggagtcccactgcgcggcagcccgagacacggtgcagtgcctgtgcgtggtgaagtccaacccggagccgtccgtggcctttgagctgccatcgcgcaatgtgaccgtgaacgagagcgagcgggagttcgtgtactcggagcgcagcggcctcgtgctcaccagcatcctcacgctgcgggggcaggcccaggccccgccccgcgtcatctgcaccgcgaggaacctctatggcgccaagagcctggagctgcccttccagggagcccatcgactgatgtgggccaagatcgggcctgtgggcgccgtggtcgcctttgccatcctgattgccatcgtctgctacattacccagacacgcaggaaaaagaacgtgacagagagccccagcttctcggcaggggacaaccctcccgtcctgttcagcagcgacttccgcatctctggggcaccagagaagtacgagagcgagaggcgcctgggatctgagaggaggctgctgggccttcggggtgagcccccagagctggacctgagctattctcactcggacctggggaaacggcccaccaaggacagctacacgctgacggaggagctagctgagtatgctgaaatccgggtcaagtgaaggagctgggggcagcctgcgtggctgacccccctcaggaccctcgctggcccccactggctgtgggctcccttcctcccaaaagtatcgggggctggggcaggaggggagtgaggcaggtgacagtgaggtcctgggggcctgacctccccctccttcccagctgcccctccctgccagcacccccacgccctcattacggctcctctctaacctcctttaccctcatctgtctggaggggagctctgtctgtccgtgttatttattgctacttcctgcctggtctcctgcccccacacctggccctggggcctgtacaaaagggacatgaaataaatgccccaaagcc

SEQ ID NO: 18814 - DNA, 2426 bp, Homo sapiens
  source 1..2426: mol_type = unassigned DNA
cctagaccctggaaggcaggggactgcgagctgggctggcggagcagaggtgcagaagcaactgagtccaagttgtctggcggcttcaggtggacccagaagacgtccccaactcagggagattcagcgatcactcactcgctgtacagaatgatattcctcacggcactgcctctgttctggattatgatttcagcctcccgagggggtcactggggtgcctggatgccctcgtccatctcggccttcgaaggcacgtgcgtctccatcccctgccgctttgacttcccggatgagctgcggcccgctgtggtgcatggtgtctggtacttcaatagcccctaccccaagaactaccccccggtggtcttcaagtcgcgcacccaagtagtccacgagagcttccagggccgcagccgcctcctgggggacctgggcctgcgaaactgcaccctcctgctcagcaacgtcagccccgagctgggcgggaagtactacttccgtggggacctgggcggctacaaccagtacaccttctcagagcacagcgtcctggatatcgtcaacacccccaacatcgtggtgcccccagaggtggtggcaggcacggaggtggaggtcagctgcatggtgccggacaactgcccagagctgcgccctgagctgagctggctgggccacgaggggctgggggagcccgctgtgctgggccggctgcgggaggacgagggcacctgggtgcaggtgtcactgctgcacttcgtgcccacgagggaggccaacggccacaggctgggctgccaggcctccttccccaacaccaccctgcagttcgagggctacgccagcatggacgtcaagtaccccccggtgattgtggagatgaactcctcggtggaggccatcgagggctcccacgtgagcctgctctgtggggctgacagcaaccccccgccgctgctgacctggatgcgggacgggacagtcctccgggaggcggtggccgagagcctgctcctggagctggaggaggtgacccccgccgaagacggcgtctatgcctgcctggccgagaatgcctatggccaggacaaccgcaccgtggggctcagtgtcatgtatgcaccctggaagccaacagtgaacgggacaatggtggccgtagagggggagacggtctctatcttgtgctccacacagagcaacccggaccctattctcaccatcttcaaggagaagcagatcctgtccacggtcatctacgagagcgagctgcagctggagctgccggccgtgtcacccgaggatgatggagagtactggtgtgtggctgagaaccagtatggccagagggccaccgccttcaacctgtctgtggagttcgcccctgtgctcctcctggagtcccactgcgcggcagcccgagacacggtgcagtgcctgtgcgtggtgaagtccaacccggagccgtccgtggcctttgagctgccatcgcgcaatgtgaccgtgaacgagagcgagcgggagttcgtgtactcggagcgcagcggcctcgtgctcaccagcatcctcacgctgcgggggcaggcccaggccccgccccgcgtcatctgcaccgcgaggaacctctatggcgccaagagcctggagctgcccttccagggagcccatcgactgatgtgggccaagatcgggcctgtgggcgccgtggtcgcctttgccatcctgattgccatcgtctgctacattacccagacacgcaggaaaaagaacgtgacagagagccccagcttctcggcaggggacaaccctcccgtcctgttcagcagcgacttccgcatctctggggcaccagagaagtacgagtccaaagaggtttctaccctggaatctcactgagtgccccaggagagcgagaggcgcctgggatctgagaggaggctgctgggccttcggggtgagcccccagagctggacctgagctattctcactcggacctggggaaacggcccaccaaggacagctacacgctgacggaggagctagctgagtatgctgaaatccgggtcaagtgaaggagctgggggcagcctgcgtggctgacccccctcaggaccctcgctggcccccactggctgtgggctcccttcctcccaaaagtatcgggggctggggcaggaggggagtgaggcaggtgacagtgaggtcctgggggcctgacctccccctccttcccagctgcccctccctgccagcacccccacgccctcattacggctcctctctaacctcctttaccctcatctgtctggaggggagctctgtctgtccgtgttatttattgctacttcctgcctggtctcctgcccccacacctggccctggggcctgtacaaaagggacatgaaataaatgccccaaagcc

SEQ ID NO: 18815 - DNA, 2380 bp, Homo sapiens
  source 1..2380: mol_type = unassigned DNA
ctagaccctggaaggcaggggactgcgagctgggctggcggagcagaggtgcagaagcaactgagtccaagttgtctggcggcttcaggtggacccagaagacgtccccaactcagggagattcagcgatcactcactcgctgtacagaatgatattcctcacggcactgcctctgttctggattatgatttcagcctcccgagggggtcactggggtgcctggatgccctcgtccatctcggccttcgaaggcacgtgcgtctccatcccctgccgctttgacttcccggatgagctgcggcccgctgtggtgcatggtgtctggtacttcaatagcccctaccccaagaactaccccccggtggtcttcaagtcgcgcacccaagtagtccacgagagcttccagggccgcagccgcctcctgggggacctgggcctgcgaaactgcaccctcctgctcagcaacgtcagccccgagctgggcgggaagtactacttccgtggggacctgggcggctacaaccagtacaccttctcagagcacagcgtcctggatatcgtcaacacccccaacatcgtggtgcccccagaggtggtggcaggcacggaggtggaggtcagctgcatggtgccggacaactgcccagagctgcgccctgagctgagctggctgggccacgaggggctgggggagcccgctgtgctgggccggctgcgggaggacgagggcacctgggtgcaggtgtcactgctgcacttcgtgcccacgagggaggccaacggccacaggctgggctgccaggcctccttccccaacaccaccctgcagttcgagggctacgccagcatggacgtcaagtaccccccggtgattgtggagatgaactcctcggtggaggccatcgagggctcccacgtgagcctgctctgtggggctgacagcaaccccccgccgctgctgacctggatgcgggacgggacagtcctccgggaggcggtggccgagagcctgctcctggagctggaggaggtgacccccgccgaagacggcgtctatgcctgcctggccgagaatgcctatggccaggacaaccgcaccgtggggctcagtgtcatgtatgcaccctggaagccaacagtgaacgggacaatggtggccgtagagggggagacggtctctatcttgtgctccacacagagcaacccggaccctattctcaccatcttcaaggagaagcagatcctgtccacggtcatctacgagagcgagctgcagctggagctgccggccgtgtcacccgaggatgatggagagtactggtgtgtggctgagaaccagtatggccagagggccaccgccttcaacctgtctgtggagttcgcccctgtgctcctcctggagtcccactgcgcggcagcccgagacacggtgcagtgcctgtgcgtggtgaagtccaacccggagccgtccgtggcctttgagctgccatcgcgcaatgtgaccgtgaacgagagcgagcgggagttcgtgtactcggagcgcagcggcctcgtgctcaccagcatcctcacgctgcgggggcaggcccaggccccgccccgcgtcatctgcaccgcgaggaacctctatggcgccaagagcctggagctgcccttccagggagcccatcgactgatgtgggccaagatcgggcctgtgggcgccgtggtcgcctttgccatcctgattgccatcgtctgctacattacccagacacgcaggaaaaagaacgtgacagagagccccagcttctcggcaggggacaaccctcccgtcctgttcagcagcgacttccgcatctctggggcaccagagaagtacgagagcgagaggcgcctgggatctgagaggaggctgctgggccttcggggtgagcccccagagctggacctgagctattctcactcggacctggggaaacggcccaccaaggacagctacacgctgacggaggagctagctgagtatgctgaaatccgggtcaagtgaaggagctgggggcagcctgcgtggctgacccccctcaggaccctcgctggcccccactggctgtgggctcccttcctcccaaaagtatcgggggctggggcaggaggggagtgaggcaggtgacagtgaggtcctgggggcctgacctccccctccttcccagctgcccctccctgccagcacccccacgccctcattacggctcctctctaacctcctttaccctcatctgtctggaggggagctctgtctgtccgtgttatttattgctacttcctgcctggtctcctgcccccacacctggccctggggcctgtacaaaagggacatgaaataaatgccccaaagcc

SEQ ID NO: 18816 - DNA, 2323 bp, Homo sapiens
  source 1..2323: mol_type = unassigned DNA
agaggtgcagaagcaactgagtccaagttgtctggcggcttcaggtggacccagaagacgtccccaactcagggagattcaggtaacggctgacaggtgctggggacctaaaggctttggcccctgagcaggttggagcctcccgagggggtcactggggtgcctggatgccctcgtccatctcggccttcgaaggcacgtgcgtctccatcccctgccgctttgacttcccggatgagctgcggcccgctgtggtgcatggtgtctggtacttcaatagcccctaccccaagaactaccccccggtggtcttcaagtcgcgcacccaagtagtccacgagagcttccagggccgcagccgcctcctgggggacctgggcctgcgaaactgcaccctcctgctcagcaacgtcagccccgagctgggcgggaagtactacttccgtggggacctgggcggctacaaccagtacaccttctcagagcacagcgtcctggatatcgtcaacacccccaacatcgtggtgcccccagaggtggtggcaggcacggaggtggaggtcagctgcatggtgccggacaactgcccagagctgcgccctgagctgagctggctgggccacgaggggctgggggagcccgctgtgctgggccggctgcgggaggacgagggcacctgggtgcaggtgtcactgctgcacttcgtgcccacgagggaggccaacggccacaggctgggctgccaggcctccttccccaacaccaccctgcagttcgagggctacgccagcatggacgtcaagtaccccccggtgattgtggagatgaactcctcggtggaggccatcgagggctcccacgtgagcctgctctgtggggctgacagcaaccccccgccgctgctgacctggatgcgggacgggacagtcctccgggaggcggtggccgagagcctgctcctggagctggaggaggtgacccccgccgaagacggcgtctatgcctgcctggccgagaatgcctatggccaggacaaccgcaccgtggggctcagtgtcatgtatgcaccctggaagccaacagtgaacgggacaatggtggccgtagagggggagacggtctctatcttgtgctccacacagagcaacccggaccctattctcaccatcttcaaggagaagcagatcctgtccacggtcatctacgagagcgagctgcagctggagctgccggccgtgtcacccgaggatgatggagagtactggtgtgtggctgagaaccagtatggccagagggccaccgccttcaacctgtctgtggagttcgcccctgtgctcctcctggagtcccactgcgcggcagcccgagacacggtgcagtgcctgtgcgtggtgaagtccaacccggagccgtccgtggcctttgagctgccatcgcgcaatgtgaccgtgaacgagagcgagcgggagttcgtgtactcggagcgcagcggcctcgtgctcaccagcatcctcacgctgcgggggcaggcccaggccccgccccgcgtcatctgcaccgcgaggaacctctatggcgccaagagcctggagctgcccttccagggagcccatcgactgatgtgggccaagatcgggcctgtgggcgccgtggtcgcctttgccatcctgattgccatcgtctgctacattacccagacacgcaggaaaaagaacgtgacagagagccccagcttctcggcaggggacaaccctcccgtcctgttcagcagcgacttccgcatctctggggcaccagagaagtacgagagcgagaggcgcctgggatctgagaggaggctgctgggccttcggggtgagcccccagagctggacctgagctattctcactcggacctggggaaacggcccaccaaggacagctacacgctgacggaggagctagctgagtatgctgaaatccgggtcaagtgaaggagctgggggcagcctgcgtggctgacccccctcaggaccctcgctggcccccactggctgtgggctcccttcctcccaaaagtatcgggggctggggcaggaggggagtgaggcaggtgacagtgaggtcctgggggcctgacctccccctccttcccagctgcccctccctgccagcacccccacgccctcattacggctcctctctaacctcctttaccctcatctgtctggaggggagctctgtctgtccgtgttatttattgctacttcctgcctggtctcctgcccccacacctggccctggggcctgtacaaaagggacatgaaataaatgccccaaagcc

SEQ ID NO: 18817 - DNA, 2772 bp, Homo sapiens
  source 1..2772: mol_type = unassigned DNA
tgggtgcgcgcccgtccctcggagccgccgccgtcagtcaccgccgccgcgcgccagagagaagcagcctccggccccggcggcccctgtctcccgaccccggaaggcgaagcaggctgcccggggaccccgcgcgtgggcgcttgaagccgagaccagcctgcccgggcctgggcaggcggagcagggccttggaccccgcggcgcccctcggcctcggagcaacgagcgcagcgccgcctctgaagagccaatccattcaggatgggaaaccacgcaggcaaacgagaattaaatgccgagaaggccagtacgaatagtgaaactaacagaggagaatctgaaaaaaagagaaacctgggtgaactttcacggacaacctcagaggacaacgaagtgttcggagaggcagatgcgaaccagaacaatgggacctcctctcaggacacagcggtgactgactccaagcgcacagcggacccgaagaatgcctggcaggatgcccacccagctgacccagggagccgcccccacttgatccgcctcttttcccgagatgccccggggagggaggacaacaccttcaaagacaggccctctgagtccgacgagctccagaccatccaagaagacagtgcagccacctccgagagcctggatgtgatggcgtcacagaagagaccctcccagaggcacggatccaagtacctggccacagcaagtaccatggaccatgccaggcatggcttcctcccaaggcacagagacacgggcatccttgactccatcgggcgcttctttggcggtgacaggggtgcgcccaagcggggctctggcaaggactcacaccacccggcaagaactgctcactacggctccctgccccagaagtcacacggccggacccaagatgaaaaccccgtagtccacttcttcaagaacattgtgacgcctcgcacaccacccccgtcgcagggaaaggggagaggactgtccctgagcagatttagctggggggccgaaggccagagaccaggatttggctacggaggcagagcgtccgactataaatcggctcacaagggattcaagggagtcgatgcccagggcacgctttccaaaatttttaagctgggaggaagagatagtcgctctggatcacccatggctagacgctgaaaacccacctggttccggaatcctgtcctcagcttcttaatataactgccttaaaactttaatcccacttgcccctgttacctaattagagcagatgacccctcccctaatgcctgcggagttgtgcacgtagtagggtcaggccacggcagcctaccggcaatttccggccaacagttaaatgagaacatgaaaacagaaaacggttaaaactgtccctttctgtgtgaagatcacgttccttcccccgcaatgtgcccccagacgcacgtgggtcttcagggggccaggtgcacagacgtccctccacgttcacccctccacccttggactttcttttcgccgtggctgcggcacccttgcgcttttgctggtcactgccatggaggcacacagctgcagagacagagaggacgtgggcggcagagaggactgttgacatccaagcttcctttgtttttttttcctgtccttctctcacctcctaaagtagacttcatttttcctaacaggattagacagtcaaggagtggcttactacatgtgggagcttttggtatgtgacatgcgggctgggcagctgttagagtccaacgtggggcagcacagagagggggccacctccccaggccgtggctgcccacacaccccaattagctgaattcgcgtgtggcagagggaggaaaaggaggcaaacgtgggctgggcaatggcctcacataggaaacagggtcttcctggagatttggtgatggagatgtcaagcaggtggcctctggacgtcaccgttgccctgcatggtggccccagagcagcctctatgaacaacctcgtttccaaaccacagcccacagccggagagtccaggaagacttgcgcactcagagcagaagggtaggagtcctctagacagcctcgcagccgcgccagtcgcccatagacactggctgtgaccgggcgtgctggcagcggcagtgcacagtggccagcactaaccctccctgagaagataaccggctcattcacttcctcccagaagacgcgtggtagcgagtaggcacaggcgtgcacctgctcccgaattactcaccgagacacacgggctgagcagacggccccgtggatggagacaaagagctcttctgaccatatccttcttaacacccgctggcatctcctttcgcgcctccctccctaacctactgacccaccttttgattttagcgcacctgtgattgataggccttccaaagagtcccacgctggcatcaccctccccgaggacggagatgaggagtagtcagcgtgatgccaaaacgcgtcttcttaatccaattctaattctgaatgtttcgtgtgggcttaataccatgtctattaatatatagcctcgatgatgagagagttacaaagaacaaaactccagacacaaacctccaaatttttcagcagaagcactctgcgtcgctgagctgaggtcggctctgcgatccatacgtggccgcacccacacagcacgtgctgtgacgatggctgaacggaaagtgtacactgttcctgaatattgaaataaaacaataaacttttaatggt

SEQ ID NO: 18818 - DNA, 1255 bp, Homo sapiens
  source 1..1255: mol_type = unassigned DNA
agacagtgcagccacctccgagagcctggatgtgatggcgtcacagaagagaccctcccagaggcacggatccaagtacctggccacagcaagtaccatggaccatgccaggcatggcttcctcccaaggcacagagacacgggcatccttgactccatcgggcgcttctttggcggtgacaggggtgcgcccaagcggggctctggcaaggtaccctggctaaagccgggccggagccctctgccctctcatgcccgcagccagcctgggctgtgcaacatgtacaaggactcacaccacccggcaagaactgctcactacggctccctgccccagaagtcacacggccggacccaagatgaaaaccccgtagtccacttcttcaagaacattgtgacgcctcgcacaccacccccgtcgcagggaaagggggccgaaggccagagaccaggatttggctacggaggcagagcgtccgactataaatcggctcacaagggattcaagggagtcgatgcccagggcacgctttccaaaatttttaagctgggaggaagagatagtcgctctggatcacccatggctagacgctgaaaacccacctggttccggaatcctgtcctcagcttcttaatataactgccttaaaactttaatcccacttgcccctgttacctaattagagcagatgacccctcccctaatgcctgcggagttgtgcacgtagtagggtcaggccacggcagcctaccggcaatttccggccaacagttaaatgagaacatgaaaacagaaaacggttaaaactgtccctttctgtgtgaagatcacgttccttcccccgcaatgtgcccccagacgcacgtgggtcttcagggggccaggtgcacagacgtccctccacgttcacccctccacccttggactttcttttcgccgtggctgcggcacccttgcgcttttgctggtcactgccatggaggcacacagctgcagagacagagaggacgtgggcggcagagaggactgttgacatccaagcttcctttgtttttttttcctgtccttctctcacctcctaaagtagacttcatttttcctaacaggattagacagtcaaggagtggcttactacatgtgggagcttttggtatgtgacatgcgggctgggcagctgttagagtccaacgtggggcagcacagagagggggccacctccccaggccgtggctgcccacacaccccaattagctg

SEQ ID NO: 18819 - DNA, 2281 bp, Homo sapiens
  source 1..2281: mol_type = unassigned DNA
aacaccttcaaagacaggccctctgagtccgacgagctccagaccatccaagaagacagtgcagccacctccgagagcctggatgtgatggcgtcacagaagagaccctcccagaggcacggatccaagtacctggccacagcaagtaccatggaccatgccaggcatggcttcctcccaaggcacagagacacgggcatccttgactccatcgggcgcttctttggcggtgacaggggtgcgcccaagcggggctctggcaaggtaccctggctaaagccgggccggagccctctgccctctcatgcccgcagccagcctgggctgtgcaacatgtacaaggactcacaccacccggcaagaactgctcactacggctccctgccccagaagtcacacggccggacccaagatgaaaaccccgtagtccacttcttcaagaacattgtgacgcctcgcacaccacccccgtcgcagggaaaggggagaggactgtccctgagcagatttagctggggggccgaaggccagagaccaggatttggctacggaggcagagcgtccgactataaatcggctcacaagggattcaagggagtcgatgcccagggcacgctttccaaaatttttaagctgggaggaagagatagtcgctctggatcacccatggctagacgctgaaaacccacctggttccggaatcctgtcctcagcttcttaatataactgccttaaaactttaatcccacttgcccctgttacctaattagagcagatgacccctcccctaatgcctgcggagttgtgcacgtagtagggtcaggccacggcagcctaccggcaatttccggccaacagttaaatgagaacatgaaaacagaaaacggttaaaactgtccctttctgtgtgaagatcacgttccttcccccgcaatgtgcccccagacgcacgtgggtcttcagggggccaggtgcacagacgtccctccacgttcacccctccacccttggactttcttttcgccgtggctgcggcacccttgcgcttttgctggtcactgccatggaggcacacagctgcagagacagagaggacgtgggcggcagagaggactgttgacatccaagcttcctttgtttttttttcctgtccttctctcacctcctaaagtagacttcatttttcctaacaggattagacagtcaaggagtggcttactacatgtgggagcttttggtatgtgacatgcgggctgggcagctgttagagtccaacgtggggcagcacagagagggggccacctccccaggccgtggctgcccacacaccccaattagctgaattcgcgtgtggcagagggaggaaaaggaggcaaacgtgggctgggcaatggcctcacataggaaacagggtcttcctggagatttggtgatggagatgtcaagcaggtggcctctggacgtcaccgttgccctgcatggtggccccagagcagcctctatgaacaacctcgtttccaaaccacagcccacagccggagagtccaggaagacttgcgcactcagagcagaagggtaggagtcctctagacagcctcgcagccgcgccagtcgcccatagacactggctgtgaccgggcgtgctggcagcggcagtgcacagtggccagcactaaccctccctgagaagataaccggctcattcacttcctcccagaagacgcgtggtagcgagtaggcacaggcgtgcacctgctcccgaattactcaccgagacacacgggctgagcagacggccccgtggatggagacaaagagctcttctgaccatatccttcttaacacccgctggcatctcctttcgcgcctccctccctaacctactgacccaccttttgattttagcgcacctgtgattgataggccttccaaagagtcccacgctggcatcaccctccccgaggacggagatgaggagtagtcagcgtgatgccaaaacgcgtcttcttaatccaattctaattctgaatgtttcgtgtgggcttaataccatgtctattaatatatagcctcgatgatgagagagttacaaagaacaaaactccagacacaaacctccaaatttttcagcagaagcactctgcgtcgctgagctgaggtcggctctgcgatccatacgtggccgcacccacacagcacgtgctgtgacgatggctgaacggaaagtgtacactgttcctgaatattgaaataaaacaataaacttttaatggtatttgca

SEQ ID NO: 18820 - DNA, 4844 bp, Homo sapiens
  source 1..4844: mol_type = unassigned DNA
cgcgccagagagaagcagcctccggccccggcggcccctgtctcccgaccccggaaggcgaagcaggctgcccggggaccccgcgcgtgggcgcttgaagccgagaccagcctgcccgggcctgggcaggcggagcagggccttggaccccgcggcgcccctcggcctcggagcaacgagcgcagcgccgcctctgaagagccaatccattcaggatgggaaaccacgcaggcaaacgagaattaaatgccgagaaggccagtacgaatagtgaaactaacagaggagaatctgaaaaaaagagaaacctgggtgaactttcacggacaacctcagaggacaacgaagtgttcggagaggcagatgcgaaccagaacaatgggacctcctctcaggacacagcggtgactgactccaagcgcacagcggacccgaagaatgcctggcaggatgcccacccagctgacccagggagccgcccccacttgatccgcctcttttcccgagatgccccggggagggaggacaacaccttcaaagacaggccctctgagtccgacgagctccagaccatccaagaagacagtgcagccacctccgagagcctggatgtgatggcgtcacagaagagaccctcccagaggcacggatccaagtacctggccacagcaagtaccatggaccatgccaggcatggcttcctcccaaggcacagagacacgggcatccttgactccatcgggcgcttctttggcggtgacaggggtgcgcccaagcggggctctggcaaggtgagctctgaggagtagaggagttttagtttaaatggaaaaagcaaaggagaaatcagtaggtgaactcagccattagaggaagaactggcacgtagcctcttgctgtctaaggtctcgttccgtgctggagaatgcatatgagcccaagagtgtgggcctgagtggctgcttaggacgttttcgtttaactcaccccctcttttcctcacaagggatggtggccggggtgtggctcaggaatgtaaggacatgctgaattctggatctctaagggtgcctggacatgggcgttgcagaaagagagccacattctcagggtctctggtggtgtgtgcttgcggacttgatgactgatgttgcctctgcagcccacacgctggggttcaacactgggttatgctcgttttttcctggagtcagtgctgctagcttcatgttgctctgcgacaatcataggattgaggtcgaggaagacttttgaacaaactcctcaatttaaatccgccttgagcaaacgttctctgtggtctgagaagtggaaggggggagggataaatgagtgtctatgaatcaaagctttattatcttgtgattccattaatttgcatacagagtcttagaagtttctttattcaaaagcaaatgtggataaaaatgtattacaaaaaaaaaaaactctgctatggggtccagagtctaggagtggtttctgcagttgattgtcagtggagaacctgtggctgctggttcatcaaagcgctggtccctgagtgccattcagattgcagatgcagtattttacgtgatgtttagagtgtttggtggttgtgtaattttggagagaaagaagtttttcccaaaaaagtccctagtttattgggtgttctcacacaacctgtaagatgaagctgtttttctgcctgtgtgcagggctgattctggaattccagaaggccttgtgggagcgtaaaaggcttttgaataaagtgtggaacagagcgcctcattctgataacatgcaatcataaaaaccatagggcaacttggagttaaggagtttctagaatttgctttagtctccaactgcaattctttattgatcatgaaattgttgaagagaaacacaaatgtcagttttacctttcctgtgggcgtgaaagcacatcgaagtttcaggcaactgttaacatctctaccatctgtctgagttgagatttcaggttgtgacacttgccgtgacttatttgtaaatgacattttgtgtgtcttagatactaatggaattcatattctggctagttctttcagtgcatttgtagacatgttcttttcctttgtagcagtcctccctcaccctgaaatgttggtgttctaaccgatttctaatgctaatttcaactggaagcactttttcaagcccagctatcaaaccacaccagacatgtatggattcgggttgcccaataaagcgttgctattatgtaagcatccctcacgcatacagcatcaccagttttgaaagcttgaactattctgcttacttcaaggtacagaaaaaaaaaatgtacttaaactgtgcagaaaagatgaaatcactggataatatgtattataaaataagcttcatgtgagtgacactggtttaagttgaaataaaatggtgaaagcattgatatcaatcattgtgactttatctcaaaacaatattgacacacatagatgtttttcttcctttatggtaagattacagcctttattgtcttaaatctcttatactcttcaatattttcaaagaaaacattctagtctcagaaatagtccatctctttgcaaaacagggctggccaattatcaaggacccataaaaatcaaaacactttcaaaaattttaaaaataaaaataattttcacatgattgctttaggaattttgaagtatccattcttttcactatggagtgttgaatatagaagattttttaatgaacaggcttgccctttgatgccaaaggcaaaaaataataataataacatttgcacgtgtgatcacagagcagctgtgaggcatcccgggggagcgcacgcagtggggatgtgattgctccactcaactattttatcacaaagtgttgtaaacatgggagatgaaagcttaactctctctacacccagctacagacccgcaatggccctaaaaatctggggtattcattgggtgggctgccatggaggaatttttggttttgtttttatttttatttgttgttctgtttacaaatcaggagagcccctgtttttatatgctaggaaggtccttgggataggccgaagaggtgtgcaaacgagcagtggaaggcccgggccctgtctctcaggaccacggcggcctgccccacacacagttctgcttctccctatctagaacgaggttttcctggcagattcctgccagactctgagtggagcccccccatgaccctataaaaggggctgtttgtcctcctcccaccctcctgtgctcttcctccctccccttgagggcacatggccgctggtaccacatgttggagcggccgcccccgagcccgggaatgccctaacaacacccatgcttgtgttgctgggagctgacattcaagaaaagtgcattaaaaattccttgagaaggcatattcttttgagagccgtaaatgaaaagtgcattcacggagaacatgctcctttgttgtgagaggaaagaaaggactgttgttgcctttaaggaacaggtttcccagttccccggaatgtcagggtcacatgaggaatgggtgagcacttagggccaagattgtcgtgtgcttggcccggcagcttctctctaagtgacctctccagcatcactctgtgccagtgctcatatctgaggccacttgagtgtcacgaggcagagcctggaaacattagctttggaaaccgttccttcctttttatgtggaggaagtaaggtttcacaagacacctaagctggacatggtgatgtgccacttggatagttcccaaagcagaaagcagccaggacatcccagtaccccacttctccgtgccgtgtacttttagggaggttttcgaaagctagcttcttaccgatgattttgtctatttttctgttttatgtgaaaaccttcatttataacctgctcttctcagtgttcttctattcagcattcagtatgacttctatgcctctaattgcgactgtatggagaagaactgtttgtcattcagtgccgtgggatataatcagtcctgtaaattcatcagaatgttctgttgcctgattttttttccattgcattttaatttcattaaacatattttagttctacagtaacctaattcctcattgttaccatgagatcctaattctgtagctgtgttctgtaatcccatggggcgtgtaccatttggagacacatgaaggatacagtagacagcacggaaggcagcagcaacacacaggggtgtcctccctccccagagcccagtgtgcacacagaaccaaattcaatctcattcatcgtgagcttgcatggtaactgatccagccactcagtacctccattggataagagatttggccacagattcttctagagaaaatccaaatgtggagggtgcatttgtttctgcacccaaacaaataccttttgagatttcttataggcattcctctcaaagtctcattactctgatcagttattgatcggaggctaccctggctcagtcaccagctgctcactgtgtccttctgtggtctcaggagctgcagttgttgctgttgtatgaatagacgatagttaattagactggatgtgtctgtactggcagtgattttgcaacttcctctgtataagcgatacatttgtaaatcatgggaatgtatttgatggtaattgcctgtggtggttgtatcatgatttaattttattatgagcttttggctttatatatttttctgcctttttatgcattcattaaacagtttaacagaccaaggacagtgtactaa

SEQ ID NO: 18821 - DNA, 4800 bp, Homo sapiens
  source 1..4800: mol_type = unassigned DNA
tcctttcgcgtccacctgagcccccccgttttggaaggtggagtggggcttgggaaaaggttcaagcgtctttggggacccccgtgcgactctggctggaaacaggcgagctctggttccttgttccgttttccaattgcaacaaccctctgaagagccaatccattcaggatgggaaaccacgcaggcaaacgagaattaaatgccgagaaggccagtacgaatagtgaaactaacagaggagaatctgaaaaaaagagaaacctgggtgaactttcacggacaacctcagaggacaacgaagtgttcggagaggcagatgcgaaccagaacaatgggacctcctctcaggacacagcggtgactgactccaagcgcacagcggacccgaagaatgcctggcaggatgcccacccagctgacccagggagccgcccccacttgatccgcctcttttcccgagatgccccggggagggaggacaacaccttcaaagacaggccctctgagtccgacgagctccagaccatccaagaagacagtgcagccacctccgagagcctggatgtgatggcgtcacagaagagaccctcccagaggcacggatccaagtacctggccacagcaagtaccatggaccatgccaggcatggcttcctcccaaggcacagagacacgggcatccttgactccatcgggcgcttctttggcggtgacaggggtgcgcccaagcggggctctggcaaggtgagctctgaggagtagaggagttttagtttaaatggaaaaagcaaaggagaaatcagtaggtgaactcagccattagaggaagaactggcacgtagcctcttgctgtctaaggtctcgttccgtgctggagaatgcatatgagcccaagagtgtgggcctgagtggctgcttaggacgttttcgtttaactcaccccctcttttcctcacaagggatggtggccggggtgtggctcaggaatgtaaggacatgctgaattctggatctctaagggtgcctggacatgggcgttgcagaaagagagccacattctcagggtctctggtggtgtgtgcttgcggacttgatgactgatgttgcctctgcagcccacacgctggggttcaacactgggttatgctcgttttttcctggagtcagtgctgctagcttcatgttgctctgcgacaatcataggattgaggtcgaggaagacttttgaacaaactcctcaatttaaatccgccttgagcaaacgttctctgtggtctgagaagtggaaggggggagggataaatgagtgtctatgaatcaaagctttattatcttgtgattccattaatttgcatacagagtcttagaagtttctttattcaaaagcaaatgtggataaaaatgtattacaaaaaaaaaaaactctgctatggggtccagagtctaggagtggtttctgcagttgattgtcagtggagaacctgtggctgctggttcatcaaagcgctggtccctgagtgccattcagattgcagatgcagtattttacgtgatgtttagagtgtttggtggttgtgtaattttggagagaaagaagtttttcccaaaaaagtccctagtttattgggtgttctcacacaacctgtaagatgaagctgtttttctgcctgtgtgcagggctgattctggaattccagaaggccttgtgggagcgtaaaaggcttttgaataaagtgtggaacagagcgcctcattctgataacatgcaatcataaaaaccatagggcaacttggagttaaggagtttctagaatttgctttagtctccaactgcaattctttattgatcatgaaattgttgaagagaaacacaaatgtcagttttacctttcctgtgggcgtgaaagcacatcgaagtttcaggcaactgttaacatctctaccatctgtctgagttgagatttcaggttgtgacacttgccgtgacttatttgtaaatgacattttgtgtgtcttagatactaatggaattcatattctggctagttctttcagtgcatttgtagacatgttcttttcctttgtagcagtcctccctcaccctgaaatgttggtgttctaaccgatttctaatgctaatttcaactggaagcactttttcaagcccagctatcaaaccacaccagacatgtatggattcgggttgcccaataaagcgttgctattatgtaagcatccctcacgcatacagcatcaccagttttgaaagcttgaactattctgcttacttcaaggtacagaaaaaaaaaatgtacttaaactgtgcagaaaagatgaaatcactggataatatgtattataaaataagcttcatgtgagtgacactggtttaagttgaaataaaatggtgaaagcattgatatcaatcattgtgactttatctcaaaacaatattgacacacatagatgtttttcttcctttatggtaagattacagcctttattgtcttaaatctcttatactcttcaatattttcaaagaaaacattctagtctcagaaatagtccatctctttgcaaaacagggctggccaattatcaaggacccataaaaatcaaaacactttcaaaaattttaaaaataaaaataattttcacatgattgctttaggaattttgaagtatccattcttttcactatggagtgttgaatatagaagattttttaatgaacaggcttgccctttgatgccaaaggcaaaaaataataataataacatttgcacgtgtgatcacagagcagctgtgaggcatcccgggggagcgcacgcagtggggatgtgattgctccactcaactattttatcacaaagtgttgtaaacatgggagatgaaagcttaactctctctacacccagctacagacccgcaatggccctaaaaatctggggtattcattgggtgggctgccatggaggaatttttggttttgtttttatttttatttgttgttctgtttacaaatcaggagagcccctgtttttatatgctaggaaggtccttgggataggccgaagaggtgtgcaaacgagcagtggaaggcccgggccctgtctctcaggaccacggcggcctgccccacacacagttctgcttctccctatctagaacgaggttttcctggcagattcctgccagactctgagtggagcccccccatgaccctataaaaggggctgtttgtcctcctcccaccctcctgtgctcttcctccctccccttgagggcacatggccgctggtaccacatgttggagcggccgcccccgagcccgggaatgccctaacaacacccatgcttgtgttgctgggagctgacattcaagaaaagtgcattaaaaattccttgagaaggcatattcttttgagagccgtaaatgaaaagtgcattcacggagaacatgctcctttgttgtgagaggaaagaaaggactgttgttgcctttaaggaacaggtttcccagttccccggaatgtcagggtcacatgaggaatgggtgagcacttagggccaagattgtcgtgtgcttggcccggcagcttctctctaagtgacctctccagcatcactctgtgccagtgctcatatctgaggccacttgagtgtcacgaggcagagcctggaaacattagctttggaaaccgttccttcctttttatgtggaggaagtaaggtttcacaagacacctaagctggacatggtgatgtgccacttggatagttcccaaagcagaaagcagccaggacatcccagtaccccacttctccgtgccgtgtacttttagggaggttttcgaaagctagcttcttaccgatgattttgtctatttttctgttttatgtgaaaaccttcatttataacctgctcttctcagtgttcttctattcagcattcagtatgacttctatgcctctaattgcgactgtatggagaagaactgtttgtcattcagtgccgtgggatataatcagtcctgtaaattcatcagaatgttctgttgcctgattttttttccattgcattttaatttcattaaacatattttagttctacagtaacctaattcctcattgttaccatgagatcctaattctgtagctgtgttctgtaatcccatggggcgtgtaccatttggagacacatgaaggatacagtagacagcacggaaggcagcagcaacacacaggggtgtcctccctccccagagcccagtgtgcacacagaaccaaattcaatctcattcatcgtgagcttgcatggtaactgatccagccactcagtacctccattggataagagatttggccacagattcttctagagaaaatccaaatgtggagggtgcatttgtttctgcacccaaacaaataccttttgagatttcttataggcattcctctcaaagtctcattactctgatcagttattgatcggaggctaccctggctcagtcaccagctgctcactgtgtccttctgtggtctcaggagctgcagttgttgctgttgtatgaatagacgatagttaattagactggatgtgtctgtactggcagtgattttgcaacttcctctgtataagcgatacatttgtaaatcatgggaatgtatttgatggtaattgcctgtggtggttgtatcatgatttaattttattatgagcttttggctttatatatttttctgcctttttatgcattcattaaacagtttaacagaccaaggacagtgtactaa

SEQ ID NO: 18822 - DNA, 2127 bp, Homo sapiens
  source 1..2127: mol_type = unassigned DNA
aaagacaggccctctgagtccgacgagctccagaccatccaagaagacagtgcagccacctccgagagcctggatgtgatggcgtcacagaagagaccctcccagaggcacggatccaagtacctggccacagcaagtaccatggaccatgccaggcatggcttcctcccaaggcacagagacacgggcatccttgactccatcgggcgcttctttggcggtgacaggggtgcgcccaagcggggctctggcaaggactcacaccacccggcaagaactgctcactacggctccctgccccagaagtcacacggccggacccaagatgaaaaccccgtagtccacttcttcaagaacattgtgacgcctcgcacaccacccccgtcgcagggaaagggggccgaaggccagagaccaggatttggctacggaggcagagcgtccgactataaatcggctcacaagggattcaagggagtcgatgcccagggcacgctttccaaaatttttaagctgggaggaagagatagtcgctctggatcacccatggctagacgctgaaaacccacctggttccggaatcctgtcctcagcttcttaatataactgccttaaaactttaatcccacttgcccctgttacctaattagagcagatgacccctcccctaatgcctgcggagttgtgcacgtagtagggtcaggccacggcagcctaccggcaatttccggccaacagttaaatgagaacatgaaaacagaaaacggttaaaactgtccctttctgtgtgaagatcacgttccttcccccgcaatgtgcccccagacgcacgtgggtcttcagggggccaggtgcacagacgtccctccacgttcacccctccacccttggactttcttttcgccgtggctgcggcacccttgcgcttttgctggtcactgccatggaggcacacagctgcagagacagagaggacgtgggcggcagagaggactgttgacatccaagcttcctttgtttttttttcctgtccttctctcacctcctaaagtagacttcatttttcctaacaggattagacagtcaaggagtggcttactacatgtgggagcttttggtatgtgacatgcgggctgggcagctgttagagtccaacgtggggcagcacagagagggggccacctccccaggccgtggctgcccacacaccccaattagctgaattcgcgtgtggcagagggaggaaaaggaggcaaacgtgggctgggcaatggcctcacataggaaacagggtcttcctggagatttggtgatggagatgtcaagcaggtggcctctggacgtcaccgttgccctgcatggtggccccagagcagcctctatgaacaacctcgtttccaaaccacagcccacagccggagagtccaggaagacttgcgcactcagagcagaagggtaggagtcctctagacagcctcgcagccgcgccagtcgcccatagacactggctgtgaccgggcgtgctggcagcggcagtgcacagtggccagcactaaccctccctgagaagataaccggctcattcacttcctcccagaagacgcgtggtagcgagtaggcacaggcgtgcacctgctcccgaattactcaccgagacacacgggctgagcagacggccccgtggatggagacaaagagctcttctgaccatatccttcttaacacccgctggcatctcctttcgcgcctccctccctaacctactgacccaccttttgattttagcgcacctgtgattgataggccttccaaagagtcccacgctggcatcaccctccccgaggacggagatgaggagtagtcagcgtgatgccaaaacgcgtcttcttaatccaattctaattctgaatgtttcgtgtgggcttaataccatgtctattaatatatagcctcgatgatgagagagttacaaagaacaaaactccagacacaaacctccaaatttttcagcagaagcactctgcgtcgctgagctgaggtcggctctgcgatccatacgtggccgcacccacacagcacgtgctgtgacgatggctgaacggaaagtgtacactgttcctgaatatt

SEQ ID NO: 18823 - DNA, 2145 bp, Homo sapiens
  source 1..2145: mol_type = unassigned DNA
gagctccagaccatccaagaagacagtgcagccacctccgagagcctggatgtgatggcgtcacagaagagaccctcccagaggcacggatccaagtacctggccacagcaagtaccatggaccatgccaggcatggcttcctcccaaggcacagagacacgggcatccttgactccatcgggcgcttctttggcggtgacaggggtgcgcccaagcggggctctggcaaggactcacaccacccggcaagaactgctcactacggctccctgccccagaagtcacacggccggacccaagatgaaaaccccgtagtccacttcttcaagaacattgtgacgcctcgcacaccacccccgtcgcagggaaaggggagaggactgtccctgagcagatttagctggggggccgaaggccagagaccaggatttggctacggaggcagagcgtccgactataaatcggctcacaagggattcaagggagtcgatgcccagggcacgctttccaaaatttttaagctgggaggaagagatagtcgctctggatcacccatggctagacgctgaaaacccacctggttccggaatcctgtcctcagcttcttaatataactgccttaaaactttaatcccacttgcccctgttacctaattagagcagatgacccctcccctaatgcctgcggagttgtgcacgtagtagggtcaggccacggcagcctaccggcaatttccggccaacagttaaatgagaacatgaaaacagaaaacggttaaaactgtccctttctgtgtgaagatcacgttccttcccccgcaatgtgcccccagacgcacgtgggtcttcagggggccaggtgcacagacgtccctccacgttcacccctccacccttggactttcttttcgccgtggctgcggcacccttgcgcttttgctggtcactgccatggaggcacacagctgcagagacagagaggacgtgggcggcagagaggactgttgacatccaagcttcctttgtttttttttcctgtccttctctcacctcctaaagtagacttcatttttcctaacaggattagacagtcaaggagtggcttactacatgtgggagcttttggtatgtgacatgcgggctgggcagctgttagagtccaacgtggggcagcacagagagggggccacctccccaggccgtggctgcccacacaccccaattagctgaattcgcgtgtggcagagggaggaaaaggaggcaaacgtgggctgggcaatggcctcacataggaaacagggtcttcctggagatttggtgatggagatgtcaagcaggtggcctctggacgtcaccgttgccctgcatggtggccccagagcagcctctatgaacaacctcgtttccaaaccacagcccacagccggagagtccaggaagacttgcgcactcagagcagaagggtaggagtcctctagacagcctcgcagccgcgccagtcgcccatagacactggctgtgaccgggcgtgctggcagcggcagtgcacagtggccagcactaaccctccctgagaagataaccggctcattcacttcctcccagaagacgcgtggtagcgagtaggcacaggcgtgcacctgctcccgaattactcaccgagacacacgggctgagcagacggccccgtggatggagacaaagagctcttctgaccatatccttcttaacacccgctggcatctcctttcgcgcctccctccctaacctactgacccaccttttgattttagcgcacctgtgattgataggccttccaaagagtcccacgctggcatcaccctccccgaggacggagatgaggagtagtcagcgtgatgccaaaacgcgtcttcttaatccaattctaattctgaatgtttcgtgtgggcttaataccatgtctattaatatatagcctcgatgatgagagagttacaaagaacaaaactccagacacaaacctccaaatttttcagcagaagcactctgcgtcgctgagctgaggtcggctctgcgatccatacgtggccgcacccacacagcacgtgctgtgacgatggctgaacggaaagtgtacactgttcctgaatattgaaataaaa

SEQ ID NO: 18824 - DNA, 875 bp, Homo sapiens
  source 1..875: mol_type = unassigned DNA
caattctaaatgccccacttctttcatgcatgaattgcaaaaagatgtggcaagttttgtttctaccaagaaaactaaaaacaccttttgtcaaataaatgctccttgcatatttaacttatgcaccagtggccttttaaacagtcaatgtcccatcaaggtgcctgcacatctgggctctccgggagcagccatggcagcacccgggaagaaacgctgatgtggctgctctgcatgctcagatgacttcatcgggaagcctgggtgcattttacgctgggtgccaaatctcgagtaactgaggaattcccagagccttctgaaacacagagctgcaataaggctgctccatccaggagaggcagatgcgaaccagaacaatgggacctcctctcaggacacagcggtgactgactccaagcgcacagcggacccgaagaatgcctggcaggatgcccacccagctgacccagggagccgcccccacttgatccgcctcttttcccgagatgccccggggagggaggacaacaccttcaaagacaggccctctgagtccgacgagctccagaccatccaagaagacagtgcagccacctccgagagcctggatgtgatggcgtcacagaagagaccctcccagaggcacggatccaagtacctggccacagcaagtaccatggaccatgccaggcatggcttcctcccaaggcacagagacacgggcatccttgactccatcgggcgcttctttggcggtgacaggggtgcgcccaagcggggctctggcaaggactcacaccacccggcaagaactgctcactacggctccctgccccagaagtcacacggccggacccaagatgaaaaccccg

SEQ ID NO: 18825 - DNA, 2503 bp, Homo sapiens
  source 1..2503: mol_type = unassigned DNA
agcactgccctccaagatcttcccttgggcttttcagcagtaaggggacatgcaccccaagggcctccacttggcctgaccttgctgcgggggctctctgtccccaggaacagtagagatggcaagcttatcgagaccctctctgcccagctgcctctgctccttcctcctcctcctcctcctccaagtgtcttccagctatgcagggcagttcagagtgataggaccaagacaccctatccgggctctggtcggggatgaagtggaattgccatgtcgcatatctcctgggaagaacgctacaggcatggaggtggggtggtaccgcccccccttctctagggtggttcatctctacagaaatggcaaggaccaagatggagaccaggcacctgaatatcggggccggacagagctgctgaaagatgctattggtgagggaaaggtgactctcaggatccggaatgtaaggttctcagatgaaggaggtttcacctgcttcttccgagatcattcttaccaagaggaggcagcaatggaattgaaagtagaagatcctttctactgggtgagccctggagtgctggttctcctcgcggtgctgcctgtgctcctcctgcagatcactgttggcctcgtcttcctctgcctgcagtacagactgagaggaaaacttcgagcagagatagagaatctccaccggacttttgatccccactttctgagggtgccctgctggaagataaccctgtttgtaattgtgccggttcttggacccttggttgccttgatcatctgctacaactggctacatcgaagactagcagggcaattccttgaagagctacgtaagttctcttctctctgttataagcagagaataaaaagccaggaaagggagacagaagcaacaagaggaagaggcgggctattgagggatcacattcccagaggaaaggaggagctggagagcctgggtggagggaagactcctcctgggaggtagagggcaaagaagccagctgttagagacacatttacaggtggcagagaagctggaggcactcctatctgccacctgatccattcctccttcactgcccctaagcaggaatccaaccctagctggtctcattgcccattccacagcaactgcccagtgcctcacctctcagatcaaccattgaggcaggaatggagacaagatgaccccaagggcttttcttctccctagttcaatggttttatgatacaaactactgacatacgtttttcaagttattttctccttcttctaggaaatcccttctgagtgatgtcacatcttggcaggggtggaggagagcctggttgcccagggatttgtccttggggacatctcatccatcaagttgcacactcactggcatctttgctatggggacattccaatttgcactttcaggaacactctgaattccaagtagaattgatttcccttcttctgtcatctaccttttctcttcattttcccatttttattacccttctttccatttctctctccagtcttccacctggaagccctctctggctaaggacaggcaggtgcccctctctccatcagaggacacctgtactggagagcaacacaggatggtctctgccatgaactggaggccaggaatctcctcactgaaaattacagtatggtaactttgcaaatggtggttgtttcttccaagactccagccctgattgcgcaaaactgaaaggcatgtgaagggaaggaagaggaagagtgcaaaacattgaagagagagctgagtgagctgaagagtgaggatatgagtagccccaacccaaacctggagatggggagaaacctacagaatactagccagagctcctccttgtcttggcagcctactagggacctggggaagcaaaaacgaaagctgggcaacatgcctgctttagaatgttttccttctacttacacatcttccacaggtctcagaatctttccttcctctcatccttttctcctatcttcatatctatcagagtatccactgtttattcaacaactactacttgatggtcagacacaaacaaacaagctaggtgctaattaataaagatatgagttttggccgggtgcggtggctcacgcctgtaatcccagcactttgggaggccgaggcgggcgaatcacgaggtcaggagttcgagaccagcctggccaacatggtgaaaccccatctctactaaaaatacaaacaattaactgagcatagtggtgggcacctataataccagctactccggaggctgaggcaggagaatcgcttgaacccaggaggcagaggttgcagtgagctgagatcgcgccactgcactctagccagagtgacagagtaagactctgtctcaaaaataaataaataaataaataaataaataaataaataaataaataaataaaaaataataatacaagttttcataagcacacttctaa

SEQ ID NO: 18826 - DNA, 1568 bp, Homo sapiens
  source 1..1568: mol_type = unassigned DNA
atggcaagcttatcgagaccctctctgcccagctgcctctgctccttcctcctcctcctcctcctccaagtgtcttccagctatgcagggcagttcagagtgataggaccaagacaccctatccgggctctggtcggggatgaagtggaattgccatgtcgcatatctcctgggaagaacgctacaggcatggaggtggggtggtaccgcccccccttctctagggtggttcatctctacagaaatggcaaggaccaagatggagaccaggcacctgaatatcggggccggacagagctgctgaaagatgctattggtgagggaaaggtgactctcaggatccggaatgtaaggttctcagatgaaggaggtttcacctgcttcttccgagatcattcttaccaagaggaggcagcaatggaattgaaagtagaagatcctttctactgggtgagccctggagtgctggttctcctcgcggtgctgcctgtgctcctcctgcagatcactgttggcctcgtcttcctctgcctgcagtacagactgagaggaaaacttcgagcagagatagagaatctccaccggacttttgggcaattccttgaagagctactcttccacctggaagccctctctggctaaggacaggcaggtgcccctctctccatcagaggacacctgtactggagagcaacacaggatggtctctgccatgaactggaggccaggaatctcctcactgaaaattacagtatggtaactttgcaaatggtggttgtttcttccaagactccagccctgattgcgcaaaactgaaaggcatgtgaagggaaggaagaggaagagtgcaaaacattgaagagagagctgagtgagctgaagagtgaggatatgagtagccccaacccaaacctggagatggggagaaacctacagaatactagccagagctcctccttgtcttggcagcctactagggacctggggaagcaaaaacgaaagctgggcaacatgcctgctttagaatgttttccttctacttacacatcttccacaggtctcagaatctttccttcctctcatccttttctcctatcttcatatctatcagagtatccactgtttattcaacaactactacttgatggtcagacacaaacaaacaagctaggtgctaattaataaagatatgagttttggccgggtgcggtggctcacgcctgtaatcccagcactttgggaggccgaggcgggcgaatcacgaggtcaggagttcgagaccagcctggccaacatggtgaaaccccatctctactaaaaatacaaacaattaactgagcatagtggtgggcacctataataccagctactccggaggctgaggcaggagaatcgcttgaacccaggaggcagaggttgcagtgagctgagatcgcgccactgcactctagccagagtgacagagtaagactctgtctcaaaaataaataaataaataaataaataaataaataaataaataaataaataaaaaataataatacaagttttcataagcacacttctaa

SEQ ID NO: 18827 - DNA, 1529 bp, Homo sapiens
  source 1..1529: mol_type = unassigned DNA
cttttgtgtgagtgcctggcaagggtgacgtggggctgtttctgcgggcacagctgcagcaattaccggagtggaggcagggcccaggcagcactgccctccaagatcttcccttgggcttttcagcagtaaggggacatgcaccccaagggcctccacttggcctgaccttgctgcgggggctctctgtccccaggaacagtagagatggcaagcttatcaagaccctctctgcccagctgcctctgctccttcctcctcctcctcctcctccaagtgtcttccagctatgcagatcctttctactgggtgagccctggagtgctggttctcctcgcggtgctgcctgtgctcctcctgcagatcactgttggcctcatcttcctctgcctgcagtacagactgagaggaaaacttcgagcagagatagagaatctccaccggacttttgatccccactttctgagggtgccctgctggaagataaccctgtttgtaattgtgccggttcttggacccttggttgccttgatcatctgctacaactggctacatcgaagactagcagggcaattccttgaagagctacgaaatcccttctgagtgatgtcacatcttggcaggggtggaggagagcctggttgcccagggatttgtccttggggacatctcatccatcaagttgcacactcactggcatctttgctatggggacattccaatttgcactttcaggaacactctgaattccaagtagaattgatttcccttcttctgtcatctaccttttctcttcattttcccatttttattacccttctttccatttctctctccagtcttccacctggaagccctctctggctaaggacaggcaggtgcccctctctccatcagaggacacctgtactggagagcaacacaggatggtctctgccatgaactggaggccaggaatctcctcactgaaaattacagtatggtaactttgcaaatggtggttgtttcttccaagactccagccctgattgcgcaaaactgaaaggcatgtgaagggaaggaagaggaagagtgcaaaacattgaagagagagctgagtgagctgaagagtgaggatatgagtagccccaacccaaacctggagatggggagaaacctacagaatactagccagagctcctccttgtcttggcagcctactagggacctggggaagcaaaaacgaaagctgggcaacatgcctgctttagaatgttttccttctacttacacatcttccacaggtctcagaatctttccttcctctcatccttttctcctatcttcatatctatcagagtatccactgtttattcaacaactactacttgatggtcagacacaaacaaacaagctaggtgctaattaataaagatacgagttttggccgggtgcggtggctcacgcctgtaatcccagcactttgggaggccgaggcgggcgaatcacgaggtcaggagttcaagaccagcctggccaacatggtgaaa

SEQ ID NO: 18828 - DNA, 889 bp, Homo sapiens
  source 1..889: mol_type = unassigned DNA
atggcaagcttatcaagaccctctctgcccagctgcctctgctccttcctcctcctcctcctcctccaagtgtcttccagctatgcagggcagttcagagtgataggaccaagacaccctatccgggctctggtcggggatgaagtggaattgccatgtcgcatatctcctgggaagaacgctacaggcatggaggtggggtggtaccgcccccccttctctagggtggttcatctctacagaaatggcaaggaccaagatggagaccaggcacctgaatatcggggccggacagagctgctgaaagatgctattggtgagggaaaggtgactctcaggatccggaatgtaaggttctcagatgaaggaggtttcacctgcttcttccgagatcattcttaccaagaggaggcagcaatggaattgaaagtagaagatcctttctactgggtgagccctggagtgctggttctcctcgcggtgctgcctgtgctcctcctgcagatcactgttggcctcatcttcctctgcctgcagtacagactgagaggaaaacttcgagcagagatagagaatctccaccggacttttgtcttccacctggaagccctctctggctaaggacaggcaggtgcccctctctccatcagaggacacctgtactggagagcaacacaggatggtctctgccatgaactggaggccaggaatctcctcactgaaaattacagtatggtaactttgcaaatggtggttgtttcttccaagactccagccctgattgcgcaaaactgaaaggcatgtgaagggaaggaagaggaagagtgcaaaacattgaagagagagctgagtgagctgaagagtgaggatatgagtagccccaacccaa

SEQ ID NO: 18829 - DNA, 1027 bp, Homo sapiens
  source 1..1027: mol_type = unassigned DNA
atggcaagcttatcaagaccctctctgcccagctgcctctgctccttcctcctcctcctcctcctccaagtgtcttccagctatgcagggcagttcagagtgataggaccaagacaccctatccgggctctggtcggggatgaagtggaattgccatgtcgcatatctcctgggaagaacgctacaggcatggaggtggggtggtaccgcccccccttctctagggtggttcatctctacagaaatggcaaggaccaagatggagaccaggcacctgaatatcggggccggacagagctgctgaaagatgctattggtgagggaaaggtgactctcaggatccggaatgtaaggttctcagatgaaggaggtttcacctgcttcttccgagatcattcttaccaagaggaggcagcaatggaattgaaagtagaagatcctttctactgggtgagccctggagtgctggttctcctcgcggtgctgcctgtgctcctcctgcagatcactgttggcctcatcttcctctgcctgcagtacagactgagaggaaaacttcgagcagagatagagaatctccaccggacttttgatccccactttctgagggtgccctgctggaagataaccctgtttgtaattgtgccggttcttggacccttggttgccttgatcatctgctacaactggctacatcgaagactagcagggcaattccttgaagagctactcttccacctggaagccctctctggctaaggacaggcaggtgcccctctctccatcagaggacacctgtactggagagcaacacaggatggtctctgccatgaactggaggccaggaatctcctcactgaaaattacagtatggtaactttgcaaatggtggttgtttcttccaagactccagccctgattgcgcaaaactgaaaggcatgtgaagggaaggaagaggaagagtgcaaaacattgaagagagagctgagtgagctgaagagtgaggatatgagtagccccaacccaa

SEQ ID NO: 18830 - DNA, 2296 bp, Homo sapiens
  source 1..2296: mol_type = unassigned DNA
gtcatcccctcagtctgtagcccttttgtgtgagtgcctggcaagggtgacgtggggctgtttctgcgggcacagctgcagcaattaccggagtggaggcagggcccaggcagcactgccctccaagatcttcccttgggcttttcagcagtaaggggacatgcaccccaagggcctccacttggcctgaccttgctgcgggggctctctgtccccaggaacagtagagatggcaagcttatcaagaccctctctgcccagctgcctctgctccttcctcctcctcctcctcctccaagtgtcttccagctatgcagggcagttcagagtgataggaccaagacaccctatccgggctctggtcggggatgaagtggaattgccatgtcgcatatctcctgggaagaacgctacaggcatggaggtggggtggtaccgcccccccttctctagggtggttcatctctacagaaatggcaaggaccaagatggagaccaggcacctgaatatcggggccggacagagctgctgaaagatgctattggtgagggaaaggtgactctcaggatccggaatgtaaggttctcagatgaaggaggtttcacctgcttcttccgagatcattcttaccaagaggaggcagcaatggaattgaaagtagaagtgtctcactctgtcacccaggattggttgcagtggcacgatcatggctcattgcagcctccacctcccaggctcaagtgatcctcctgactcagcctcttgaatagctgagaccacaggcttgtgtcaccatgcccagatcctttctactgggtgagccctggagtgctggttctcctcgcggtgctgcctgtgctcctcctgcagatcactgttggcctcatcttcctctgcctgcagtacagactgagaggaaaacttcgagcagagatagagaatctccaccggacttttgatccccactttctgagggtgccctgctggaagataaccctgtttgtaattgtgccggttcttggacccttggttgccttgatcatctgctacaactggctacatcgaagactagcagggcaattccttgaagagctacgaaatcccttctgagtgatgtcacatcttggcaggggtggaggagagcctggttgcccagggatttgtccttggggacatctcatccatcaagttgcacactcactggcatctttgctatggggacattccaatttgcactttcaggaacactctgaattccaagtagaattgatttcccttcttctgtcatctaccttttctcttcattttcccatttttattacccttctttccatttctctctccagtcttccacctggaagccctctctggctaaggacaggcaggtgcccctctctccatcagaggacacctgtactggagagcaacacaggatggtctctgccatgaactggaggccaggaatctcctcactgaaaattacagtatggtaactttgcaaatggtggttgtttcttccaagactccagccctgattgcgcaaaactgaaaggcatgtgaagggaaggaagaggaagagtgcaaaacattgaagagagagctgagtgagctgaagagtgaggatatgagtagccccaacccaaacctggagatggggagaaacctacagaatactagccagagctcctccttgtcttggcagcctactagggacctggggaagcaaaaacgaaagctgggcaacatgcctgctttagaatgttttccttctacttacacatcttccacaggtctcagaatctttccttcctctcatccttttctcctatcttcatatctatcagagtatccactgtttattcaacaactactacttgatggtcagacacaaacaaacaagctaggtgctaattaataaagatacgagttttggccgggtgcggtggctcacgcctgtaatcccagcactttgggaggccgaggcgggcgaatcacgaggtcaggagttcaagaccagcctggccaacatggtgaaaccccatctctactaaaaatacaaacaattaactgagcatagtggtgggcacctataataccagctactccggaggctgaggcaggagaatcgcttgaacccaggaggcagaggttgcagtgagctgagatcgtgccactgcactctagccggagtgacagagtaagactctgtctcaaaaataaataaataaataaataaataaataaataaataaataaataaaaaataataatacaagttttcataagcacacttct

SEQ ID NO: 18831 - DNA, 2160 bp, Homo sapiens
  source 1..2160: mol_type = unassigned DNA
gtcatcccctcagtctgtagcccttttgtgtgagtgcctggcaagggtgacgtggggctgtttctgcgggcacagctgcagcaattaccggagtggaggcagggcccaggcagcactgccctccaagatcttcccttgggcttttcagcagtaaggggacatgcaccccaagggcctccacttggcctgaccttgctgcgggggctctctgtccccaggaacagtagagatggcaagcttatcaagaccctctctgcccagctgcctctgctccttcctcctcctcctcctcctccaagtgtcttccagctatgcagggcagttcagagtgataggaccaagacaccctatccgggctctggtcggggatgaagtggaattgccatgtcgcatatctcctgggaagaacgctacaggcatggaggtggggtggtaccgcccccccttctctagggtggttcatctctacagaaatggcaaggaccaagatggagaccaggcacctgaatatcggggccggacagagctgctgaaagatgctattggtgagggaaaggtgactctcaggatccggaatgtaaggttctcagatgaaggaggtttcacctgcttcttccgagatcattcttaccaagaggaggcagcaatggaattgaaagtagaagatcctttctactgggtgagccctggagtgctggttctcctcgcggtgctgcctgtgctcctcctgcagatcactgttggcctcatcttcctctgcctgcagtacagactgagaggaaaacttcgagcagagatagagaatctccaccggacttttgatccccactttctgagggtgccctgctggaagataaccctgtttgtaattgtgccggttcttggacccttggttgccttgatcatctgctacaactggctacatcgaagactagcagggcaattccttgaagagctacgaaatcccttctgagtgatgtcacatcttggcaggggtggaggagagcctggttgcccagggatttgtccttggggacatctcatccatcaagttgcacactcactggcatctttgctatggggacattccaatttgcactttcaggaacactctgaattccaagtagaattgatttcccttcttctgtcatctaccttttctcttcattttcccatttttattacccttctttccatttctctctccagtcttccacctggaagccctctctggctaaggacaggcaggtgcccctctctccatcagaggacacctgtactggagagcaacacaggatggtctctgccatgaactggaggccaggaatctcctcactgaaaattacagtatggtaactttgcaaatggtggttgtttcttccaagactccagccctgattgcgcaaaactgaaaggcatgtgaagggaaggaagaggaagagtgcaaaacattgaagagagagctgagtgagctgaagagtgaggatatgagtagccccaacccaaacctggagatggggagaaacctacagaatactagccagagctcctccttgtcttggcagcctactagggacctggggaagcaaaaacgaaagctgggcaacatgcctgctttagaatgttttccttctacttacacatcttccacaggtctcagaatctttccttcctctcatccttttctcctatcttcatatctatcagagtatccactgtttattcaacaactactacttgatggtcagacacaaacaaacaagctaggtgctaattaataaagatacgagttttggccgggtgcggtggctcacgcctgtaatcccagcactttgggaggccgaggcgggcgaatcacgaggtcaggagttcaagaccagcctggccaacatggtgaaaccccatctctactaaaaatacaaacaattaactgagcatagtggtgggcacctataataccagctactccggaggctgaggcaggagaatcgcttgaacccaggaggcagaggttgcagtgagctgagatcgtgccactgcactctagccggagtgacagagtaagactctgtctcaaaaataaataaataaataaataaataaataaataaataaataaataaaaaataataatacaagttttcataagcacacttctaa

SEQ ID NO: 18832 - DNA, 1591 bp, Homo sapiens
  source 1..1591: mol_type = unassigned DNA
atggcaagcttatcgagaccctctctgcccagctgcctctgctccttcctcctcctcctcctcctccaagtgtcttccagctatgcagatcctttctactgggtgagccctggagtgctggttctcctcgcggtgctgcctgtgctcctcctgcagatcactgttggcctcgtcttcctctgcctgcagtacagactgagaggaaaacttcgagcagagatagagaatctccaccggacttttgatccccactttctgagggtgccctgctggaagataaccctgtttgtaattgtgccggttcttggacccttggttgccttgatcatctgctacaactggctacatcgaagactagcagggcaattccttgaagagctacgaaatcccttctgagtgatgtcacatcttggcaggggtggaggagagcctggttgcccagggatttgtccttggggacatctcatccatcaagttgcacactcactggcatctttgctatggggacattccaatttgcactttcaggaacactctgaattccaagtagaattgatttcccttcttctgtcatctaccttttctcttcattttcccatttttattacccttctttccatttctctctccagtcttccacctggaagccctctctggctaaggacaggcaggtgcccctctctccatcagaggacacctgtactggagagcaacacaggatggtctctgccatgaactggaggccaggaatctcctcactgaaaattacagtatggtaactttgcaaatggtggttgtttcttccaagactccagccctgattgcgcaaaactgaaaggcatgtgaagggaaggaagaggaagagtgcaaaacattgaagagagagctgagtgagctgaagagtgaggatatgagtagccccaacccaaacctggagatggggagaaacctacagaatactagccagagctcctccttgtcttggcagcctactagggacctggggaagcaaaaacgaaagctgggcaacatgcctgctttagaatgttttccttctacttacacatcttccacaggtctcagaatctttccttcctctcatccttttctcctatcttcatatctatcagagtatccactgtttattcaacaactactacttgatggtcagacacaaacaaacaagctaggtgctaattaataaagatacgagttttggccgggtgcggtggctcacgcctgtaatcccagcactttgggaggccgaggcgggcgaatcacgaggtcaggagttcaagaccagcctggccaacatggtgaaaccccatctctactaaaaatacaaacaattaactgagcatagtggtgggcacctataataccagctactccggaggctgaggcaggagaatcgcttgaacccaggaggcagaggttgcagtgagctgagatcgcgccactgcactctagccggagtgacagagtaagactctgtctcaaaaataaataaataaataaataaataaataaataaataaataaataaataaataaaaaataataatacaagttttcataagcacacttctaa

SEQ ID NO: 18833 - DNA, 2087 bp, Homo sapiens
  source 1..2087: mol_type = unassigned DNA
caattaccggagtggaggcagggcccaggcagcactgccctccaagatcttcccttgggcttttcagcagtaaggggacatgcaccccaagggcctccacttggcctgaccttgctgcgggggctctctgtccccaggaacagtagagatggcaagcttatcgagaccctctctgcccagctgcctctgctccttcctcctcctcctcctcctccaagtgtcttccagctatgcagggcagttcagagtgataggaccaagacaccctatccgggctctggtcggggatgaagtggaattgccatgtcgcatatctcctgggaagaacgctacaggcatggaggtggggtggtaccgcccccccttctctagggtggttcatctctacagaaatggcaaggaccaagatggagaccaggcacctgaatatcggggccggacagagctgctgaaagatgctattggtgagggaaaggtgactctcaggatccggaatgtaaggttctcagatgaaggaggtttcacctgcttcttccgagatcattcttaccaagaggaggcagcaatggaattgaaagtagaagatcctttctactgggtgagccctggagtgctggttctcctcgcggtgctgcctgtgctcctcctgcagatcactgttggcctcgtcttcctctgcctgcagtacagactgagaggaaaacttcgagcagagatagagaatctccaccggacttttgatccccactttctgagggtgccctgctggaagataaccctgtttgtaattgtgccggttcttggacccttggttgccttgatcatctgctacaactggctacatcgaagactagcagggcaattccttgaagagctacgaaatcccttctgagtgatgtcacatcttggcaggggtggaggagagcctggttgcccagggatttgtccttggggacatctcatccatcaagttgcacactcactggcatctttgctatggggacattccaatttgcactttcaggaacactctgaattccaagtagaattgatttcccttcttctgtcatctaccttttctcttcattttcccatttttattacccttctttccatttctctctccagtcttccacctggaagccctctctggctaaggacaggcaggtgcccctctctccatcagaggacacctgtactggagagcaacacaggatggtctctgccatgaactggaggccaggaatctcctcactgaaaattacagtatggtaactttgcaaatggtggttgtttcttccaagactccagccctgattgcgcaaaactgaaaggcatgtgaagggaaggaagaggaagagtgcaaaacattgaagagagagctgagtgagctgaagagtgaggatatgagtagccccaacccaaacctggagatggggagaaacctacagaatactagccagagctcctccttgtcttggcagcctactagggacctggggaagcaaaaacgaaagctgggcaacatgcctgctttagaatgttttccttctacttacacatcttccacaggtctcagaatctttccttcctctcatccttttctcctatcttcatatctatcagagtatccactgtttattcaacaactactacttgatggtcagacacaaacaaacaagctaggtgctaattaataaagatacgagttttggccgggtgcggtggctcacgcctgtaatcccagcactttgggaggccgaggcgggcgaatcacgaggtcaggagttcaagaccagcctggccaacatggtgaaaccccatctctactaaaaatacaaacaattaactgagcatagtggtgggcacctataataccagctactccggaggctgaggcaggagaatcgcttgaacccaggaggcagaggttgcagtgagctgagatcgcgccactgcactctagccggagtgacagagtaagactctgtctcaaaaataaataaataaataaataaataaataaataaataaataaataaataaataaaaaataataatacaagttttcataagcacacttctaa

SEQ ID NO: 18834 - DNA, 2146 bp, Homo sapiens
  source 1..2146: mol_type = unassigned DNA
agcccttttgtgtgagtgcctggcaagggtgacgtggggctgtttctgcgggcacagctgcagcaattaccggagtggaggcagggcccaggcagcactgccctccaagatcttcccttgggcttttcagcagtaaggggacatgcaccccaagggcctccacttggcctgaccttgctgcgggggctctctgtccccaggaacagtagagatggcaagcttatcgagaccctctctgcccagctgcctctgctccttcctcctcctcctcctcctccaagtgtcttccagctatgcagggcagttcagagtgataggaccaagacaccctatccgggctctggtcggggatgaagtggaattgccatgtcgcatatctcctgggaagaacgctacaggcatggaggtggggtggtaccgcccccccttctctagggtggttcatctctacagaaatggcaaggaccaagatggagaccaggcacctgaatatcggggccggacagagctgctgaaagatgctattggtgagggaaaggtgactctcaggatccggaatgtaaggttctcagatgaaggaggtttcacctgcttcttccgagatcattcttaccaagaggaggcagcaatggaattgaaagtagaagatcctttctactgggtgagccctggagtgctggttctcctcgcggtgctgcctgtgctcctcctgcagatcactgttggcctcgtcttcctctgcctgcagtacagactgagaggaaaacttcgagcagagatagagaatctccaccggacttttgatccccactttctgagggtgccctgctggaagataaccctgtttgtaattgtgccggttcttggacccttggttgccttgatcatctgctacaactggctacatcgaagactagcagggcaattccttgaagagctacgaaatcccttctgagtgatgtcacatcttggcaggggtggaggagagcctggttgcccagggatttgtccttggggacatctcatccatcaagttgcacactcactggcatctttgctatggggacattccaatttgcactttcaggaacactctgaattccaagtagaattgatttcccttcttctgtcatctaccttttctcttcattttcccatttttattacccttctttccatttctctctccagtcttccacctggaagccctctctggctaaggacaggcaggtgcccctctctccatcagaggacacctgtactggagagcaacacaggatggtctctgccatgaactggaggccaggaatctcctcactgaaaattacagtatggtaactttgcaaatggtggttgtttcttccaagactccagccctgattgcgcaaaactgaaaggcatgtgaagggaaggaagaggaagagtgcaaaacattgaagagagagctgagtgagctgaagagtgaggatatgagtagccccaacccaaacctggagatggggagaaacctacagaatactagccagagctcctccttgtcttggcagcctactagggacctggggaagcaaaaacgaaagctgggcaacatgcctgctttagaatgttttccttctacttacacatcttccacaggtctcagaatctttccttcctctcatccttttctcctatcttcatatctatcagagtatccactgtttattcaacaactactacttgatggtcagacacaaacaaacaagctaggtgctaattaataaagatatgagttttggccgggtgcggtggctcacgcctgtaatcccagcactttgggaggccgaggcgggcgaatcacgaggtcaggagttcgagaccagcctggccaacatggtgaaaccccatctctactaaaaatacaaacaattaactgagcatagtggtgggcacctataataccagctactccggaggctgaggcaggagaatcgcttgaacccaggaggcagaggttgcagtgagctgagatcgcgccactgcactctagccagagtgacagagtaagactctgtctcaaaaataaataaataaataaataaataaataaataaataaataaataaataaaaaataataatacaagttttcataagcacacttctaa

SEQ ID NO: 18835 - DNA, 1616 bp, Homo sapiens
  source 1..1616: mol_type = unassigned DNA
atggcaagcttatcgagaccctctctgcccagctgcctctgctccttcctcctcctcctcctcctccaagtgtcttccagctatgcagggcagttcagagtgataggaccaagacaccctatccgggctctggtcggggatgaagtggaattgccatgtcgcatatctcctgggaagaacgctacaggcatggaggtggggtggtaccgcccccccttctctagggtggttcatctctacagaaatggcaaggaccaagatggagaccaggcacctgaatatcggggccggacagagctgctgaaagatgctattggtgagggaaaggtgactctcaggatccggaatgtaaggttctcagatgaaggaggtttcacctgcttcttccgagatcattcttaccaagaggaggcagcaatggaattgaaagtagaagatcctttctactgggtgagccctggagtgctggttctcctcgcggtgctgcctgtgctcctcctgcagatcactgttggcctcgtcttcctctgcctgcagtacagactgagaggaaaacttcgagcagagatagagaatctccaccggacttttgagtcctttggtgttctaggaccccaggttaaggaaccaaaaaagacagggcaattccttgaagagctactcttccacctggaagccctctctggctaaggacaggcaggtgcccctctctccatcagaggacacctgtactggagagcaacacaggatggtctctgccatgaactggaggccaggaatctcctcactgaaaattacagtatggtaactttgcaaatggtggttgtttcttccaagactccagccctgattgcgcaaaactgaaaggcatgtgaagggaaggaagaggaagagtgcaaaacattgaagagagagctgagtgagctgaagagtgaggatatgagtagccccaacccaaacctggagatggggagaaacctacagaatactagccagagctcctccttgtcttggcagcctactagggacctggggaagcaaaaacgaaagctgggcaacatgcctgctttagaatgttttccttctacttacacatcttccacaggtctcagaatctttccttcctctcatccttttctcctatcttcatatctatcagagtatccactgtttattcaacaactactacttgatggtcagacacaaacaaacaagctaggtgctaattaataaagatatgagttttggccgggtgcggtggctcacgcctgtaatcccagcactttgggaggccgaggcgggcgaatcacgaggtcaggagttcgagaccagcctggccaacatggtgaaaccccatctctactaaaaatacaaacaattaactgagcatagtggtgggcacctataataccagctactccggaggctgaggcaggagaatcgcttgaacccaggaggcagaggttgcagtgagctgagatcgcgccactgcactctagccagagtgacagagtaagactctgtctcaaaaataaataaataaataaataaataaataaataaataaataaataaataaaaaataataatacaagttttcataagcacacttctaa

SEQ ID NO: 18836 - DNA, 910 bp, Homo sapiens
  source 1..910: mol_type = unassigned DNA
atggcaagcttatcaagaccctctctgcccagctgcctctgctccttcctcctcctcctcctcctccaagtgtcttccagctatgcagggcagttcagagtgataggaccaagacaccctatccgggctctggtcggggatgaagtggaattgccatgtcgcatatctcctgggaagaacgctacaggcatggaggtggggtggtaccgcccccccttctctagggtggttcatctctacagaaatggcaaggaccaagatggagaccaggcacctgaatatcggggccggacagagctgctgaaagatgctattggtgagggaaaggtgactctcaggatccggaatgtaaggttctcagatgaaggaggtttcacctgcttcttccgagatcattcttaccaagaggaggcagcaatggaattgaaagtagaagatcctttctactgggtgagccctggagtgctggttctcctcgcggtgctgcctgtgctcctcctgcagatcactgttggcctcatcttcctctgcctgcagtacagactgagaggaaaacttcgagcagagatagagaatctccaccggacttttgggcaattccttgaagagctactcttccacctggaagccctctctggctaaggacaggcaggtgcccctctctccatcagaggacacctgtactggagagcaacacaggatggtctctgccatgaactggaggccaggaatctcctcactgaaaattacagtatggtaactttgcaaatggtggttgtttcttccaagactccagccctgattgcgcaaaactgaaaggcatgtgaagggaaggaagaggaagagtgcaaaacattgaagagagagctgagtgagctgaagagtgaggatatgagtagccccaacccaa

SEQ ID NO: 18837 - DNA, 675 bp, Homo sapiens
  source 1..675: mol_type = unassigned DNA
atggcaagcttatcaagaccctctctgcccagctgcctctgctccttcctcctcctcctcctcctccaagtgtcttccagctatgcagggcagttcagagtgataggaccaagacaccctatccgggctctggtcggggatgaagtggaattgccatgtcgcatatctcctgggaagaacgctacaggcatggaggtggggtggtaccgcccccccttctctagggtggttcatctctacagaaatggcaaggaccaagatggagaccaggcacctgaatatcggggccggacagagctgctgaaagatgctattggtgagggaaaggtgactctcaggatccggaatgtaaggttctcagatgaaggaggtttcacctgcttcttccgagatcattcttaccaagaggaggcagcaatggaattgaaagtagaagatcctttctactgggtgagccctggagtgctggttctcctcgcggtgctgcctgtgctcctcctgcagatcactgttggcctcatcttcctctgcctgcagtacagactgagaggaaaacttcgagcagagatagagaatctccaccggacttttgagtcctttggtgttctaggaccccaggttaaggaaccaaaaaagacagggcaattccttgaagagctacgaaatcccttctga

SEQ ID NO: 18838 - DNA, 1858 bp, Homo sapiens
  source 1..1858: mol_type = unassigned DNA
atggcaagcttatcgagaccctctctgcccagctgcctctgctccttcctcctcctcctcctcctccaagtgtcttccagctatgcagggcagttcagagtgataggaccaagacaccctatccgggctctggtcggggatgaagtggaattgccatgtcgcatatctcctgggaagaacgctacaggcatggaggtggggtggtaccgcccccccttctctagggtggttcatctctacagaaatggcaaggaccaagatggagaccaggcacctgaatatcggggccggacagagctgctgaaagatgctattggtgagggaaaggtgactctcaggatccggaatgtaaggttctcagatgaaggaggtttcacctgcttcttccgagatcattcttaccaagaggaggcagcaatggaattgaaagtagaagatcctttctactgggtgagccctggagtgctggttctcctcgcggtgctgcctgtgctcctcctgcagatcactcttggcctcgtcttcctctgcctgcagtacagactgagaggaaaacttcgagcagagatagagaatctccaccggacttttgagtcctttggtgttctaggaccccaggttaaggaaccaaaaaagacagggcaattccttgaagagctacgaaatcccttctgagtgatgtcacatcttggcaggggtggaggagagcctggttgcccagggatttgtccttggggacatctcatccatcaagttgcacactcactggcatctttgctatggggacattccaatttgcactttcaggaacactctgaattccaagtagaattgatttcccttcttctgtcatctaccttttctcttcattttcccatttttattacccttctttccatttctctctccagtcttccacctggaagccctctctggctaaggacaggcaggtgcccctctctccatcagaggacacctgtactggagagcaacacaggatggtctctgccatgaactggaggccaggaatctcctcactgaaaattacagtatggtaactttgcaaatggtggttgtttcttccaagactccagccctgattgcgcaaaactgaaaggcatgtgaagggaaggaagaggaagagtgcaaaacattgaagagagagctgagtgagctgaagagtgaggatatgagtagccccaacccaaacctggagatggggagaaacctacagaatactagccagagctcctccttgtcttggcagcctactagggacctggggaagcaaaaacgaaagctgggcaacatgcctgctttagaatgttttccttctacttacacatcttccacaggtctcagaatctttccttcctctcatccttttctcctatcttcatatctatcagagtatccactgtttattcaacaactactacttgatggtcagacacaaacaaacaagctaggtgctaattaataaagatacgagttttggccgggtgcggtggctcacgcctgtaatcccagcactttgggaggccgaggcgggcgaatcacgaggtcaggagttcaagaccagcctggccaacatggtgaaaccccatctctactaaaaatacaaacaattaactgagcatagtggtgggcacctataataccagctactccggaggctgaggcaggagaatcgcttgaacccaggaggcagaggttgcagtgagctgagatcgcgccactgcactctagccggagtgacagagtaagactctgtctcaaaaataaataaataaataaataaataaataaataaataaataaaaaataataatacaagttttcataagcacacttctaa

SEQ ID NO: 18839 - DNA, 1620 bp, Homo sapiens
  source 1..1620: mol_type = unassigned DNA
atggcaagcttatcgagaccctctctgcccagctgcctctgctccttcctcctcctcctcctcctccaagtgtcttccagctatgcagggcagttcagagtgataggaccaagacaccctatccgggctctggtcggggatgaagtggaattgccatgtcgcatatctcctgggaagaacgctacaggcatggaggtggggtggtaccgcccccccttctctagggtggttcatctctacagaaatggcaaggaccaagatggagaccaggcacctgaatatcggggccggacagagctgctgaaagatgctattggtgagggaaaggtgactctcaggatccggaatgtaaggttctcagatgaaggaggtttcacctgcttcttccgagatcattcttaccaagaggaggcagcaatggaattgaaagtagaagatcctttctactgggtgagccctggagtgctggttctcctcgcggtgctgcctgtgctcctcctgcagatcactgttggcctcgtcttcctctgcctgcagtacagactgagaggaaaacttcgagcagagatagagaatctccaccggacttttgagtcctttggtgttctaggaccccaggttaaggaaccaaaaaagacagggcaattccttgaagagctactcttccacctggaagccctctctggctaaggacaggcaggtgcccctctctccatcagaggacacctgtactggagagcaacacaggatggtctctgccatgaactggaggccaggaatctcctcactgaaaattacagtatggtaactttgcaaatggtggttgtttcttccaagactccagccctgattgcgcaaaactgaaaggcatgtgaagggaaggaagaggaagagtgcaaaacattgaagagagagctgagtgagctgaagagtgaggatatgagtagccccaacccaaacctggagatggggagaaacctacagaatactagccagagctcctccttgtcttggcagcctactagggacctggggaagcaaaaacgaaagctgggcaacatgcctgctttagaatgttttccttctacttacacatcttccacaggtctcagaatctttccttcctctcatccttttctcctatcttcatatctatcagagtatccactgtttattcaacaactactacttgatggtcagacacaaacaaacaagctaggtgctaattaataaagatacgagttttggccgggtgcggtggctcacgcctgtaatcccagcactttgggaggccgaggcgggcgaatcacgaggtcaggagttcaagaccagcctggccaacatggtgaaaccccatctctactaaaaatacaaacaattaactgagcatagtggtgggcacctataataccagctactccggaggctgaggcaggagaatcgcttgaacccaggaggcagaggttgcagtgagctgagatcgcgccactgcactctagccggagtgacagagtaagactctgtctcaaaaataaataaataaataaataaataaataaataaataaataaataaataaataaaaaataataatacaagttttcataagcacacttctaa

SEQ ID NO: 18840 - DNA, 1572 bp, Homo sapiens
  source 1..1572: mol_type = unassigned DNA
atggcaagcttatcgagaccctctctgcccagctgcctctgctccttcctcctcctcctcctcctccaagtgtcttccagctatgcagggcagttcagagtgataggaccaagacaccctatccgggctctggtcggggatgaagtggaattgccatgtcgcatatctcctgggaagaacgctacaggcatggaggtggggtggtaccgcccccccttctctagggtggttcatctctacagaaatggcaaggaccaagatggagaccaggcacctgaatatcggggccggacagagctgctgaaagatgctattggtgagggaaaggtgactctcaggatccggaatgtaaggttctcagatgaaggaggtttcacctgcttcttccgagatcattcttaccaagaggaggcagcaatggaattgaaagtagaagatcctttctactgggtgagccctggagtgctggttctcctcgcggtgctgcctgtgctcctcctgcagatcactgttggcctcgtcttcctctgcctgcagtacagactgagaggaaaacttcgagcagagatagagaatctccaccggacttttgggcaattccttgaagagctactcttccacctggaagccctctctggctaaggacaggcaggtgcccctctctccatcagaggacacctgtactggagagcaacacaggatggtctctgccatgaactggaggccaggaatctcctcactgaaaattacagtatggtaactttgcaaatggtggttgtttcttccaagactccagccctgattgcgcaaaactgaaaggcatgtgaagggaaggaagaggaagagtgcaaaacattgaagagagagctgagtgagctgaagagtgaggatatgagtagccccaacccaaacctggagatggggagaaacctacagaatactagccagagctcctccttgtcttggcagcctactagggacctggggaagcaaaaacgaaagctgggcaacatgcctgctttagaatgttttccttctacttacacatcttccacaggtctcagaatctttccttcctctcatccttttctcctatcttcatatctatcagagtatccactgtttattcaacaactactacttgatggtcagacacaaacaaacaagctaggtgctaattaataaagatacgagttttggccgggtgcggtggctcacgcctgtaatcccagcactttgggaggccgaggcgggcgaatcacgaggtcaggagttcaagaccagcctggccaacatggtgaaaccccatctctactaaaaatacaaacaattaactgagcatagtggtgggcacctataataccagctactccggaggctgaggcaggagaatcgcttgaacccaggaggcagaggttgcagtgagctgagatcgcgccactgcactctagccggagtgacagagtaagactctgtctcaaaaataaataaataaataaataaataaataaataaataaataaataaataaataaaaaataataatacaagttttcataagcacacttctaa

SEQ ID NO: 18841 - DNA, 1730 bp, Homo sapiens
  source 1..1730: mol_type = unassigned DNA
ggcagttcagagtgataggaccaagacaccctatccgggctctggtcggggatgaagtggaattgccatgtcgcatatctcctgggaagaacgctacaggcatggaggtggggtggtaccgcccccccttctctagggtggttcatctctacagaaatggcaaggaccaagatggagaccaggcacctgaatatcggggccggacagagctgctgaaagatgctattggtgagggaaaggtgactctcaggatccggaatgtaaggttctcagatgaaggaggtttcacctgcttcttccgagatcattcttaccaagaggaggcagcaatggaattgaaagtagaagatcctttctactgggtgagccctggagtgctggttctcctcgcggtgctgcctgtgctcctcctgcagatcactgttggcctcgtcttcctctgcctgcagtacagactgagaggaaaacttcgagcagagatagagaatctccaccggacttttgggcaattccttgaagagctacgaaatcccttctgagtgatgtcacatcttggcaggggtggaggagagcctggttgcccagggatttgtccttggggacatctcatccatcaagttgcacactcactggcatctttgctatggggacattccaatttgcactttcaggaacactctgaattccaagtagaattgatttcccttcttctgtcatctaccttttctcttcattttcccatttttattacccttctttccatttctctctccagtcttccacctggaagccctctctggctaaggacaggcaggtgcccctctctccatcagaggacacctgtactggagagcaacacaggatggtctctgccatgaactggaggccaggaatctcctcactgaaaattacagtatggtaactttgcaaatggtggttgtttcttccaagactccagccctgattgcgcaaaactgaaaggcatgtgaagggaaggaagaggaagagtgcaaaacattgaagagagagctgagtgagctgaagagtgaggatatgagtagccccaacccaaacctggagatggggagaaacctacagaatactagccagagctcctccttgtcttggcagcctactagggacctggggaagcaaaaacgaaagctgggcaacatgcctgctttagaatgttttccttctacttacacatcttccacaggtctcagaatctttccttcctctcatccttttctcctatcttcatatctatcagagtatccactgtttattcaacaactactacttgatggtcagacacaaacaaacaagctaggtgctaattaataaagatatgagttttggccgggtgcggtggctcacgcctgtaatcccagcactttgggaggccgaggcgggcgaatcacgaggtcaggagttcgagaccagcctggccaacatggtgaaaccccatctctactaaaaatacaaacaattaactgagcatagtggtgggcacctataataccagctactccggaggctgaggcaggagaatcgcttgaacccaggaggcagaggttgcagtgagctgagatcgcgccactgcactctagccagagtgacagagtaagactctgtctcaaaaataaataaataaataaataaataaataaataaataaataaataaataaaaaataataatacaagttttcataagcacacttctaa

SEQ ID NO: 18842 - DNA, 1587 bp, Homo sapiens
  source 1..1587: mol_type = unassigned DNA
atggcaagcttatcgagaccctctctgcccagctgcctctgctccttcctcctcctcctcctcctccaagtgtcttccagctatgcagatcctttctactgggtgagccctggagtgctggttctcctcgcggtgctgcctgtgctcctcctgcagatcactgttggcctcgtcttcctctgcctgcagtacagactgagaggaaaacttcgagcagagatagagaatctccaccggacttttgatccccactttctgagggtgccctgctggaagataaccctgtttgtaattgtgccggttcttggacccttggttgccttgatcatctgctacaactggctacatcgaagactagcagggcaattccttgaagagctacgaaatcccttctgagtgatgtcacatcttggcaggggtggaggagagcctggttgcccagggatttgtccttggggacatctcatccatcaagttgcacactcactggcatctttgctatggggacattccaatttgcactttcaggaacactctgaattccaagtagaattgatttcccttcttctgtcatctaccttttctcttcattttcccatttttattacccttctttccatttctctctccagtcttccacctggaagccctctctggctaaggacaggcaggtgcccctctctccatcagaggacacctgtactggagagcaacacaggatggtctctgccatgaactggaggccaggaatctcctcactgaaaattacagtatggtaactttgcaaatggtggttgtttcttccaagactccagccctgattgcgcaaaactgaaaggcatgtgaagggaaggaagaggaagagtgcaaaacattgaagagagagctgagtgagctgaagagtgaggatatgagtagccccaacccaaacctggagatggggagaaacctacagaatactagccagagctcctccttgtcttggcagcctactagggacctggggaagcaaaaacgaaagctgggcaacatgcctgctttagaatgttttccttctacttacacatcttccacaggtctcagaatctttccttcctctcatccttttctcctatcttcatatctatcagagtatccactgtttattcaacaactactacttgatggtcagacacaaacaaacaagctaggtgctaattaataaagatatgagttttggccgggtgcggtggctcacgcctgtaatcccagcactttgggaggccgaggcgggcgaatcacgaggtcaggagttcgagaccagcctggccaacatggtgaaaccccatctctactaaaaatacaaacaattaactgagcatagtggtgggcacctataataccagctactccggaggctgaggcaggagaatcgcttgaacccaggaggcagaggttgcagtgagctgagatcgcgccactgcactctagccagagtgacagagtaagactctgtctcaaaaataaataaataaataaataaataaataaataaataaataaataaataaaaaataataatacaagttttcataagcacacttctaa

SEQ ID NO: 18843 - DNA, 1541 bp, Homo sapiens
  source 1..1541: mol_type = unassigned DNA
agcttatcgagaccctctctgcccagctgcctctgctccttcctcctcctcctcctcctccaagtgtcttccagctatgcagggcagttcagagtgataggaccaagacaccctatccgggctctggtcggggatgaagtggaattgccatgtcgcatatctcctgggaagaacgctacaggcatggaggtggggtggtaccgcccccccttctctagggtggttcatctctacagaaatggcaaggaccaagatggagaccaggcacctgaatatcggggccggacagagctgctgaaagatgctattggtgagggaaaggtgactctcaggatccggaatgtaaggttctcagatgaaggaggtttcacctgcttcttccgagatcattcttaccaagaggaggcagcaatggaattgaaagtagaagatcctttctactgggtgagccctggagtgctggttctcctcgcggtgctgcctgtgctcctcctgcagatcactgttggcctcgtcttcctctgcctgcagtacagactgagaggaaaacttcgagcagagatagagaatctccaccggacttttgtcttccacctggaagccctctctggctaaggacaggcaggtgcccctctctccatcagaggacacctgtactggagagcaacacaggatggtctctgccatgaactggaggccaggaatctcctcactgaaaattacagtatggtaactttgcaaatggtggttgtttcttccaagactccagccctgattgcgcaaaactgaaaggcatgtgaagggaaggaagaggaagagtgcaaaacattgaagagagagctgagtgagctgaagagtgaggatatgagtagccccaacccaaacctggagatggggagaaacctacagaatactagccagagctcctccttgtcttggcagcctactagggacctggggaagcaaaaacgaaagctgggcaacatgcctgctttagaatgttttccttctacttacacatcttccacaggtctcagaatctttccttcctctcatccttttctcctatcttcatatctatcagagtatccactgtttattcaacaactactacttgatggtcagacacaaacaaacaagctaggtgctaattaataaagatatgagttttggccgggtgcggtggctcacgcctgtaatcccagcactttgggaggccgaggcgggcgaatcacgaggtcaggagttcgagaccagcctggccaacatggtgaaaccccatctctactaaaaatacaaacaattaactgagcatagtggtgggcacctataataccagctactccggaggctgaggcaggagaatcgcttgaacccaggaggcagaggttgcagtgagctgagatcgcgccactgcactctagccagagtgacagagtaagactctgtctcaaaaataaataaataaataaataaataaataaataaataaataaataaataaaaaataataatacaagttttcataagcacacttctaa

SEQ ID NO: 18844 - DNA, 1579 bp, Homo sapiens
  source 1..1579: mol_type = unassigned DNA
atggcaagcttatcgagaccctctctgcccagctgcctctgctccttcctcctcctcctcctcctccaagtgtcttccagctatgcagatcctttctactgggtgagccctggagtgctggttctcctcgcggtgctgcctgtgctcctcctgcagatcactcttggcctcgtcttcctctgcctgcagtacagactgagaggaaaacttcgagcagagatagagaatctccaccggacttttgatccccactttctgagggtgccctgctggaagataaccctgtttgtaattgtgccggttcttggacccttggttgccttgatcatctgctacaactggctacatcgaagactagcagggcaattccttgaagagctacgaaatcccttctgagtgatgtcacatcttggcaggggtggaggagagcctggttgcccagggatttgtccttggggacatctcatccatcaagttgcacactcactggcatctttgctatggggacattccaatttgcactttcaggaacactctgaattccaagtagaattgatttcccttcttctgtcatctaccttttctcttcattttcccatttttattacccttctttccatttctctctccagtcttccacctggaagccctctctggctaaggacaggcaggtgcccctctctccatcagaggacacctgtactggagagcaacacaggatggtctctgccatgaactggaggccaggaatctcctcactgaaaattacagtatggtaactttgcaaatggtggttgtttcttccaagactccagccctgattgcgcaaaactgaaaggcatgtgaagggaaggaagaggaagagtgcaaaacattgaagagagagctgagtgagctgaagagtgaggatatgagtagccccaacccaaacctggagatggggagaaacctacagaatactagccagagctcctccttgtcttggcagcctactagggacctggggaagcaaaaacgaaagctgggcaacatgcctgctttagaatgttttccttctacttacacatcttccacaggtctcagaatctttccttcctctcatccttttctcctatcttcatatctatcagagtatccactgtttattcaacaactactacttgatggtcagacacaaacaaacaagctaggtgctaattaataaagatacgagttttggccgggtgcggtggctcacgcctgtaatcccagcactttgggaggccgaggcgggcgaatcacgaggtcaggagttcaagaccagcctggccaacatggtgaaaccccatctctactaaaaatacaaacaattaactgagcatagtggtgggcacctataataccagctactccggaggctgaggcaggagaatcgcttgaacccaggaggcagaggttgcagtgagctgagatcgcgccactgcactctagccggagtgacagagtaagactctgtctcaaaaataaataaataaataaataaataaataaataaataaataaaaaataataatacaagttttcataagcacacttctaa

SEQ ID NO: 18845 - DNA, 1870 bp, Homo sapiens
  source 1..1870: mol_type = unassigned DNA
atggcaagcttatcgagaccctctctgcccagctgcctctgctccttcctcctcctcctcctcctccaagtgtcttccagctatgcagggcagttcagagtgataggaccaagacaccctatccgggctctggtcggggatgaagtggaattgccatgtcgcatatctcctgggaagaacgctacaggcatggaggtggggtggtaccgcccccccttctctagggtggttcatctctacagaaatggcaaggaccaagatggagaccaggcacctgaatatcggggccggacagagctgctgaaagatgctattggtgagggaaaggtgactctcaggatccggaatgtaaggttctcagatgaaggaggtttcacctgcttcttccgagatcattcttaccaagaggaggcagcaatggaattgaaagtagaagatcctttctactgggtgagccctggagtgctggttctcctcgcggtgctgcctgtgctcctcctgcagatcactgttggcctcgtcttcctctgcctgcagtacagactgagaggaaaacttcgagcagagatagagaatctccaccggacttttgagtcctttggtgttctaggaccccaggttaaggaaccaaaaaagacagggcaattccttgaagagctacgaaatcccttctgagtgatgtcacatcttggcaggggtggaggagagcctggttgcccagggatttgtccttggggacatctcatccatcaagttgcacactcactggcatctttgctatggggacattccaatttgcactttcaggaacactctgaattccaagtagaattgatttcccttcttctgtcatctaccttttctcttcattttcccatttttattacccttctttccatttctctctccagtcttccacctggaagccctctctggctaaggacaggcaggtgcccctctctccatcagaggacacctgtactggagagcaacacaggatggtctctgccatgaactggaggccaggaatctcctcactgaaaattacagtatggtaactttgcaaatggtggttgtttcttccaagactccagccctgattgcgcaaaactgaaaggcatgtgaagggaaggaagaggaagagtgcaaaacattgaagagagagctgagtgagctgaagagtgaggatatgagtagccccaacccaaacctggagatggggagaaacctacagaatactagccagagctcctccttgtcttggcagcctactagggacctggggaagcaaaaacgaaagctgggcaacatgcctgctttagaatgttttccttctacttacacatcttccacaggtctcagaatctttccttcctctcatccttttctcctatcttcatatctatcagagtatccactgtttattcaacaactactacttgatggtcagacacaaacaaacaagctaggtgctaattaataaagatacgagttttggccgggtgcggtggctcacgcctgtaatcccagcactttgggaggccgaggcgggcgaatcacgaggtcaggagttcaagaccagcctggccaacatggtgaaaccccatctctactaaaaatacaaacaattaactgagcatagtggtgggcacctataataccagctactccggaggctgaggcaggagaatcgcttgaacccaggaggcagaggttgcagtgagctgagatcgcgccactgcactctagccggagtgacagagtaagactctgtctcaaaaataaataaataaataaataaataaataaataaataaataaataaataaataaaaaataataatacaagttttcataagcacacttctaa

SEQ ID NO: 18846 - DNA, 1866 bp, Homo sapiens
  source 1..1866: mol_type = unassigned DNA
atggcaagcttatcgagaccctctctgcccagctgcctctgctccttcctcctcctcctcctcctccaagtgtcttccagctatgcagggcagttcagagtgataggaccaagacaccctatccgggctctggtcggggatgaagtggaattgccatgtcgcatatctcctgggaagaacgctacaggcatggaggtggggtggtaccgcccccccttctctagggtggttcatctctacagaaatggcaaggaccaagatggagaccaggcacctgaatatcggggccggacagagctgctgaaagatgctattggtgagggaaaggtgactctcaggatccggaatgtaaggttctcagatgaaggaggtttcacctgcttcttccgagatcattcttaccaagaggaggcagcaatggaattgaaagtagaagatcctttctactgggtgagccctggagtgctggttctcctcgcggtgctgcctgtgctcctcctgcagatcactgttggcctcgtcttcctctgcctgcagtacagactgagaggaaaacttcgagcagagatagagaatctccaccggacttttgagtcctttggtgttctaggaccccaggttaaggaaccaaaaaagacagggcaattccttgaagagctacgaaatcccttctgagtgatgtcacatcttggcaggggtggaggagagcctggttgcccagggatttgtccttggggacatctcatccatcaagttgcacactcactggcatctttgctatggggacattccaatttgcactttcaggaacactctgaattccaagtagaattgatttcccttcttctgtcatctaccttttctcttcattttcccatttttattacccttctttccatttctctctccagtcttccacctggaagccctctctggctaaggacaggcaggtgcccctctctccatcagaggacacctgtactggagagcaacacaggatggtctctgccatgaactggaggccaggaatctcctcactgaaaattacagtatggtaactttgcaaatggtggttgtttcttccaagactccagccctgattgcgcaaaactgaaaggcatgtgaagggaaggaagaggaagagtgcaaaacattgaagagagagctgagtgagctgaagagtgaggatatgagtagccccaacccaaacctggagatggggagaaacctacagaatactagccagagctcctccttgtcttggcagcctactagggacctggggaagcaaaaacgaaagctgggcaacatgcctgctttagaatgttttccttctacttacacatcttccacaggtctcagaatctttccttcctctcatccttttctcctatcttcatatctatcagagtatccactgtttattcaacaactactacttgatggtcagacacaaacaaacaagctaggtgctaattaataaagatatgagttttggccgggtgcggtggctcacgcctgtaatcccagcactttgggaggccgaggcgggcgaatcacgaggtcaggagttcgagaccagcctggccaacatggtgaaaccccatctctactaaaaatacaaacaattaactgagcatagtggtgggcacctataataccagctactccggaggctgaggcaggagaatcgcttgaacccaggaggcagaggttgcagtgagctgagatcgcgccactgcactctagccagagtgacagagtaagactctgtctcaaaaataaataaataaataaataaataaataaataaataaataaataaataaaaaataataatacaagttttcataagcacacttctaa

SEQ ID NO: 18847 - DNA, 1866 bp, Homo sapiens
  source 1..1866: mol_type = unassigned DNA
atggcaagcttatcgagaccctctctgcccagctgcctctgctccttcctcctcctcctcctcctccaagtgtcttccagctatgcagggcagttcagagtgataggaccaagacaccctatccgggctctggtcggggatgaagtggaattgccatgtcgcatatctcctgggaagaacgctacaggcatggaggtggggtggtaccgcccccccttctctagggtggttcatctctacagaaatggcaaggaccaagatggagaccaggcacctgaatatcggggccggacagagctgctgaaagatgctattggtgagggaaaggtgactctcaggatccggaatgtaaggttctcagatgaaggaggtttcacctgcttcttccgagatcattcttaccaagaggaggcagcaatggaattgaaagtagaagatcctttctactgggtgagccctggagtgctggttctcctcgcggtgctgcctgtgctcctcctgcagatcactgttggcctcgtcttcctctgcctgcagtacagactgagaggaaaacttcgagcagagatagagaatctccaccggacttttgagtcctttggtgttctaggaccccaggttaaggaaccaaaaaagacagggcaattccttgaagagctacgaaatcccttctgagtgatgtcacatcttggcaggggtggaggagagcctggttgcccagggatttgtccttggggacatctcatccatcaagttgcacactcactggcatctttgctatggggacattccaatttgcactttcaggaacactctgaattccaagtagaattgatttcccttcttctgtcatctaccttttctcttcattttcccatttttattacccttctttccatttctctctccagtcttccacctggaagccctctctggctaaggacaggcaggtgcccctctctccatcagaggacacctgtactggagagcaacacaggatggtctctgccatgaactggaggccaggaatctcctcactgaaaattacagtatggtaactttgcaaatggtggttgtttcttccaagactccagccctgattgcgcaaaactgaaaggcatgtgaagggaaggaagaggaagagtgcaaaacattgaagagagagctgagtgagctgaagagtgaggatatgagtagccccaacccaaacctggagatggggagaaacctacagaatactagccagagctcctccttgtcttggcagcctactagggacctggggaagcaaaaacgaaagctgggcaacatgcctgctttagaatgttttccttctacttacacatcttccacaggtctcagaatctttccttcctctcatccttttctcctatcttcatatctatcagagtatccactgtttattcaacaactactacttgatggtcagacacaaacaaacaagctaggtgctaattaataaagatacgagttttggccgggtgcggtggctcacgcctgtaatcccagcactttgggaggccgaggcgggcgaatcacgaggtcaggagttcaagaccagcctggccaacatggtgaaaccccatctctactaaaaatacaaacaattaactgagcatagtggtgggcacctataataccagctactccggaggctgaggcaggagaatcgcttgaacccaggaggcagaggttgcagtgagctgagatcgcgccactgcactctagccggagtgacagagtaagactctgtctcaaaaataaataaataaataaataaataaataaataaataaataaataaataaaaaataataatacaagttttcataagcacacttctaa

SEQ ID NO: 18848 - DNA, 1685 bp, Homo sapiens
  source 1..1685: mol_type = unassigned DNA
atggcaagcttatcgagaccctctctgcccagctgcctctgctccttcctcctcctcctcctcctccaagtgtcttccagctatgcagggcagttcagagtgataggaccaagacaccctatccgggctctggtcggggatgaagtggaattgccatgtcgcatatctcctgggaagaacgctacaggcatggaggtggggtggtaccgcccccccttctctagggtggttcatctctacagaaatggcaaggaccaagatggagaccaggcacctgaatatcggggccggacagagctgctgaaagatgctattggtgagggaaaggtgactctcaggatccggaatgtaaggttctcagatgaaggaggtttcacctgcttcttccgagatcattcttaccaagaggaggcagcaatggaattgaaagtagaagatcctttctactgggtgagccctggagtgctggttctcctcgcggtgctgcctgtgctcctcctgcagatcactgttggcctcgtcttcctctgcctgcagtacagactgagaggaaaacttcgagcagagatagagaatctccaccggacttttgatccccactttctgagggtgccctgctggaagataaccctgtttgtaattgtgccggttcttggacccttggttgccttgatcatctgctacaactggctacatcgaagactagcagggcaattccttgaagagctactcttccacctggaagccctctctggctaaggacaggcaggtgcccctctctccatcagaggacacctgtactggagagcaacacaggatggtctctgccatgaactggaggccaggaatctcctcactgaaaattacagtatggtaactttgcaaatggtggttgtttcttccaagactccagccctgattgcgcaaaactgaaaggcatgtgaagggaaggaagaggaagagtgcaaaacattgaagagagagctgagtgagctgaagagtgaggatatgagtagccccaacccaaacctggagatggggagaaacctacagaatactagccagagctcctccttgtcttggcagcctactagggacctggggaagcaaaaacgaaagctgggcaacatgcctgctttagaatgttttccttctacttacacatcttccacaggtctcagaatctttccttcctctcatccttttctcctatcttcatatctatcagagtatccactgtttattcaacaactactacttgatggtcagacacaaacaaacaagctaggtgctaattaataaagatatgagttttggccgggtgcggtggctcacgcctgtaatcccagcactttgggaggccgaggcgggcgaatcacgaggtcaggagttcgagaccagcctggccaacatggtgaaaccccatctctactaaaaatacaaacaattaactgagcatagtggtgggcacctataataccagctactccggaggctgaggcaggagaatcgcttgaacccaggaggcagaggttgcagtgagctgagatcgcgccactgcactctagccagagtgacagagtaagactctgtctcaaaaataaataaataaataaataaataaataaataaataaataaataaataaaaaataataatacaagttttcataagcacacttctaa

SEQ ID NO: 18849 - DNA, 2146 bp, Homo sapiens
  source 1..2146: mol_type = unassigned DNA
agcccttttgtgtgagtgcctggcaagggtgacgtggggctgtttctgcgggcacagctgcagcaattaccggagtggaggcagggcccaggcagcactgccctccaagatcttcccttgggcttttcagcagtaaggggacatgcaccccaagggcctccacttggcctgaccttgctgcgggggctctctgtccccaggaacagtagagatggcaagcttatcgagaccctctctgcccagctgcctctgctccttcctcctcctcctcctcctccaagtgtcttccagctatgcagggcagttcagagtgataggaccaagacaccctatccgggctctggtcggggatgaagtggaattgccatgtcgcatatctcctgggaagaacgctacaggcatggaggtggggtggtaccgcccccccttctctagggtggttcatctctacagaaatggcaaggaccaagatggagaccaggcacctgaatatcggggccggacagagctgctgaaagatgctattggtgagggaaaggtgactctcaggatccggaatgtaaggttctcagatgaaggaggtttcacctgcttcttccgagatcattcttaccaagaggaggcagcaatggaattgaaagtagaagatcctttctactgggtgagccctggagtgctggttctcctcgcggtgctgcctgtgctcctcctgcagatcactgttggcctcgtcttcctctgcctgcagtacagactgagaggaaaacttcgagcagagatagagaatctccaccggacttttgatccccactttctgagggtgccctgctggaagataaccctgtttgtaattgtgccggttcttggacccttggttgccttgatcatctgctacaactggctacatcgaagactagcagggcaattccttgaagagctacgaaatcccttctgagtgatgtcacatcttggcaggggtggaggagagcctggttgcccagggatttgtccttggggacatctcatccatcaagttgcacactcactggcatctttgctatggggacattccaatttgcactttcaggaacactctgaattccaagtagaattgatttcccttcttctgtcatctaccttttctcttcattttcccatttttattacccttctttccatttctctctccagtcttccacctggaagccctctctggctaaggacaggcaggtgcccctctctccatcagaggacacctgtactggagagcaacacaggatggtctctgccatgaactggaggccaggaatctcctcactgaaaattacagtatggtaactttgcaaatggtggttgtttcttccaagactccagccctgattgcgcaaaactgaaaggcatgtgaagggaaggaagaggaagagtgcaaaacattgaagagagagctgagtgagctgaagagtgaggatatgagtagccccaacccaaacctggagatggggagaaacctacagaatactagccagagctcctccttgtcttggcagcctactagggacctggggaagcaaaaacgaaagctgggcaacatgcctgctttagaatgttttccttctacttacacatcttccacaggtctcagaatctttccttcctctcatccttttctcctatcttcatatctatcagagtatccactgtttattcaacaactactacttgatggtcagacacaaacaaacaagctaggtgctaattaataaagatacgagttttggccgggtgcggtggctcacgcctgtaatcccagcactttgggaggccgaggcgggcgaatcacgaggtcaggagttcaagaccagcctggccaacatggtgaaaccccatctctactaaaaatacaaacaattaactgagcatagtggtgggcacctataataccagctactccggaggctgaggcaggagaatcgcttgaacccaggaggcagaggttgcagtgagctgagatcgcgccactgcactctagccggagtgacagagtaagactctgtctcaaaaataaataaataaataaataaataaataaataaataaataaataaataaaaaataataatacaagttttcataagcacacttctaa

SEQ ID NO: 18850 - DNA, 1730 bp, Homo sapiens; identical to SEQ ID NO: 18841
  source 1..1730: mol_type = unassigned DNA

SEQ ID NO: 18851 - DNA, 1726 bp, Homo sapiens
  source 1..1726: mol_type = unassigned DNA
ggcagttcagagtgataggaccaagacaccctatccgggctctggtcggggatgaagtggaattgccatgtcgcatatctcctgggaagaacgctacaggcatggaggtggggtggtaccgcccccccttctctagggtggttcatctctacagaaatggcaaggaccaagatggagaccaggcacctgaatatcggggccggacagagctgctgaaagatgctattggtgagggaaaggtgactctcaggatccggaatgtaaggttctcagatgaaggaggtttcacctgcttcttccgagatcattcttaccaagaggaggcagcaatggaattgaaagtagaagatcctttctactgggtgagccctggagtgctggttctcctcgcggtgctgcctgtgctcctcctgcagatcactgttggcctcgtcttcctctgcctgcagtacagactgagaggaaaacttcgagcagagatagagaatctccaccggacttttgggcaattccttgaagagctacgaaatcccttctgagtgatgtcacatcttggcaggggtggaggagagcctggttgcccagggatttgtccttggggacatctcatccatcaagttgcacactcactggcatctttgctatggggacattccaatttgcactttcaggaacactctgaattccaagtagaattgatttcccttcttctgtcatctaccttttctcttcattttcccatttttattacccttctttccatttctctctccagtcttccacctggaagccctctctggctaaggacaggcaggtgcccctctctccatcagaggacacctgtactggagagcaacacaggatggtctctgccatgaactggaggccaggaatctcctcactgaaaattacagtatggtaactttgcaaatggtggttgtttcttccaagactccagccctgattgcgcaaaactgaaaggcatgtgaagggaaggaagaggaagagtgcaaaacattgaagagagagctgagtgagctgaagagtgaggatatgagtagccccaacccaaacctggagatggggagaaacctacagaatactagccagagctcctccttgtcttggcagcctactagggacctggggaagcaaaaacgaaagctgggcaacatgcctgctttagaatgttttccttctacttacacatcttccacaggtctcagaatctttccttcctctcatccttttctcctatcttcatatctatcagagtatccactgtttattcaacaactactacttgatggtcagacacaaacaaacaagctaggtgctaattaataaagatacgagttttggccgggtgcggtggctcacgcctgtaatcccagcactttgggaggccgaggcgggcgaatcacgaggtcaggagttcaagaccagcctggccaacatggtgaaaccccatctctactaaaaatacaaacaattaactgagcatagtggtgggcacctataataccagctactccggaggctgaggcaggagaatcgcttgaacccaggaggcagaggttgcagtgagctgagatcgcgccactgcactctagccggagtgacagagtaagactctgtctcaaaaataaataaataaataaataaataaataaataaataaataaataaaaaataataatacaagttttcataagcacacttctaa

SEQ ID NO: 18852 - DNA, 1685 bp, Homo sapiens
  source 1..1685: mol_type = unassigned DNA
atggcaagcttatcgagaccctctctgcccagctgcctctgctccttcctcctcctcctcctcctccaagtgtcttccagctatgcagggcagttcagagtgataggaccaagacaccctatccgggctctggtcggggatgaagtggaattgccatgtcgcatatctcctgggaagaacgctacaggcatggaggtggggtggtaccgcccccccttctctagggtggttcatctctacagaaatggcaaggaccaagatggagaccaggcacctgaatatcggggccggacagagctgctgaaagatgctattggtgagggaaaggtgactctcaggatccggaatgtaaggttctcagatgaaggaggtttcacctgcttcttccgagatcattcttaccaagaggaggcagcaatggaattgaaagtagaagatcctttctactgggtgagccctggagtgctggttctcctcgcggtgctgcctgtgctcctcctgcagatcactgttggcctcgtcttcctctgcctgcagtacagactgagaggaaaacttcgagcagagatagagaatctccaccggacttttgatccccactttctgagggtgccctgctggaagataaccctgtttgtaattgtgccggttcttggacccttggttgccttgatcatctgctacaactggctacatcgaagactagcagggcaattccttgaagagctactcttccacctggaagccctctctggctaaggacaggcaggtgcccctctctccatcagaggacacctgtactggagagcaacacaggatggtctctgccatgaactggaggccaggaatctcctcactgaaaattacagtatggtaactttgcaaatggtggttgtttcttccaagactccagccctgattgcgcaaaactgaaaggcatgtgaagggaaggaagaggaagagtgcaaaacattgaagagagagctgagtgagctgaagagtgaggatatgagtagccccaacccaaacctggagatggggagaaacctacagaatactagccagagctcctccttgtcttggcagcctactagggacctggggaagcaaaaacgaaagctgggcaacatgcctgctttagaatgttttccttctacttacacatcttccacaggtctcagaatctttccttcctctcatccttttctcctatcttcatatctatcagagtatccactgtttattcaacaactactacttgatggtcagacacaaacaaacaagctaggtgctaattaataaagatacgagttttggccgggtgcggtggctcacgcctgtaatcccagcactttgggaggccgaggcgggcgaatcacgaggtcaggagttcaagaccagcctggccaacatggtgaaaccccatctctactaaaaatacaaacaattaactgagcatagtggtgggcacctataataccagctactccggaggctgaggcaggagaatcgcttgaacccaggaggcagaggttgcagtgagctgagatcgcgccactgcactctagccggagtgacagagtaagactctgtctcaaaaataaataaataaataaataaataaataaataaataaataaataaataaaaaataataatacaagttttcataagcacacttctaa

SEQ ID NO: 18853 - DNA, 1612 bp, Homo sapiens
  source 1..1612: mol_type = unassigned DNA
atggcaagcttatcgagaccctctctgcccagctgcctctgctccttcctcctcctcctcctcctccaagtgtcttccagctatgcagggcagttcagagtgataggaccaagacaccctatccgggctctggtcggggatgaagtggaattgccatgtcgcatatctcctgggaagaacgctacaggcatggaggtggggtggtaccgcccccccttctctagggtggttcatctctacagaaatggcaaggaccaagatggagaccaggcacctgaatatcggggccggacagagctgctgaaagatgctattggtgagggaaaggtgactctcaggatccggaatgtaaggttctcagatgaaggaggtttcacctgcttcttccgagatcattcttaccaagaggaggcagcaatggaattgaaagtagaagatcctttctactgggtgagccctggagtgctggttctcctcgcggtgctgcctgtgctcctcctgcagatcactgttggcctcgtcttcctctgcctgcagtacagactgagaggaaaacttcgagcagagatagagaatctccaccggacttttgagtcctttggtgttctaggaccccaggttaaggaaccaaaaaagacagggcaattccttgaagagctactcttccacctggaagccctctctggctaaggacaggcaggtgcccctctctccatcagaggacacctgtactggagagcaacacaggatggtctctgccatgaactggaggccaggaatctcctcactgaaaattacagtatggtaactttgcaaatggtggttgtttcttccaagactccagccctgattgcgcaaaactgaaaggcatgtgaagggaaggaagaggaagagtgcaaaacattgaagagagagctgagtgagctgaagagtgaggatatgagtagccccaacccaaacctggagatggggagaaacctacagaatactagccagagctcctccttgtcttggcagcctactagggacctggggaagcaaaaacgaaagctgggcaacatgcctgctttagaatgttttccttctacttacacatcttccacaggtctcagaatctttccttcctctcatccttttctcctatcttcatatctatcagagtatccactgtttattcaacaactactacttgatggtcagacacaaacaaacaagctaggtgctaattaataaagatacgagttttggccgggtgcggtggctcacgcctgtaatcccagcactttgggaggccgaggcgggcgaatcacgaggtcaggagttcaagaccagcctggccaacatggtgaaaccccatctctactaaaaatacaaacaattaactgagcatagtggtgggcacctataataccagctactccggaggctgaggcaggagaatcgcttgaacccaggaggcagaggttgcagtgagctgagatcgcgccactgcactctagccggagtgacagagtaagactctgtctcaaaaataaataaataaataaataaataaataaataaataaataaataaaaaataataatacaagttttcataagcacacttctaa

SEQ ID NO: 18854 - DNA, 2499 bp, Homo sapiens
  source 1..2499: mol_type = unassigned DNA
agcactgccctccaagatcttcccttgggcttttcagcagtaaggggacatgcaccccaagggcctccacttggcctgaccttgctgcgggggctctctgtccccaggaacagtagagatggcaagcttatcgagaccctctctgcccagctgcctctgctccttcctcctcctcctcctcctccaagtgtcttccagctatgcagggcagttcagagtgataggaccaagacaccctatccgggctctggtcggggatgaagtggaattgccatgtcgcatatctcctgggaagaacgctacaggcatggaggtggggtggtaccgcccccccttctctagggtggttcatctctacagaaatggcaaggaccaagatggagaccaggcacctgaatatcggggccggacagagctgctgaaagatgctattggtgagggaaaggtgactctcaggatccggaatgtaaggttctcagatgaaggaggtttcacctgcttcttccgagatcattcttaccaagaggaggcagcaatggaattgaaagtagaagatcctttctactgggtgagccctggagtgctggttctcctcgcggtgctgcctgtgctcctcctgcagatcactgttggcctcgtcttcctctgcctgcagtacagactgagaggaaaacttcgagcagagatagagaatctccaccggacttttgatccccactttctgagggtgccctgctggaagataaccctgtttgtaattgtgccggttcttggacccttggttgccttgatcatctgctacaactggctacatcgaagactagcagggcaattccttgaagagctacgtaagttctcttctctctgttataagcagagaataaaaagccaggaaagggagacagaagcaacaagaggaagaggcgggctattgagggatcacattcccagaggaaaggaggagctggagagcctgggtggagggaagactcctcctgggaggtagagggcaaagaagccagctgttagagacacatttacaggtggcagagaagctggaggcactcctatctgccacctgatccattcctccttcactgcccctaagcaggaatccaaccctagctggtctcattgcccattccacagcaactgcccagtgcctcacctctcagatcaaccattgaggcaggaatggagacaagatgaccccaagggcttttcttctccctagttcaatggttttatgatacaaactactgacatacgtttttcaagttattttctccttcttctaggaaatcccttctgagtgatgtcacatcttggcaggggtggaggagagcctggttgcccagggatttgtccttggggacatctcatccatcaagttgcacactcactggcatctttgctatggggacattccaatttgcactttcaggaacactctgaattccaagtagaattgatttcccttcttctgtcatctaccttttctcttcattttcccatttttattacccttctttccatttctctctccagtcttccacctggaagccctctctggctaaggacaggcaggtgcccctctctccatcagaggacacctgtactggagagcaacacaggatggtctctgccatgaactggaggccaggaatctcctcactgaaaattacagtatggtaactttgcaaatggtggttgtttcttccaagactccagccctgattgcgcaaaactgaaaggcatgtgaagggaaggaagaggaagagtgcaaaacattgaagagagagctgagtgagctgaagagtgaggatatgagtagccccaacccaaacctggagatggggagaaacctacagaatactagccagagctcctccttgtcttggcagcctactagggacctggggaagcaaaaacgaaagctgggcaacatgcctgctttagaatgttttccttctacttacacatcttccacaggtctcagaatctttccttcctctcatccttttctcctatcttcatatctatcagagtatccactgtttattcaacaactactacttgatggtcagacacaaacaaacaagctaggtgctaattaataaagatacgagttttggccgggtgcggtggctcacgcctgtaatcccagcactttgggaggccgaggcgggcgaatcacgaggtcaggagttcaagaccagcctggccaacatggtgaaaccccatctctactaaaaatacaaacaattaactgagcatagtggtgggcacctataataccagctactccggaggctgaggcaggagaatcgcttgaacccaggaggcagaggttgcagtgagctgagatcgcgccactgcactctagccggagtgacagagtaagactctgtctcaaaaataaataaataaataaataaataaataaataaataaataaataaaaaataataatacaagttttcataagcacacttctaa

SEQ ID NO: 18855 - DNA, 1568 bp, Homo sapiens
  source 1..1568: mol_type = unassigned DNA
atggcaagcttatcgagaccctctctgcccagctgcctctgctccttcctcctcctcctcctcctccaagtgtcttccagctatgcagggcagttcagagtgataggaccaagacaccctatccgggctctggtcggggatgaagtggaattgccatgtcgcatatctcctgggaagaacgctacaggcatggaggtggggtggtaccgcccccccttctctagggtggttcatctctacagaaatggcaaggaccaagatggagaccaggcacctgaatatcggggccggacagagctgctgaaagatgctattggtgagggaaaggtgactctcaggatccggaatgtaaggttctcagatgaaggaggtttcacctgcttcttccgagatcattcttaccaagaggaggcagcaatggaattgaaagtagaagatcctttctactgggtgagccctggagtgctggttctcctcgcggtgctgcctgtgctcctcctgcagatcactgttggcctcgtcttcctctgcctgcagtacagactgagaggaaaacttcgagcagagatagagaatctccaccggacttttgggcaattccttgaagagctactcttccacctggaagccctctctggctaaggacaggcaggtgcccctctctccatcagaggacacctgtactggagagcaacacaggatggtctctgccatgaactggaggccaggaatctcctcactgaaaattacagtatggtaactttgcaaatggtggttgtttcttccaagactccagccctgattgcgcaaaactgaaaggcatgtgaagggaaggaagaggaagagtgcaaaacattgaagagagagctgagtgagctgaagagtgaggatatgagtagccccaacccaaacctggagatggggagaaacctacagaatactagccagagctcctccttgtcttggcagcctactagggacctggggaagcaaaaacgaaagctgggcaacatgcctgctttagaatgttttccttctacttacacatcttccacaggtctcagaatctttccttcctctcatccttttctcctatcttcatatctatcagagtatccactgtttattcaacaactactacttgatggtcagacacaaacaaacaagctaggtgctaattaataaagatacgagttttggccgggtgcggtggctcacgcctgtaatcccagcactttgggaggccgaggcgggcgaatcacgaggtcaggagttcaagaccagcctggccaacatggtgaaaccccatctctactaaaaatacaaacaattaactgagcatagtggtgggcacctataataccagctactccggaggctgaggcaggagaatcgcttgaacccaggaggcagaggttgcagtgagctgagatcgcgccactgcactctagccggagtgacagagtaagactctgtctcaaaaataaataaataaataaataaataaataaataaataaataaataaataaaaaataataatacaagttttcataagcacacttctaa

SEQ ID NO: 18856 - DNA, 1681 bp, Homo sapiens
  source 1..1681: mol_type = unassigned DNA
atggcaagcttatcgagaccctctctgcccagctgcctctgctccttcctcctcctcctcctcctccaagtgtcttccagctatgcagggcagttcagagtgataggaccaagacaccctatccgggctctggtcggggatgaagtggaattgccatgtcgcatatctcctgggaagaacgctacaggcatggaggtggggtggtaccgcccccccttctctagggtggttcatctctacagaaatggcaaggaccaagatggagaccaggcacctgaatatcggggccggacagagctgctgaaagatgctattggtgagggaaaggtgactctcaggatccggaatgtaaggttctcagatgaaggaggtttcacctgcttcttccgagatcattcttaccaagaggaggcagcaatggaattgaaagtagaagatcctttctactgggtgagccctggagtgctggttctcctcgcggtgctgcctgtgctcctcctgcagatcactgttggcctcgtcttcctctgcctgcagtacagactgagaggaaaacttcgagcagagatagagaatctccaccggacttttgatccccactttctgagggtgccctgctggaagataaccctgtttgtaattgtgccggttcttggacccttggttgccttgatcatctgctacaactggctacatcgaagactagcagggcaattccttgaagagctactcttccacctggaagccctctctggctaaggacaggcaggtgcccctctctccatcagaggacacctgtactggagagcaacacaggatggtctctgccatgaactggaggccaggaatctcctcactgaaaattacagtatggtaactttgcaaatggtggttgtttcttccaagactccagccctgattgcgcaaaactgaaaggcatgtgaagggaaggaagaggaagagtgcaaaacattgaagagagagctgagtgagctgaagagtgaggatatgagtagccccaacccaaacctggagatggggagaaacctacagaatactagccagagctcctccttgtcttggcagcctactagggacctggggaagcaaaaacgaaagctgggcaacatgcctgctttagaatgttttccttctacttacacatcttccacaggtctcagaatctttccttcctctcatccttttctcctatcttcatatctatcagagtatccactgtttattcaacaactactacttgatggtcagacacaaacaaacaagctaggtgctaattaataaagatacgagttttggccgggtgcggtggctcacgcctgtaatcccagcactttgggaggccgaggcgggcgaatcacgaggtcaggagttcgagaccagcctggccaacatggtgaaaccccatctctactaaaaatacaaacaattaactgagcatagtggtgggcacctataataccagctactccggaggctgaggcaggagaatcgcttgaacccaggaggcagaggttgcagtgagctgagatcgcgccactgcactctagccagagtgacagagtaagactctgtctcaaaaataaataaataaataaataaataaataaataaataaataaataaaaaataataatacaagttttcataagcacacttctaa

SEQ ID NO: 18857 - DNA, 1734 bp, Homo sapiens
  source 1..1734: mol_type = unassigned DNA
ggcagttcagagtgataggaccaagacaccctatccgggctctggtcggggatgaagtggaattgccatgtcgcatatctcctgggaagaacgctacaggcatggaggtggggtggtaccgcccccccttctctagggtggttcatctctacagaaatggcaaggaccaagatggagaccaggcacctgaatatcggggccggacagagctgctgaaagatgctattggtgagggaaaggtgactctcaggatccggaatgtaaggttctcagatgaaggaggtttcacctgcttcttccgagatcattcttaccaagaggaggcagcaatggaattgaaagtagaagatcctttctactgggtgagccctggagtgctggttctcctcgcggtgctgcctgtgctcctcctgcagatcactgttggcctcgtcttcctctgcctgcagtacagactgagaggaaaacttcgagcagagatagagaatctccaccggacttttgggcaattccttgaagagctacgaaatcccttctgagtgatgtcacatcttggcaggggtggaggagagcctggttgcccagggatttgtccttggggacatctcatccatcaagttgcacactcactggcatctttgctatggggacattccaatttgcactttcaggaacactctgaattccaagtagaattgatttcccttcttctgtcatctaccttttctcttcattttcccatttttattacccttctttccatttctctctccagtcttccacctggaagccctctctggctaaggacaggcaggtgcccctctctccatcagaggacacctgtactggagagcaacacaggatggtctctgccatgaactggaggccaggaatctcctcactgaaaattacagtatggtaactttgcaaatggtggttgtttcttccaagactccagccctgattgcgcaaaactgaaaggcatgtgaagggaaggaagaggaagagtgcaaaacattgaagagagagctgagtgagctgaagagtgaggatatgagtagccccaacccaaacctggagatggggagaaacctacagaatactagccagagctcctccttgtcttggcagcctactagggacctggggaagcaaaaacgaaagctgggcaacatgcctgctttagaatgttttccttctacttacacatcttccacaggtctcagaatctttccttcctctcatccttttctcctatcttcatatctatcagagtatccactgtttattcaacaactactacttgatggtcagacacaaacaaacaagctaggtgctaattaataaagatacgagttttggccgggtgcggtggctcacgcctgtaatcccagcactttgggaggccgaggcgggcgaatcacgaggtcaggagttcaagaccagcctggccaacatggtgaaaccccatctctactaaaaatacaaacaattaactgagcatagtggtgggcacctataataccagctactccggaggctgaggcaggagaatcgcttgaacccaggaggcagaggttgcagtgagctgagatcgcgccactgcactctagccggagtgacagagtaagactctgtctcaaaaataaataaataaataaataaataaataaataaataaataaataaataaataaaaaataataatacaagttttcataagcacacttctaa

SEQ ID NO: 18858 - DNA, 2499 bp, Homo sapiens
  source 1..2499: mol_type = unassigned DNA
agcactgccctccaagatcttcccttgggcttttcagcagtaaggggacatgcaccccaagggcctccacttggcctgaccttgctgcgggggctctctgtccccaggaacagtagagatggcaagcttatcgagaccctctctgcccagctgcctctgctccttcctcctcctcctcctcctccaagtgtcttccagctatgcagggcagttcagagtgataggaccaagacaccctatccgggctctggtcggggatgaagtggaattgccatgtcgcatatctcctgggaagaacgctacaggcatggaggtggggtggtaccgcccccccttctctagggtggttcatctctacagaaatggcaaggaccaagatggagaccaggcacctgaatatcggggccggacagagctgctgaaagatgctattggtgagggaaaggtgactctcaggatccggaatgtaaggttctcagatgaaggaggtttcacctgcttcttccgagatcattcttaccaagaggaggcagcaatggaattgaaagtagaagatcctttctactgggtgagccctggagtgctggttctcctcgcggtgctgcctgtgctcctcctgcagatcactgttggcctcgtcttcctctgcctgcagtacagactgagaggaaaacttcgagcagagatagagaatctccaccggacttttgatccccactttctgagggtgccctgctggaagataaccctgtttgtaattgtgccggttcttggacccttggttgccttgatcatctgctacaactggctacatcgaagactagcagggcaattccttgaagagctacgtaagttctcttctctctgttataagcagagaataaaaagccaggaaagggagacagaagcaacaagaggaagaggcgggctattgagggatcacattcccagaggaaaggaggagctggagagcctgggtggagggaagactcctcctgggaggtagagggcaaagaagccagctgttagagacacatttacaggtggcagagaagctggaggcactcctatctgccacctgatccattcctccttcactgcccctaagcaggaatccaaccctagctggtctcattgcccattccacagcaactgcccagtgcctcacctctcagatcaaccattgaggcaggaatggagacaagatgaccccaagggcttttcttctccctagttcaatggttttatgatacaaactactgacatacgtttttcaagttattttctccttcttctaggaaatcccttctgagtgatgtcacatcttggcaggggtggaggagagcctggttgcccagggatttgtccttggggacatctcatccatcaagttgcacactcactggcatctttgctatggggacattccaatttgcactttcaggaacactctgaattccaagtagaattgatttcccttcttctgtcatctaccttttctcttcattttcccatttttattacccttctttccatttctctctccagtcttccacctggaagccctctctggctaaggacaggcaggtgcccctctctccatcagaggacacctgtactggagagcaacacaggatggtctctgccatgaactggaggccaggaatctcctcactgaaaattacagtatggtaactttgcaaatggtggttgtttcttccaagactccagccctgattgcgcaaaactgaaaggcatgtgaagggaaggaagaggaagagtgcaaaacattgaagagagagctgagtgagctgaagagtgaggatatgagtagccccaacccaaacctggagatggggagaaacctacagaatactagccagagctcctccttgtcttggcagcctactagggacctggggaagcaaaaacgaaagctgggcaacatgcctgctttagaatgttttccttctacttacacatcttccacaggtctcagaatctttccttcctctcatccttttctcctatcttcatatctatcagagtatccactgtttattcaacaactactacttgatggtcagacacaaacaaacaagctaggtgctaattaataaagatacgagttttggccgggtgcggtggctcacgcctgtaatcccagcactttgggaggccgaggcgggcgaatcacgaggtcaggagttcgagaccagcctggccaacatggtgaaaccccatctctactaaaaatacaaacaattaactgagcatagtggtgggcacctataataccagctactccggaggctgaggcaggagaatcgcttgaacccaggaggcagaggttgcagtgagctgagatcgcgccactgcactctagccagagtgacagagtaagactctgtctcaaaaataaataaataaataaataaataaataaataaataaataaataaaaaataataatacaagttttcataagcacacttctaa

SEQ ID NO: 18859 - DNA, 2503 bp, Homo sapiens; identical to SEQ ID NO: 18825
  source 1..2503: mol_type = unassigned DNA

SEQ ID NO: 18860 - DNA, 1583 bp, Homo sapiens
  source 1..1583: mol_type = unassigned DNA
atggcaagcttatcgagaccctctctgcccagctgcctctgctccttcctcctcctcctcctcctccaagtgtcttccagctatgcagatcctttctactgggtgagccctggagtgctggttctcctcgcggtgctgcctgtgctcctcctgcagatcactgttggcctcgtcttcctctgcctgcagtacagactgagaggaaaacttcgagcagagatagagaatctccaccggacttttgatccccactttctgagggtgccctgctggaagataaccctgtttgtaattgtgccggttcttggacccttggttgccttgatcatctgctacaactggctacatcgaagactagcagggcaattccttgaagagctacgaaatcccttctgagtgatgtcacatcttggcaggggtggaggagagcctggttgcccagggatttgtccttggggacatctcatccatcaagttgcacactcactggcatctttgctatggggacattccaatttgcactttcaggaacactctgaattccaagtagaattgatttcccttcttctgtcatctaccttttctcttcattttcccatttttattacccttctttccatttctctctccagtcttccacctggaagccctctctggctaaggacaggcaggtgcccctctctccatcagaggacacctgtactggagagcaacacaggatggtctctgccatgaactggaggccaggaatctcctcactgaaaattacagtatggtaactttgcaaatggtggttgtttcttccaagactccagccctgattgcgcaaaactgaaaggcatgtgaagggaaggaagaggaagagtgcaaaacattgaagagagagctgagtgagctgaagagtgaggatatgagtagccccaacccaaacctggagatggggagaaacctacagaatactagccagagctcctccttgtcttggcagcctactagggacctggggaagcaaaaacgaaagctgggcaacatgcctgctttagaatgttttccttctacttacacatcttccacaggtctcagaatctttccttcctctcatccttttctcctatcttcatatctatcagagtatccactgtttattcaacaactactacttgatggtcagacacaaacaaacaagctaggtgctaattaataaagatacgagttttggccgggtgcggtggctcacgcctgtaatcccagcactttgggaggccgaggcgggcgaatcacgaggtcaggagttcgagaccagcctggccaacatggtgaaaccccatctctactaaaaatacaaacaattaactgagcatagtggtgggcacctataataccagctactccggaggctgaggcaggagaatcgcttgaacccaggaggcagaggttgcagtgagctgagatcgcgccactgcactctagccagagtgacagagtaagactctgtctcaaaaataaataaataaataaataaataaataaataaataaataaataaaaaataataatacaagttttcataagcacacttctaa

SEQ ID NO: 18861 - DNA, 1685 bp, Homo sapiens; identical to SEQ ID NO: 18848
  source 1..1685: mol_type = unassigned DNA

SEQ ID NO: 18862 - DNA, 2142 bp, Homo sapiens
  source 1..2142: mol_type = unassigned DNA
agcccttttgtgtgagtgcctggcaagggtgacgtggggctgtttctgcgggcacagctgcagcaattaccggagtggaggcagggcccaggcagcactgccctccaagatcttcccttgggcttttcagcagtaaggggacatgcaccccaagggcctccacttggcctgaccttgctgcgggggctctctgtccccaggaacagtagagatggcaagcttatcgagaccctctctgcccagctgcctctgctccttcctcctcctcctcctcctccaagtgtcttccagctatgcagggcagttcagagtgataggaccaagacaccctatccgggctctggtcggggatgaagtggaattgccatgtcgcatatctcctgggaagaacgctacaggcatggaggtggggtggtaccgcccccccttctctagggtggttcatctctacagaaatggcaaggaccaagatggagaccaggcacctgaatatcggggccggacagagctgctgaaagatgctattggtgagggaaaggtgactctcaggatccggaatgtaaggttctcagatgaaggaggtttcacctgcttcttccgagatcattcttaccaagaggaggcagcaatggaattgaaagtagaagatcctttctactgggtgagccctggagtgctggttctcctcgcggtgctgcctgtgctcctcctgcagatcactgttggcctcgtcttcctctgcctgcagtacagactgagaggaaaacttcgagcagagatagagaatctccaccggacttttgatccccactttctgagggtgccctgctggaagataaccctgtttgtaattgtgccggttcttggacccttggttgccttgatcatctgctacaactggctacatcgaagactagcagggcaattccttgaagagctacgaaatcccttctgagtgatgtcacatcttggcaggggtggaggagagcctggttgcccagggatttgtccttggggacatctcatccatcaagttgcacactcactggcatctttgctatggggacattccaatttgcactttcaggaacactctgaattccaagtagaattgatttcccttcttctgtcatctaccttttctcttcattttcccatttttattacccttctttccatttctctctccagtcttccacctggaagccctctctggctaaggacaggcaggtgcccctctctccatcagaggacacctgtactggagagcaacacaggatggtctctgccatgaactggaggccaggaatctcctcactgaaaattacagtatggtaactttgcaaatggtggttgtttcttccaagactccagccctgattgcgcaaaactgaaaggcatgtgaagggaaggaagaggaagagtgcaaaacattgaagagagagctgagtgagctgaagagtgaggatatgagtagccccaacccaaacctggagatggggagaaacctacagaatactagccagagctcctccttgtcttggcagcctactagggacctggggaagcaaaaacgaaagctgggcaacatgcctgctttagaatgttttccttctacttacacatcttccacaggtctcagaatctttccttcctctcatccttttctcctatcttcatatctatcagagtatccactgtttattcaacaactactacttgatggtcagacacaaacaaacaagctaggtgctaattaataaagatacgagttttggccgggtgcggtggctcacgcctgtaatcccagcactttgggaggccgaggcgggcgaatcacgaggtcaggagttcgagaccagcctggccaacatggtgaaaccccatctctactaaaaatacaaacaattaactgagcatagtggtgggcacctataataccagctactccggaggctgaggcaggagaatcgcttgaacccaggaggcagaggttgcagtgagctgagatcgcgccactgcactctagccagagtgacagagtaagactctgtctcaaaaataaataaataaataaataaataaataaataaataaataaataaaaaataataatacaagttttcataagcacacttctaa

SEQ ID NO: 18863 - DNA, 1541 bp, Homo sapiens
  source 1..1541: mol_type = unassigned DNA
agcttatcgagaccctctctgcccagctgcctctgctccttcctcctcctcctcctcctccaagtgtcttccagctatgcagggcagttcagagtgataggaccaagacaccctatccgggctctggtcggggatgaagtggaattgccatgtcgcatatctcctgggaagaacgctacaggcatggaggtggggtggtaccgcccccccttctctagggtggttcatctctacagaaatggcaaggaccaagatggagaccaggcacctgaatatcggggccggacagagctgctgaaagatgctattggtgagggaaaggtgactctcaggatccggaatgtaaggttctcagatgaaggaggtttcacctgcttcttccgagatcattcttaccaagaggaggcagcaatggaattgaaagtagaagatcctttctactgggtgagccctggagtgctggttctcctcgcggtgctgcctgtgctcctcctgcagatcactgttggcctcgtcttcctctgcctgcagtacagactgagaggaaaacttcgagcagagatagagaatctccaccggacttttgtcttccacctggaagccctctctggctaaggacaggcaggtgcccctctctccatcagaggacacctgtactggagagcaacacaggatggtctctgccatgaactggaggccaggaatctcctcactgaaaattacagtatggtaactttgcaaatggtggttgtttcttccaagactccagccctgattgcgcaaaactgaaaggcatgtgaagggaaggaagaggaagagtgcaaaacattgaagagagagctgagtgagctgaagagtgaggatatgagtagccccaacccaaacctggagatggggagaaacctacagaatactagccagagctcctccttgtcttggcagcctactagggacctggggaagcaaaaacgaaagctgggcaacatgcctgctttagaatgttttccttctacttacacatcttccacaggtctcagaatctttccttcctctcatccttttctcctatcttcatatctatcagagtatccactgtttattcaacaactactacttgatggtcagacacaaacaaacaagctaggtgctaattaataaagatacgagttttggccgggtgcggtggctcacgcctgtaatcccagcactttgggaggccgaggcgggcgaatcacgaggtcaggagttcaagaccagcctggccaacatggtgaaaccccatctctactaaaaatacaaacaattaactgagcatagtggtgggcacctataataccagctactccggaggctgaggcaggagaatcgcttgaacccaggaggcagaggttgcagtgagctgagatcgcgccactgcactctagccggagtgacagagtaagactctgtctcaaaaataaataaataaataaataaataaataaataaataaataaataaataaaaaataataatacaagttttcataagcacacttctaa

SEQ ID NO: 18864 - DNA, 2495 bp, Homo sapiens
  source 1..2495: mol_type = unassigned DNA
agcactgccctccaagatcttcccttgggcttttcagcagtaaggggacatgcaccccaagggcctccacttggcctgaccttgctgcgggggctctctgtccccaggaacagtagagatggcaagcttatcgagaccctctctgcccagctgcctctgctccttcctcctcctcctcctcctccaagtgtcttccagctatgcagggcagttcagagtgataggaccaagacaccctatccgggctctggtcggggatgaagtggaattgccatgtcgcatatctcctgggaagaacgctacaggcatggaggtggggtggtaccgcccccccttctctagggtggttcatctctacagaaatggcaaggaccaagatggagaccaggcacctgaatatcggggccggacagagctgctgaaagatgctattggtgagggaaaggtgactctcaggatccggaatgtaaggttctcagatgaaggaggtttcacctgcttcttccgagatcattcttaccaagaggaggcagcaatggaattgaaagtagaagatcctttctactgggtgagccctggagtgctggttctcctcgcggtgctgcctgtgctcctcctgcagatcactcttggcctcgtcttcctctgcctgcagtacagactgagaggaaaacttcgagcagagatagagaatctccaccggacttttgatccccactttctgagggtgccctgctggaagataaccctgtttgtaattgtgccggttcttggacccttggttgccttgatcatctgctacaactggctacatcgaagactagcagggcaattccttgaagagctacgtaagttctcttctctctgttataagcagagaataaaaagccaggaaagggagacagaagcaacaagaggaagaggcgggctattgagggatcacattcccagaggaaaggaggagctggagagcctgggtggagggaagactcctcctgggaggtagagggcaaagaagccagctgttagagacacatttacaggtggcagagaagctggaggcactcctatctgccacctgatccattcctccttcactgcccctaagcaggaatccaaccctagctggtctcattgcccattccacagcaactgcccagtgcctcacctctcagatcaaccattgaggcaggaatggagacaagatgaccccaagggcttttcttctccctagttcaatggttttatgatacaaactactgacatacgtttttcaagttattttctccttcttctaggaaatcccttctgagtgatgtcacatcttggcaggggtggaggagagcctggttgcccagggatttgtccttggggacatctcatccatcaagttgcacactcactggcatctttgctatggggacattccaatttgcactttcaggaacactctgaattccaagtagaattgatttcccttcttctgtcatctaccttttctcttcattttcccatttttattacccttctttccatttctctctccagtcttccacctggaagccctctctggctaaggacaggcaggtgcccctctctccatcagaggacacctgtactggagagcaacacaggatggtctctgccatgaactggaggccaggaatctcctcactgaaaattacagtatggtaactttgcaaatggtggttgtttcttccaagactccagccctgattgcgcaaaactgaaaggcatgtgaagggaaggaagaggaagagtgcaaaacattgaagagagagctgagtgagctgaagagtgaggatatgagtagccccaacccaaacctggagatggggagaaacctacagaatactagccagagctcctccttgtcttggcagcctactagggacctggggaagcaaaaacgaaagctgggcaacatgcctgctttagaatgttttccttctacttacacatcttccacaggtctcagaatctttccttcctctcatccttttctcctatcttcatatctatcagagtatccactgtttattcaacaactactacttgatggtcagacacaaacaaacaagctaggtgctaattaataaagatacgagttttggccgggtgcggtggctcacgcctgtaatcccagcactttgggaggccgaggcgggcgaatcacgaggtcaggagttcaagaccagcctggccaacatggtgaaaccccatctctactaaaaatacaaacaattaactgagcatagtggtgggcacctataataccagctactccggaggctgaggcaggagaatcgcttgaacccaggaggcagaggttgcagtgagctgagatcgcgccactgcactctagccggagtgacagagtaagactctgtctcaaaaataaataaataaataaataaataaataaataaataaataaaaaataataatacaagttttcataagcacacttctaa

SEQ ID NO: 18865 - DNA, 1616 bp, Homo sapiens; identical to SEQ ID NO: 18835
  source 1..1616: mol_type = unassigned DNA

SEQ ID NO: 18866 - DNA, 1587 bp, Homo sapiens
  source 1..1587: mol_type = unassigned DNA
atggcaagcttatcgagaccctctctgcccagctgcctctgctccttcctcctcctcctcctcctccaagtgtcttccagctatgcagatcctttctactgggtgagccctggagtgctggttctcctcgcggtgctgcctgtgctcctcctgcagatcactgttggcctcgtcttcctctgcctgcagtacagactgagaggaaaacttcgagcagagatagagaatctccaccggacttttgatccccactttctgagggtgccctgctggaagataaccctgtttgtaattgtgccggttcttggacccttggttgccttgatcatctgctacaactggctacatcgaagactagcagggcaattccttgaagagctacgaaatcccttctgagtgatgtcacatcttggcaggggtggaggagagcctggttgcccagggatttgtccttggggacatctcatccatcaagttgcacactcactggcatctttgctatggggacattccaatttgcactttcaggaacactctgaattccaagtagaattgatttcccttcttctgtcatctaccttttctcttcattttcccatttttattacccttctttccatttctctctccagtcttccacctggaagccctctctggctaaggacaggcaggtgcccctctctccatcagaggacacctgtactggagagcaacacaggatggtctctgccatgaactggaggccaggaatctcctcactgaaaattacagtatggtaactttgcaaatggtggttgtttcttccaagactccagccctgattgcgcaaaactgaaaggcatgtgaagggaaggaagaggaagagtgcaaaacattgaagagagagctgagtgagctgaagagtgaggatatgagtagccccaacccaaacctggagatggggagaaacctacagaatactagccagagctcctccttgtcttggcagcctactagggacctggggaagcaaaaacgaaagctgggcaacatgcctgctttagaatgttttccttctacttacacatcttccacaggtctcagaatctttccttcctctcatccttttctcctatcttcatatctatcagagtatccactgtttattcaacaactactacttgatggtcagacacaaacaaacaagctaggtgctaattaataaagatacgagttttggccgggtgcggtggctcacgcctgtaatcccagcactttgggaggccgaggcgggcgaatcacgaggtcaggagttcaagaccagcctggccaacatggtgaaaccccatctctactaaaaatacaaacaattaactgagcatagtggtgggcacctataataccagctactccggaggctgaggcaggagaatcgcttgaacccaggaggcagaggttgcagtgagctgagatcgcgccactgcactctagccggagtgacagagtaagactctgtctcaaaaataaataaataaataaataaataaataaataaataaataaataaataaaaaataataatacaagttttcataagcacacttctaa

SEQ ID NO: 18867 - DNA, 1722 bp, Homo sapiens
  source 1..1722: mol_type = unassigned DNA
ggcagttcagagtgataggaccaagacaccctatccgggctctggtcggggatgaagtggaattgccatgtcgcatatctcctgggaagaacgctacaggcatggaggtggggtggtaccgcccccccttctctagggtggttcatctctacagaaatggcaaggaccaagatggagaccaggcacctgaatatcggggccggacagagctgctgaaagatgctattggtgagggaaaggtgactctcaggatccggaatgtaaggttctcagatgaaggaggtttcacctgcttcttccgagatcattcttaccaagaggaggcagcaatggaattgaaagtagaagatcctttctactgggtgagccctggagtgctggttctcctcgcggtgctgcctgtgctcctcctgcagatcactcttggcctcgtcttcctctgcctgcagtacagactgagaggaaaacttcgagcagagatagagaatctccaccggacttttgggcaattccttgaagagctacgaaatcccttctgagtgatgtcacatcttggcaggggtggaggagagcctggttgcccagggatttgtccttggggacatctcatccatcaagttgcacactcactggcatctttgctatggggacattccaatttgcactttcaggaacactctgaattccaagtagaattgatttcccttcttctgtcatctaccttttctcttcattttcccatttttattacccttctttccatttctctctccagtcttccacctggaagccctctctggctaaggacaggcaggtgcccctctctccatcagaggacacctgtactggagagcaacacaggatggtctctgccatgaactggaggccaggaatctcctcactgaaaattacagtatggtaactttgcaaatggtggttgtttcttccaagactccagccctgattgcgcaaaactgaaaggcatgtgaagggaaggaagaggaagagtgcaaaacattgaagagagagctgagtgagctgaagagtgaggatatgagtagccccaacccaaacctggagatggggagaaacctacagaatactagccagagctcctccttgtcttggcagcctactagggacctggggaagcaaaaacgaaagctgggcaacatgcctgctttagaatgttttccttctacttacacatcttccacaggtctcagaatctttccttcctctcatccttttctcctatcttcatatctatcagagtatccactgtttattcaacaactactacttgatggtcagacacaaacaaacaagctaggtgctaattaataaagatacgagttttggccgggtgcggtggctcacgcctgtaatcccagcactttgggaggccgaggcgggcgaatcacgaggtcaggagttcaagaccagcctggccaacatggtgaaaccccatctctactaaaaatacaaacaattaactgagcatagtggtgggcacctataataccagctactccggaggctgaggcaggagaatcgcttgaacccaggaggcagaggttgcagtgagctgagatcgcgccactgcactctagccggagtgacagagtaagactctgtctcaaaaataaataaataaataaataaataaataaataaataaataaaaaataataatacaagttttcataagcacacttctaa

SEQ ID NO: 18868 - DNA, 1814 bp, Homo sapiens
  source 1..1814: mol_type = unassigned DNA
atggcaagcttatcaagaccctctctgcccagctgcctctgctccttcctcctcctcctcctcctccaagtgtcttccagctatgcagggcagttcagagtgataggaccaagacaccctatccgggctctggtcggggatgaagtggaattgccatgtcgcatatctcctgggaagaacgctacaggcatggaggtggggtggtaccgcccccccttctctagggtggttcatctctacagaaatggcaaggaccaagatggagaccaggcacctgaatatcggggccggacagagctgctgaaagatgctattggtgagggaaaggtgactctcaggatccggaatgtaaggttctcagatgaaggaggtttcacctgcttcttccgagatcattcttaccaagaggaggcagcaatggaattgaaagtagaagatcctttctactgggtgagccctggagtgctggttctcctcgcggtgctgcctgtgctcctcctgcagatcactgttggcctcatcttcctctgcctgcagtacagactgagaggaaaacttcgagcagagatagagaatctccaccggacttttgggcaattccttgaagagctacgaaatcccttctgagtgatgtcacatcttggcaggggtggaggagagcctggttgcccagggatttgtccttggggacatctcatccatcaagttgcacactcactggcatctttgctatggggacattccaatttgcactttcaggaacactctgaattccaagtagaattgatttcccttcttctgtcatctaccttttctcttcattttcccatttttattacccttctttccatttctctctccagtcttccacctggaagccctctctggctaaggacaggcaggtgcccctctctccatcagaggacacctgtactggagagcaacacaggatggtctctgccatgaactggaggccaggaatctcctcactgaaaattacagtatggtaactttgcaaatggtggttgtttcttccaagactccagccctgattgcgcaaaactgaaaggcatgtgaagggaaggaagaggaagagtgcaaaacattgaagagagagctgagtgagctgaagagtgaggatatgagtagccccaacccaaacctggagatggggagaaacctacagaatactagccagagctcctccttgtcttggcagcctactagggacctggggaagcaaaaacgaaagctgggcaacatgcctgctttagaatgttttccttctacttacacatcttccacaggtctcagaatctttccttcctctcatccttttctcctatcttcatatctatcagagtatccactgtttattcaacaactactacttgatggtcagacacaaacaaacaagctaggtgctaattaataaagatacgagttttggccgggtgcggtggctcacgcctgtaatcccagcactttgggaggccgaggcgggcgaatcacgaggtcaggagttcaagaccagcctggccaacatggtgaaaccccatctctactaaaaatacaaacaattaactgagcatagtggtgggcacctataataccagctactccggaggctgaggcaggagaatcgcttgaacccaggaggcagaggttgcagtgagctgagatcgtgccactgcactctagccggagtgacagagtaagactctgtctcaaaaataaataaataaataaataaataaataaataaataaataaataaaaaataataatacaagttttcataagcacacttctaa

SEQ ID NO: 18869 - DNA, 2146 bp, Homo sapiens; identical to SEQ ID NO: 18834
  source 1..2146: mol_type = unassigned DNA

SEQ ID NO: 18870 - DNA, 1583 bp, Homo sapiens
  source 1..1583: mol_type = unassigned DNA
atggcaagcttatcgagaccctctctgcccagctgcctctgctccttcctcctcctcctcctcctccaagtgtcttccagctatgcagatcctttctactgggtgagccctggagtgctggttctcctcgcggtgctgcctgtgctcctcctgcagatcactgttggcctcgtcttcctctgcctgcagtacagactgagaggaaaacttcgagcagagatagagaatctccaccggacttttgatccccactttctgagggtgccctgctggaagataaccctgtttgtaattgtgccggttcttggacccttggttgccttgatcatctgctacaactggctacatcgaagactagcagggcaattccttgaagagctacgaaatcccttctgagtgatgtcacatcttggcaggggtggaggagagcctggttgcccagggatttgtccttggggacatctcatccatcaagttgcacactcactggcatctttgctatggggacattccaatttgcactttcaggaacactctgaattccaagtagaattgatttcccttcttctgtcatctaccttttctcttcattttcccatttttattacccttctttccatttctctctccagtcttccacctggaagccctctctggctaaggacaggcaggtgcccctctctccatcagaggacacctgtactggagagcaacacaggatggtctctgccatgaactggaggccaggaatctcctcactgaaaattacagtatggtaactttgcaaatggtggttgtttcttccaagactccagccctgattgcgcaaaactgaaaggcatgtgaagggaaggaagaggaagagtgcaaaacattgaagagagagctgagtgagctgaagagtgaggatatgagtagccccaacccaaacctggagatggggagaaacctacagaatactagccagagctcctccttgtcttggcagcctactagggacctggggaagcaaaaacgaaagctgggcaacatgcctgctttagaatgttttccttctacttacacatcttccacaggtctcagaatctttccttcctctcatccttttctcctatcttcatatctatcagagtatccactgtttattcaacaactactacttgatggtcagacacaaacaaacaagctaggtgctaattaataaagatacgagttttggccgggtgcggtggctcacgcctgtaatcccagcactttgggaggccgaggcgggcgaatcacgaggtcaggagttcaagaccagcctggccaacatggtgaaaccccatctctactaaaaatacaaacaattaactgagcatagtggtgggcacctataataccagctactccggaggctgaggcaggagaatcgcttgaacccaggaggcagaggttgcagtgagctgagatcgcgccactgcactctagccggagtgacagagtaagactctgtctcaaaaataaataaataaataaataaataaataaataaataaataaataaaaaataataatacaagttttcataagcacacttctaa

SEQ ID NO: 18871 - DNA, 1568 bp, Homo sapiens; identical to SEQ ID NO: 18826
  source 1..1568: mol_type = unassigned DNA

SEQ ID NO: 18872 - DNA, 1533 bp, Homo sapiens
  source 1..1533: mol_type = unassigned DNA
agcttatcgagaccctctctgcccagctgcctctgctccttcctcctcctcctcctcctccaagtgtcttccagctatgcagggcagttcagagtgataggaccaagacaccctatccgggctctggtcggggatgaagtggaattgccatgtcgcatatctcctgggaagaacgctacaggcatggaggtggggtggtaccgcccccccttctctagggtggttcatctctacagaaatggcaaggaccaagatggagaccaggcacctgaatatcggggccggacagagctgctgaaagatgctattggtgagggaaaggtgactctcaggatccggaatgtaaggttctcagatgaaggaggtttcacctgcttcttccgagatcattcttaccaagaggaggcagcaatggaattgaaagtagaagatcctttctactgggtgagccctggagtgctggttctcctcgcggtgctgcctgtgctcctcctgcagatcactcttggcctcgtcttcctctgcctgcagtacagactgagaggaaaacttcgagcagagatagagaatctccaccggacttttgtcttccacctggaagccctctctggctaaggacaggcaggtgcccctctctccatcagaggacacctgtactggagagcaacacaggatggtctctgccatgaactggaggccaggaatctcctcactgaaaattacagtatggtaactttgcaaatggtggttgtttcttccaagactccagccctgattgcgcaaaactgaaaggcatgtgaagggaaggaagaggaagagtgcaaaacattgaagagagagctgagtgagctgaagagtgaggatatgagtagccccaacccaaacctggagatggggagaaacctacagaatactagccagagctcctccttgtcttggcagcctactagggacctggggaagcaaaaacgaaagctgggcaacatgcctgctttagaatgttttccttctacttacacatcttccacaggtctcagaatctttccttcctctcatccttttctcctatcttcatatctatcagagtatccactgtttattcaacaactactacttgatggtcagacacaaacaaacaagctaggtgctaattaataaagatacgagttttggccgggtgcggtggctcacgcctgtaatcccagcactttgggaggccgaggcgggcgaatcacgaggtcaggagttcaagaccagcctggccaacatggtgaaaccccatctctactaaaaatacaaacaattaactgagcatagtggtgggcacctataataccagctactccggaggctgaggcaggagaatcgcttgaacccaggaggcagaggttgcagtgagctgagatcgcgccactgcactctagccggagtgacagagtaagactctgtctcaaaaataaataaataaataaataaataaataaataaataaataaaaaataataatacaagttttcataagcacacttctaa

SEQ ID NO: 18873 - DNA, 1862 bp, Homo sapiens
  source 1..1862: mol_type = unassigned DNA
atggcaagcttatcgagaccctctctgcccagctgcctctgctccttcctcctcctcctcctcctccaagtgtcttccagctatgcagggcagttcagagtgataggaccaagacaccctatccgggctctggtcggggatgaagtggaattgccatgtcgcatatctcctgggaagaacgctacaggcatggaggtggggtggtaccgcccccccttctctagggtggttcatctctacagaaatggcaaggaccaagatggagaccaggcacctgaatatcggggccggacagagctgctgaaagatgctattggtgagggaaaggtgactctcaggatccggaatgtaaggttctcagatgaaggaggtttcacctgcttcttccgagatcattcttaccaagaggaggcagcaatggaattgaaagtagaagatcctttctactgggtgagccctggagtgctggttctcctcgcggtgctgcctgtgctcctcctgcagatcactgttggcctcgtcttcctctgcctgcagtacagactgagaggaaaacttcgagcagagatagagaatctccaccggacttttgagtcctttggtgttctaggaccccaggttaaggaaccaaaaaagacagggcaattccttgaagagctacgaaatcccttctgagtgatgtcacatcttggcaggggtggaggagagcctggttgcccagggatttgtccttggggacatctcatccatcaagttgcacactcactggcatctttgctatggggacattccaatttgcactttcaggaacactctgaattccaagtagaattgatttcccttcttctgtcatctaccttttctcttcattttcccatttttattacccttctttccatttctctctccagtcttccacctggaagccctctctggctaaggacaggcaggtgcccctctctccatcagaggacacctgtactggagagcaacacaggatggtctctgccatgaactggaggccaggaatctcctcactgaaaattacagtatggtaactttgcaaatggtggttgtttcttccaagactccagccctgattgcgcaaaactgaaaggcatgtgaagggaaggaagaggaagagtgcaaaacattgaagagagagctgagtgagctgaagagtgaggatatgagtagccccaacccaaacctggagatggggagaaacctacagaatactagccagagctcctccttgtcttggcagcctactagggacctggggaagcaaaaacgaaagctgggcaacatgcctgctttagaatgttttccttctacttacacatcttccacaggtctcagaatctttccttcctctcatccttttctcctatcttcatatctatcagagtatccactgtttattcaacaactactacttgatggtcagacacaaacaaacaagctaggtgctaattaataaagatacgagttttggccgggtgcggtggctcacgcctgtaatcccagcactttgggaggccgaggcgggcgaatcacgaggtcaggagttcaagaccagcctggccaacatggtgaaaccccatctctactaaaaatacaaacaattaactgagcatagtggtgggcacctataataccagctactccggaggctgaggcaggagaatcgcttgaacccaggaggcagaggttgcagtgagctgagatcgcgccactgcactctagccggagtgacagagtaagactctgtctcaaaaataaataaataaataaataaataaataaataaataaataaataaaaaataataatacaagttttcataagcacacttctaa

SEQ ID NO: 18874 - DNA, 1616 bp, Homo sapiens
  source 1..1616: mol_type = unassigned DNA
atggcaagcttatcgagaccctctctgcccagctgcctctgctccttcctcctcctcctcctcctccaagtgtcttccagctatgcagggcagttcagagtgataggaccaagacaccctatccgggctctggtcggggatgaagtggaattgccatgtcgcatatctcctgggaagaacgctacaggcatggaggtggggtggtaccgcccccccttctctagggtggttcatctctacagaaatggcaaggaccaagatggagaccaggcacctgaatatcggggccggacagagctgctgaaagatgctattggtgagggaaaggtgactctcaggatccggaatgtaaggttctcagatgaaggaggtttcacctgcttcttccgagatcattcttaccaagaggaggcagcaatggaattgaaagtagaagatcctttctactgggtgagccctggagtgctggttctcctcgcggtgctgcctgtgctcctcctgcagatcactgttggcctcgtcttcctctgcctgcagtacagactgagaggaaaacttcgagcagagatagagaatctccaccggacttttgagtcctttggtgttctaggaccccaggttaaggaaccaaaaaagacagggcaattccttgaagagctactcttccacctggaagccctctctggctaaggacaggcaggtgcccctctctccatcagaggacacctgtactggagagcaacacaggatggtctctgccatgaactggaggccaggaatctcctcactgaaaattacagtatggtaactttgcaaatggtggttgtttcttccaagactccagccctgattgcgcaaaactgaaaggcatgtgaagggaaggaagaggaagagtgcaaaacattgaagagagagctgagtgagctgaagagtgaggatatgagtagccccaacccaaacctggagatggggagaaacctacagaatactagccagagctcctccttgtcttggcagcctactagggacctggggaagcaaaaacgaaagctgggcaacatgcctgctttagaatgttttccttctacttacacatcttccacaggtctcagaatctttccttcctctcatccttttctcctatcttcatatctatcagagtatccactgtttattcaacaactactacttgatggtcagacacaaacaaacaagctaggtgctaattaataaagatacgagttttggccgggtgcggtggctcacgcctgtaatcccagcactttgggaggccgaggcgggcgaatcacgaggtcaggagttcaagaccagcctggccaacatggtgaaaccccatctctactaaaaatacaaacaattaactgagcatagtggtgggcacctataataccagctactccggaggctgaggcaggagaatcgcttgaacccaggaggcagaggttgcagtgagctgagatcgcgccactgcactctagccggagtgacagagtaagactctgtctcaaaaataaataaataaataaataaataaataaataaataaataaataaataaaaaataataatacaagttttcataagcacacttctaa

SEQ ID NO: 18875 - DNA, 2507 bp, Homo sapiens
  source 1..2507: mol_type = unassigned DNA
agcactgccctccaagatcttcccttgggcttttcagcagtaaggggacatgcaccccaagggcctccacttggcctgaccttgctgcgggggctctctgtccccaggaacagtagagatggcaagcttatcgagaccctctctgcccagctgcctctgctccttcctcctcctcctcctcctccaagtgtcttccagctatgcagggcagttcagagtgataggaccaagacaccctatccgggctctggtcggggatgaagtggaattgccatgtcgcatatctcctgggaagaacgctacaggcatggaggtggggtggtaccgcccccccttctctagggtggttcatctctacagaaatggcaaggaccaagatggagaccaggcacctgaatatcggggccggacagagctgctgaaagatgctattggtgagggaaaggtgactctcaggatccggaatgtaaggttctcagatgaaggaggtttcacctgcttcttccgagatcattcttaccaagaggaggcagcaatggaattgaaagtagaagatcctttctactgggtgagccctggagtgctggttctcctcgcggtgctgcctgtgctcctcctgcagatcactgttggcctcgtcttcctctgcctgcagtacagactgagaggaaaacttcgagcagagatagagaatctccaccggacttttgatccccactttctgagggtgccctgctggaagataaccctgtttgtaattgtgccggttcttggacccttggttgccttgatcatctgctacaactggctacatcgaagactagcagggcaattccttgaagagctacgtaagttctcttctctctgttataagcagagaataaaaagccaggaaagggagacagaagcaacaagaggaagaggcgggctattgagggatcacattcccagaggaaaggaggagctggagagcctgggtggagggaagactcctcctgggaggtagagggcaaagaagccagctgttagagacacatttacaggtggcagagaagctggaggcactcctatctgccacctgatccattcctccttcactgcccctaagcaggaatccaaccctagctggtctcattgcccattccacagcaactgcccagtgcctcacctctcagatcaaccattgaggcaggaatggagacaagatgaccccaagggcttttcttctccctagttcaatggttttatgatacaaactactgacatacgtttttcaagttattttctccttcttctaggaaatcccttctgagtgatgtcacatcttggcaggggtggaggagagcctggttgcccagggatttgtccttggggacatctcatccatcaagttgcacactcactggcatctttgctatggggacattccaatttgcactttcaggaacactctgaattccaagtagaattgatttcccttcttctgtcatctaccttttctcttcattttcccatttttattacccttctttccatttctctctccagtcttccacctggaagccctctctggctaaggacaggcaggtgcccctctctccatcagaggacacctgtactggagagcaacacaggatggtctctgccatgaactggaggccaggaatctcctcactgaaaattacagtatggtaactttgcaaatggtggttgtttcttccaagactccagccctgattgcgcaaaactgaaaggcatgtgaagggaaggaagaggaagagtgcaaaacattgaagagagagctgagtgagctgaagagtgaggatatgagtagccccaacccaaacctggagatggggagaaacctacagaatactagccagagctcctccttgtcttggcagcctactagggacctggggaagcaaaaacgaaagctgggcaacatgcctgctttagaatgttttccttctacttacacatcttccacaggtctcagaatctttccttcctctcatccttttctcctatcttcatatctatcagagtatccactgtttattcaacaactactacttgatggtcagacacaaacaaacaagctaggtgctaattaataaagatacgagttttggccgggtgcggtggctcacgcctgtaatcccagcactttgggaggccgaggcgggcgaatcacgaggtcaggagttcaagaccagcctggccaacatggtgaaaccccatctctactaaaaatacaaacaattaactgagcatagtggtgggcacctataataccagctactccggaggctgaggcaggagaatcgcttgaacccaggaggcagaggttgcagtgagctgagatcgcgccactgcactctagccggagtgacagagtaagactctgtctcaaaaataaataaataaataaataaataaataaataaataaataaataaataaataaaaaataataatacaagttttcataagcacacttctaa

SEQ ID NO: 18876 - DNA, 1726 bp, Homo sapiens
  source 1..1726: mol_type = unassigned DNA
ggcagttcagagtgataggaccaagacaccctatccgggctctggtcggggatgaagtggaattgccatgtcgcatatctcctgggaagaacgctacaggcatggaggtggggtggtaccgcccccccttctctagggtggttcatctctacagaaatggcaaggaccaagatggagaccaggcacctgaatatcggggccggacagagctgctgaaagatgctattggtgagggaaaggtgactctcaggatccggaatgtaaggttctcagatgaaggaggtttcacctgcttcttccgagatcattcttaccaagaggaggcagcaatggaattgaaagtagaagatcctttctactgggtgagccctggagtgctggttctcctcgcggtgctgcctgtgctcctcctgcagatcactgttggcctcgtcttcctctgcctgcagtacagactgagaggaaaacttcgagcagagatagagaatctccaccggacttttgggcaattccttgaagagctacgaaatcccttctgagtgatgtcacatcttggcaggggtggaggagagcctggttgcccagggatttgtccttggggacatctcatccatcaagttgcacactcactggcatctttgctatggggacattccaatttgcactttcaggaacactctgaattccaagtagaattgatttcccttcttctgtcatctaccttttctcttcattttcccatttttattacccttctttccatttctctctccagtcttccacctggaagccctctctggctaaggacaggcaggtgcccctctctccatcagaggacacctgtactggagagcaacacaggatggtctctgccatgaactggaggccaggaatctcctcactgaaaattacagtatggtaactttgcaaatggtggttgtttcttccaagactccagccctgattgcgcaaaactgaaaggcatgtgaagggaaggaagaggaagagtgcaaaacattgaagagagagctgagtgagctgaagagtgaggatatgagtagccccaacccaaacctggagatggggagaaacctacagaatactagccagagctcctccttgtcttggcagcctactagggacctggggaagcaaaaacgaaagctgggcaacatgcctgctttagaatgttttccttctacttacacatcttccacaggtctcagaatctttccttcctctcatccttttctcctatcttcatatctatcagagtatccactgtttattcaacaactactacttgatggtcagacacaaacaaacaagctaggtgctaattaataaagatacgagttttggccgggtgcggtggctcacgcctgtaatcccagcactttgggaggccgaggcgggcgaatcacgaggtcaggagttcgagaccagcctggccaacatggtgaaaccccatctctactaaaaatacaaacaattaactgagcatagtggtgggcacctataataccagctactccggaggctgaggcaggagaatcgcttgaacccaggaggcagaggttgcagtgagctgagatcgcgccactgcactctagccagagtgacagagtaagactctgtctcaaaaataaataaataaataaataaataaataaataaataaataaataaaaaataataatacaagttttcataagcacacttctaa

SEQ ID NO: 18877 - DNA, 1564 bp, Homo sapiens
  source 1..1564: mol_type = unassigned DNA
atggcaagcttatcgagaccctctctgcccagctgcctctgctccttcctcctcctcctcctcctccaagtgtcttccagctatgcagggcagttcagagtgataggaccaagacaccctatccgggctctggtcggggatgaagtggaattgccatgtcgcatatctcctgggaagaacgctacaggcatggaggtggggtggtaccgcccccccttctctagggtggttcatctctacagaaatggcaaggaccaagatggagaccaggcacctgaatatcggggccggacagagctgctgaaagatgctattggtgagggaaaggtgactctcaggatccggaatgtaaggttctcagatgaaggaggtttcacctgcttcttccgagatcattcttaccaagaggaggcagcaatggaattgaaagtagaagatcctttctactgggtgagccctggagtgctggttctcctcgcggtgctgcctgtgctcctcctgcagatcactgttggcctcgtcttcctctgcctgcagtacagactgagaggaaaacttcgagcagagatagagaatctccaccggacttttgggcaattccttgaagagctactcttccacctggaagccctctctggctaaggacaggcaggtgcccctctctccatcagaggacacctgtactggagagcaacacaggatggtctctgccatgaactggaggccaggaatctcctcactgaaaattacagtatggtaactttgcaaatggtggttgtttcttccaagactccagccctgattgcgcaaaactgaaaggcatgtgaagggaaggaagaggaagagtgcaaaacattgaagagagagctgagtgagctgaagagtgaggatatgagtagccccaacccaaacctggagatggggagaaacctacagaatactagccagagctcctccttgtcttggcagcctactagggacctggggaagcaaaaacgaaagctgggcaacatgcctgctttagaatgttttccttctacttacacatcttccacaggtctcagaatctttccttcctctcatccttttctcctatcttcatatctatcagagtatccactgtttattcaacaactactacttgatggtcagacacaaacaaacaagctaggtgctaattaataaagatacgagttttggccgggtgcggtggctcacgcctgtaatcccagcactttgggaggccgaggcgggcgaatcacgaggtcaggagttcgagaccagcctggccaacatggtgaaaccccatctctactaaaaatacaaacaattaactgagcatagtggtgggcacctataataccagctactccggaggctgaggcaggagaatcgcttgaacccaggaggcagaggttgcagtgagctgagatcgcgccactgcactctagccagagtgacagagtaagactctgtctcaaaaataaataaataaataaataaataaataaataaataaataaataaaaaataataatacaagttttcataagcacacttctaa

SEQ ID NO: 18878 - DNA, 1681 bp, Homo sapiens
  source 1..1681: mol_type = unassigned DNA
atggcaagcttatcgagaccctctctgcccagctgcctctgctccttcctcctcctcctcctcctccaagtgtcttccagctatgcagggcagttcagagtgataggaccaagacaccctatccgggctctggtcggggatgaagtggaattgccatgtcgcatatctcctgggaagaacgctacaggcatggaggtggggtggtaccgcccccccttctctagggtggttcatctctacagaaatggcaaggaccaagatggagaccaggcacctgaatatcggggccggacagagctgctgaaagatgctattggtgagggaaaggtgactctcaggatccggaatgtaaggttctcagatgaaggaggtttcacctgcttcttccgagatcattcttaccaagaggaggcagcaatggaattgaaagtagaagatcctttctactgggtgagccctggagtgctggttctcctcgcggtgctgcctgtgctcctcctgcagatcactgttggcctcgtcttcctctgcctgcagtacagactgagaggaaaacttcgagcagagatagagaatctccaccggacttttgatccccactttctgagggtgccctgctggaagataaccctgtttgtaattgtgccggttcttggacccttggttgccttgatcatctgctacaactggctacatcgaagactagcagggcaattccttgaagagctactcttccacctggaagccctctctggctaaggacaggcaggtgcccctctctccatcagaggacacctgtactggagagcaacacaggatggtctctgccatgaactggaggccaggaatctcctcactgaaaattacagtatggtaactttgcaaatggtggttgtttcttccaagactccagccctgattgcgcaaaactgaaaggcatgtgaagggaaggaagaggaagagtgcaaaacattgaagagagagctgagtgagctgaagagtgaggatatgagtagccccaacccaaacctggagatggggagaaacctacagaatactagccagagctcctccttgtcttggcagcctactagggacctggggaagcaaaaacgaaagctgggcaacatgcctgctttagaatgttttccttctacttacacatcttccacaggtctcagaatctttccttcctctcatccttttctcctatcttcatatctatcagagtatccactgtttattcaacaactactacttgatggtcagacacaaacaaacaagctaggtgctaattaataaagatacgagttttggccgggtgcggtggctcacgcctgtaatcccagcactttgggaggccgaggcgggcgaatcacgaggtcaggagttcaagaccagcctggccaacatggtgaaaccccatctctactaaaaatacaaacaattaactgagcatagtggtgggcacctataataccagctactccggaggctgaggcaggagaatcgcttgaacccaggaggcagaggttgcagtgagctgagatcgcgccactgcactctagccggagtgacagagtaagactctgtctcaaaaataaataaataaataaataaataaataaataaataaataaataaaaaataataatacaagttttcataagcacacttctaa

SEQ ID NO: 18879 - DNA, 1564 bp, Homo sapiens
  source 1..1564: mol_type = unassigned DNA
atggcaagcttatcgagaccctctctgcccagctgcctctgctccttcctcctcctcctcctcctccaagtgtcttccagctatgcagggcagttcagagtgataggaccaagacaccctatccgggctctggtcggggatgaagtggaattgccatgtcgcatatctcctgggaagaacgctacaggcatggaggtggggtggtaccgcccccccttctctagggtggttcatctctacagaaatggcaaggaccaagatggagaccaggcacctgaatatcggggccggacagagctgctgaaagatgctattggtgagggaaaggtgactctcaggatccggaatgtaaggttctcagatgaaggaggtttcacctgcttcttccgagatcattcttaccaagaggaggcagcaatggaattgaaagtagaagatcctttctactgggtgagccctggagtgctggttctcctcgcggtgctgcctgtgctcctcctgcagatcactgttggcctcgtcttcctctgcctgcagtacagactgagaggaaaacttcgagcagagatagagaatctccaccggacttttgggcaattccttgaagagctactcttccacctggaagccctctctggctaaggacaggcaggtgcccctctctccatcagaggacacctgtactggagagcaacacaggatggtctctgccatgaactggaggccaggaatctcctcactgaaaattacagtatggtaactttgcaaatggtggttgtttcttccaagactccagccctgattgcgcaaaactgaaaggcatgtgaagggaaggaagaggaagagtgcaaaacattgaagagagagctgagtgagctgaagagtgaggatatgagtagccccaacccaaacctggagatggggagaaacctacagaatactagccagagctcctccttgtcttggcagcctactagggacctggggaagcaaaaacgaaagctgggcaacatgcctgctttagaatgttttccttctacttacacatcttccacaggtctcagaatctttccttcctctcatccttttctcctatcttcatatctatcagagtatccactgtttattcaacaactactacttgatggtcagacacaaacaaacaagctaggtgctaattaataaagatacgagttttggccgggtgcggtggctcacgcctgtaatcccagcactttgggaggccgaggcgggcgaatcacgaggtcaggagttcaagaccagcctggccaacatggtgaaaccccatctctactaaaaatacaaacaattaactgagcatagtggtgggcacctataataccagctactccggaggctgaggcaggagaatcgcttgaacccaggaggcagaggttgcagtgagctgagatcgcgccactgcactctagccggagtgacagagtaagactctgtctcaaaaataaataaataaataaataaataaataaataaataaataaataaaaaataataatacaagttttcataagcacacttctaa

SEQ ID NO: 18880 - DNA, 1866 bp, Homo sapiens; identical to SEQ ID NO: 18846
  source 1..1866: mol_type = unassigned DNA

SEQ ID NO: 18881 - DNA, 1541 bp, Homo sapiens; identical to SEQ ID NO: 18843
  source 1..1541: mol_type = unassigned DNA

SEQ ID NO: 18882 - DNA, 1862 bp, Homo sapiens
  source 1..1862: mol_type = unassigned DNA
atggcaagcttatcgagaccctctctgcccagctgcctctgctccttcctcctcctcctcctcctccaagtgtcttccagctatgcagggcagttcagagtgataggaccaagacaccctatccgggctctggtcggggatgaagtggaattgccatgtcgcatatctcctgggaagaacgctacaggcatggaggtggggtggtaccgcccccccttctctagggtggttcatctctacagaaatggcaaggaccaagatggagaccaggcacctgaatatcggggccggacagagctgctgaaagatgctattggtgagggaaaggtgactctcaggatccggaatgtaaggttctcagatgaaggaggtttcacctgcttcttccgagatcattcttaccaagaggaggcagcaatggaattgaaagtagaagatcctttctactgggtgagccctggagtgctggttctcctcgcggtgctgcctgtgctcctcctgcagatcactgttggcctcgtcttcctctgcctgcagtacagactgagaggaaaacttcgagcagagatagagaatctccaccggacttttgagtcctttggtgttctaggaccccaggttaaggaaccaaaaaagacagggcaattccttgaagagctacgaaatcccttctgagtgatgtcacatcttggcaggggtggaggagagcctggttgcccagggatttgtccttggggacatctcatccatcaagttgcacactcactggcatctttgctatggggacattccaatttgcactttcaggaacactctgaattccaagtagaattgatttcccttcttctgtcatctaccttttctcttcattttcccatttttattacccttctttccatttctctctccagtcttccacctggaagccctctctggctaaggacaggcaggtgcccctctctccatcagaggacacctgtactggagagcaacacaggatggtctctgccatgaactggaggccaggaatctcctcactgaaaattacagtatggtaactttgcaaatggtggttgtttcttccaagactccagccctgattgcgcaaaactgaaaggcatgtgaagggaaggaagaggaagagtgcaaaacattgaagagagagctgagtgagctgaagagtgaggatatgagtagccccaacccaaacctggagatggggagaaacctacagaatactagccagagctcctccttgtcttggcagcctactagggacctggggaagcaaaaacgaaagctgggcaacatgcctgctttagaatgttttccttctacttacacatcttccacaggtctcagaatctttccttcctctcatccttttctcctatcttcatatctatcagagtatccactgtttattcaacaactactacttgatggtcagacacaaacaaacaagctaggtgctaattaataaagatacgagttttggccgggtgcggtggctcacgcctgtaatcccagcactttgggaggccgaggcgggcgaatcacgaggtcaggagttcgagaccagcctggccaacatggtgaaaccccatctctactaaaaatacaaacaattaactgagcatagtggtgggcacctataataccagctactccggaggctgaggcaggagaatcgcttgaacccaggaggcagaggttgcagtgagctgagatcgcgccactgcactctagccagagtgacagagtaagactctgtctcaaaaataaataaataaataaataaataaataaataaataaataaataaaaaataataatacaagttttcataagcacacttctaa

SEQ ID NO: 18883 - DNA, 1689 bp, Homo sapiens
  source 1..1689: mol_type = unassigned DNA
atggcaagcttatcgagaccctctctgcccagctgcctctgctccttcctcctcctcctcctcctccaagtgtcttccagctatgcagggcagttcagagtgataggaccaagacaccctatccgggctctggtcggggatgaagtggaattgccatgtcgcatatctcctgggaagaacgctacaggcatggaggtggggtggtaccgcccccccttctctagggtggttcatctctacagaaatggcaaggaccaagatggagaccaggcacctgaatatcggggccggacagagctgctgaaagatgctattggtgagggaaaggtgactctcaggatccggaatgtaaggttctcagatgaaggaggtttcacctgcttcttccgagatcattcttaccaagaggaggcagcaatggaattgaaagtagaagatcctttctactgggtgagccctggagtgctggttctcctcgcggtgctgcctgtgctcctcctgcagatcactgttggcctcgtcttcctctgcctgcagtacagactgagaggaaaacttcgagcagagatagagaatctccaccggacttttgatccccactttctgagggtgccctgctggaagataaccctgtttgtaattgtgccggttcttggacccttggttgccttgatcatctgctacaactggctacatcgaagactagcagggcaattccttgaagagctactcttccacctggaagccctctctggctaaggacaggcaggtgcccctctctccatcagaggacacctgtactggagagcaacacaggatggtctctgccatgaactggaggccaggaatctcctcactgaaaattacagtatggtaactttgcaaatggtggttgtttcttccaagactccagccctgattgcgcaaaactgaaaggcatgtgaagggaaggaagaggaagagtgcaaaacattgaagagagagctgagtgagctgaagagtgaggatatgagtagccccaacccaaacctggagatggggagaaacctacagaatactagccagagctcctccttgtcttggcagcctactagggacctggggaagcaaaaacgaaagctgggcaacatgcctgctttagaatgttttccttctacttacacatcttccacaggtctcagaatctttccttcctctcatccttttctcctatcttcatatctatcagagtatccactgtttattcaacaactactacttgatggtcagacacaaacaaacaagctaggtgctaattaataaagatacgagttttggccgggtgcggtggctcacgcctgtaatcccagcactttgggaggccgaggcgggcgaatcacgaggtcaggagttcaagaccagcctggccaacatggtgaaaccccatctctactaaaaatacaaacaattaactgagcatagtggtgggcacctataataccagctactccggaggctgaggcaggagaatcgcttgaacccaggaggcagaggttgcagtgagctgagatcgcgccactgcactctagccggagtgacagagtaagactctgtctcaaaaataaataaataaataaataaataaataaataaataaataaataaataaataaaaaataataatacaagttttcataagcacacttctaa

SEQ ID NO: 18884 - DNA, 2142 bp, Homo sapiens
  source 1..2142: mol_type = unassigned DNA
agcccttttgtgtgagtgcctggcaagggtgacgtggggctgtttctgcgggcacagctgcagcaattaccggagtggaggcagggcccaggcagcactgccctccaagatcttcccttgggcttttcagcagtaaggggacatgcaccccaagggcctccacttggcctgaccttgctgcgggggctctctgtccccaggaacagtagagatggcaagcttatcgagaccctctctgcccagctgcctctgctccttcctcctcctcctcctcctccaagtgtcttccagctatgcagggcagttcagagtgataggaccaagacaccctatccgggctctggtcggggatgaagtggaattgccatgtcgcatatctcctgggaagaacgctacaggcatggaggtggggtggtaccgcccccccttctctagggtggttcatctctacagaaatggcaaggaccaagatggagaccaggcacctgaatatcggggccggacagagctgctgaaagatgctattggtgagggaaaggtgactctcaggatccggaatgtaaggttctcagatgaaggaggtttcacctgcttcttccgagatcattcttaccaagaggaggcagcaatggaattgaaagtagaagatcctttctactgggtgagccctggagtgctggttctcctcgcggtgctgcctgtgctcctcctgcagatcactgttggcctcgtcttcctctgcctgcagtacagactgagaggaaaacttcgagcagagatagagaatctccaccggacttttgatccccactttctgagggtgccctgctggaagataaccctgtttgtaattgtgccggttcttggacccttggttgccttgatcatctgctacaactggctacatcgaagactagcagggcaattccttgaagagctacgaaatcccttctgagtgatgtcacatcttggcaggggtggaggagagcctggttgcccagggatttgtccttggggacatctcatccatcaagttgcacactcactggcatctttgctatggggacattccaatttgcactttcaggaacactctgaattccaagtagaattgatttcccttcttctgtcatctaccttttctcttcattttcccatttttattacccttctttccatttctctctccagtcttccacctggaagccctctctggctaaggacaggcaggtgcccctctctccatcagaggacacctgtactggagagcaacacaggatggtctctgccatgaactggaggccaggaatctcctcactgaaaattacagtatggtaactttgcaaatggtggttgtttcttccaagactccagccctgattgcgcaaaactgaaaggcatgtgaagggaaggaagaggaagagtgcaaaacattgaagagagagctgagtgagctgaagagtgaggatatgagtagccccaacccaaacctggagatggggagaaacctacagaatactagccagagctcctccttgtcttggcagcctactagggacctggggaagcaaaaacgaaagctgggcaacatgcctgctttagaatgttttccttctacttacacatcttccacaggtctcagaatctttccttcctctcatccttttctcctatcttcatatctatcagagtatccactgtttattcaacaactactacttgatggtcagacacaaacaaacaagctaggtgctaattaataaagatacgagttttggccgggtgcggtggctcacgcctgtaatcccagcactttgggaggccgaggcgggcgaatcacgaggtcaggagttcaagaccagcctggccaacatggtgaaaccccatctctactaaaaatacaaacaattaactgagcatagtggtgggcacctataataccagctactccggaggctgaggcaggagaatcgcttgaacccaggaggcagaggttgcagtgagctgagatcgcgccactgcactctagccggagtgacagagtaagactctgtctcaaaaataaataaataaataaataaataaataaataaataaataaataaaaaataataatacaagttttcataagcacacttctaa

SEQ ID NO: 18885 - DNA, 1545 bp, Homo sapiens
  source 1..1545: mol_type = unassigned DNA
agcttatcgagaccctctctgcccagctgcctctgctccttcctcctcctcctcctcctccaagtgtcttccagctatgcagggcagttcagagtgataggaccaagacaccctatccgggctctggtcggggatgaagtggaattgccatgtcgcatatctcctgggaagaacgctacaggcatggaggtggggtggtaccgcccccccttctctagggtggttcatctctacagaaatggcaaggaccaagatggagaccaggcacctgaatatcggggccggacagagctgctgaaagatgctattggtgagggaaaggtgactctcaggatccggaatgtaaggttctcagatgaaggaggtttcacctgcttcttccgagatcattcttaccaagaggaggcagcaatggaattgaaagtagaagatcctttctactgggtgagccctggagtgctggttctcctcgcggtgctgcctgtgctcctcctgcagatcactgttggcctcgtcttcctctgcctgcagtacagactgagaggaaaacttcgagcagagatagagaatctccaccggacttttgtcttccacctggaagccctctctggctaaggacaggcaggtgcccctctctccatcagaggacacctgtactggagagcaacacaggatggtctctgccatgaactggaggccaggaatctcctcactgaaaattacagtatggtaactttgcaaatggtggttgtttcttccaagactccagccctgattgcgcaaaactgaaaggcatgtgaagggaaggaagaggaagagtgcaaaacattgaagagagagctgagtgagctgaagagtgaggatatgagtagccccaacccaaacctggagatggggagaaacctacagaatactagccagagctcctccttgtcttggcagcctactagggacctggggaagcaaaaacgaaagctgggcaacatgcctgctttagaatgttttccttctacttacacatcttccacaggtctcagaatctttccttcctctcatccttttctcctatcttcatatctatcagagtatccactgtttattcaacaactactacttgatggtcagacacaaacaaacaagctaggtgctaattaataaagatacgagttttggccgggtgcggtggctcacgcctgtaatcccagcactttgggaggccgaggcgggcgaatcacgaggtcaggagttcaagaccagcctggccaacatggtgaaaccccatctctactaaaaatacaaacaattaactgagcatagtggtgggcacctataataccagctactccggaggctgaggcaggagaatcgcttgaacccaggaggcagaggttgcagtgagctgagatcgcgccactgcactctagccggagtgacagagtaagactctgtctcaaaaataaataaataaataaataaataaataaataaataaataaataaataaataaaaaataataatacaagttttcataagcacacttctaa

SEQ ID NO: 18886 - DNA, 2503 bp, Homo sapiens
  source 1..2503: mol_type = unassigned DNA
agcactgccctccaagatcttcccttgggcttttcagcagtaaggggacatgcaccccaagggcctccacttggcctgaccttgctgcgggggctctctgtccccaggaacagtagagatggcaagcttatcgagaccctctctgcccagctgcctctgctccttcctcctcctcctcctcctccaagtgtcttccagctatgcagggcagttcagagtgataggaccaagacaccctatccgggctctggtcggggatgaagtggaattgccatgtcgcatatctcctgggaagaacgctacaggcatggaggtggggtggtaccgcccccccttctctagggtggttcatctctacagaaatggcaaggaccaagatggagaccaggcacctgaatatcggggccggacagagctgctgaaagatgctattggtgagggaaaggtgactctcaggatccggaatgtaaggttctcagatgaaggaggtttcacctgcttcttccgagatcattcttaccaagaggaggcagcaatggaattgaaagtagaagatcctttctactgggtgagccctggagtgctggttctcctcgcggtgctgcctgtgctcctcctgcagatcactgttggcctcgtcttcctctgcctgcagtacagactgagaggaaaacttcgagcagagatagagaatctccaccggacttttgatccccactttctgagggtgccctgctggaagataaccctgtttgtaattgtgccggttcttggacccttggttgccttgatcatctgctacaactggctacatcgaagactagcagggcaattccttgaagagctacgtaagttctcttctctctgttataagcagagaataaaaagccaggaaagggagacagaagcaacaagaggaagaggcgggctattgagggatcacattcccagaggaaaggaggagctggagagcctgggtggagggaagactcctcctgggaggtagagggcaaagaagccagctgttagagacacatttacaggtggcagagaagctggaggcactcctatctgccacctgatccattcctccttcactgcccctaagcaggaatccaaccctagctggtctcattgcccattccacagcaactgcccagtgcctcacctctcagatcaaccattgaggcaggaatggagacaagatgaccccaagggcttttcttctccctagttcaatggttttatgatacaaactactgacatacgtttttcaagttattttctccttcttctaggaaatcccttctgagtgatgtcacatcttggcaggggtggaggagagcctggttgcccagggatttgtccttggggacatctcatccatcaagttgcacactcactggcatctttgctatggggacattccaatttgcactttcaggaacactctgaattccaagtagaattgatttcccttcttctgtcatctaccttttctcttcattttcccatttttattacccttctttccatttctctctccagtcttccacctggaagccctctctggctaaggacaggcaggtgcccctctctccatcagaggacacctgtactggagagcaacacaggatggtctctgccatgaactggaggccaggaatctcctcactgaaaattacagtatggtaactttgcaaatggtggttgtttcttccaagactccagccctgattgcgcaaaactgaaaggcatgtgaagggaaggaagaggaagagtgcaaaacattgaagagagagctgagtgagctgaagagtgaggatatgagtagccccaacccaaacctggagatggggagaaacctacagaatactagccagagctcctccttgtcttggcagcctactagggacctggggaagcaaaaacgaaagctgggcaacatgcctgctttagaatgttttccttctacttacacatcttccacaggtctcagaatctttccttcctctcatccttttctcctatcttcatatctatcagagtatccactgtttattcaacaactactacttgatggtcagacacaaacaaacaagctaggtgctaattaataaagatacgagttttggccgggtgcggtggctcacgcctgtaatcccagcactttgggaggccgaggcgggcgaatcacgaggtcaggagttcaagaccagcctggccaacatggtgaaaccccatctctactaaaaatacaaacaattaactgagcatagtggtgggcacctataataccagctactccggaggctgaggcaggagaatcgcttgaacccaggaggcagaggttgcagtgagctgagatcgcgccactgcactctagccggagtgacagagtaagactctgtctcaaaaataaataaataaataaataaataaataaataaataaataaataaataaaaaataataatacaagttttcataagcacacttctaa

SEQ ID NO: 18887 - DNA, 1677 bp, Homo sapiens
  source 1..1677: mol_type = unassigned DNA
atggcaagcttatcgagaccctctctgcccagctgcctctgctccttcctcctcctcctcctcctccaagtgtcttccagctatgcagggcagttcagagtgataggaccaagacaccctatccgggctctggtcggggatgaagtggaattgccatgtcgcatatctcctgggaagaacgctacaggcatggaggtggggtggtaccgcccccccttctctagggtggttcatctctacagaaatggcaaggaccaagatggagaccaggcacctgaatatcggggccggacagagctgctgaaagatgctattggtgagggaaaggtgactctcaggatccggaatgtaaggttctcagatgaaggaggtttcacctgcttcttccgagatcattcttaccaagaggaggcagcaatggaattgaaagtagaagatcctttctactgggtgagccctggagtgctggttctcctcgcggtgctgcctgtgctcctcctgcagatcactcttggcctcgtcttcctctgcctgcagtacagactgagaggaaaacttcgagcagagatagagaatctccaccggacttttgatccccactttctgagggtgccctgctggaagataaccctgtttgtaattgtgccggttcttggacccttggttgccttgatcatctgctacaactggctacatcgaagactagcagggcaattccttgaagagctactcttccacctggaagccctctctggctaaggacaggcaggtgcccctctctccatcagaggacacctgtactggagagcaacacaggatggtctctgccatgaactggaggccaggaatctcctcactgaaaattacagtatggtaactttgcaaatggtggttgtttcttccaagactccagccctgattgcgcaaaactgaaaggcatgtgaagggaaggaagaggaagagtgcaaaacattgaagagagagctgagtgagctgaagagtgaggatatgagtagccccaacccaaacctggagatggggagaaacctacagaatactagccagagctcctccttgtcttggcagcctactagggacctggggaagcaaaaacgaaagctgggcaacatgcctgctttagaatgttttccttctacttacacatcttccacaggtctcagaatctttccttcctctcatccttttctcctatcttcatatctatcagagtatccactgtttattcaacaactactacttgatggtcagacacaaacaaacaagctaggtgctaattaataaagatacgagttttggccgggtgcggtggctcacgcctgtaatcccagcactttgggaggccgaggcgggcgaatcacgaggtcaggagttcaagaccagcctggccaacatggtgaaaccccatctctactaaaaatacaaacaattaactgagcatagtggtgggcacctataataccagctactccggaggctgaggcaggagaatcgcttgaacccaggaggcagaggttgcagtgagctgagatcgcgccactgcactctagccggagtgacagagtaagactctgtctcaaaaataaataaataaataaataaataaataaataaataaataaaaaataataatacaagttttcataagcacacttctaa

SEQ ID NO: 18888 - DNA, 1730 bp, Homo sapiens
  source 1..1730: mol_type = unassigned DNA
ggcagttcagagtgataggaccaagacaccctatccgggctctggtcggggatgaagtggaattgccatgtcgcatatctcctgggaagaacgctacaggcatggaggtggggtggtaccgcccccccttctctagggtggttcatctctacagaaatggcaaggaccaagatggagaccaggcacctgaatatcggggccggacagagctgctgaaagatgctattggtgagggaaaggtgactctcaggatccggaatgtaaggttctcagatgaaggaggtttcacctgcttcttccgagatcattcttaccaagaggaggcagcaatggaattgaaagtagaagatcctttctactgggtgagccctggagtgctggttctcctcgcggtgctgcctgtgctcctcctgcagatcactgttggcctcgtcttcctctgcctgcagtacagactgagaggaaaacttcgagcagagatagagaatctccaccggacttttgggcaattccttgaagagctacgaaatcccttctgagtgatgtcacatcttggcaggggtggaggagagcctggttgcccagggatttgtccttggggacatctcatccatcaagttgcacactcactggcatctttgctatggggacattccaatttgcactttcaggaacactctgaattccaagtagaattgatttcccttcttctgtcatctaccttttctcttcattttcccatttttattacccttctttccatttctctctccagtcttccacctggaagccctctctggctaaggacaggcaggtgcccctctctccatcagaggacacctgtactggagagcaacacaggatggtctctgccatgaactggaggccaggaatctcctcactgaaaattacagtatggtaactttgcaaatggtggttgtttcttccaagactccagccctgattgcgcaaaactgaaaggcatgtgaagggaaggaagaggaagagtgcaaaacattgaagagagagctgagtgagctgaagagtgaggatatgagtagccccaacccaaacctggagatggggagaaacctacagaatactagccagagctcctccttgtcttggcagcctactagggacctggggaagcaaaaacgaaagctgggcaacatgcctgctttagaatgttttccttctacttacacatcttccacaggtctcagaatctttccttcctctcatccttttctcctatcttcatatctatcagagtatccactgtttattcaacaactactacttgatggtcagacacaaacaaacaagctaggtgctaattaataaagatacgagttttggccgggtgcggtggctcacgcctgtaatcccagcactttgggaggccgaggcgggcgaatcacgaggtcaggagttcaagaccagcctggccaacatggtgaaaccccatctctactaaaaatacaaacaattaactgagcatagtggtgggcacctataataccagctactccggaggctgaggcaggagaatcgcttgaacccaggaggcagaggttgcagtgagctgagatcgcgccactgcactctagccggagtgacagagtaagactctgtctcaaaaataaataaataaataaataaataaataaataaataaataaataaataaaaaataataatacaagttttcataagcacacttctaa

SEQ ID NO: 18889 - DNA, 1587 bp, Homo sapiens; identical to SEQ ID NO: 18842
  source 1..1587: mol_type = unassigned DNA

SEQ ID NO: 18890 - DNA, 2138 bp, Homo sapiens
  source 1..2138: mol_type = unassigned DNA
agcccttttgtgtgagtgcctggcaagggtgacgtggggctgtttctgcgggcacagctgcagcaattaccggagtggaggcagggcccaggcagcactgccctccaagatcttcccttgggcttttcagcagtaaggggacatgcaccccaagggcctccacttggcctgaccttgctgcgggggctctctgtccccaggaacagtagagatggcaagcttatcgagaccctctctgcccagctgcctctgctccttcctcctcctcctcctcctccaagtgtcttccagctatgcagggcagttcagagtgataggaccaagacaccctatccgggctctggtcggggatgaagtggaattgccatgtcgcatatctcctgggaagaacgctacaggcatggaggtggggtggtaccgcccccccttctctagggtggttcatctctacagaaatggcaaggaccaagatggagaccaggcacctgaatatcggggccggacagagctgctgaaagatgctattggtgagggaaaggtgactctcaggatccggaatgtaaggttctcagatgaaggaggtttcacctgcttcttccgagatcattcttaccaagaggaggcagcaatggaattgaaagtagaagatcctttctactgggtgagccctggagtgctggttctcctcgcggtgctgcctgtgctcctcctgcagatcactcttggcctcgtcttcctctgcctgcagtacagactgagaggaaaacttcgagcagagatagagaatctccaccggacttttgatccccactttctgagggtgccctgctggaagataaccctgtttgtaattgtgccggttcttggacccttggttgccttgatcatctgctacaactggctacatcgaagactagcagggcaattccttgaagagctacgaaatcccttctgagtgatgtcacatcttggcaggggtggaggagagcctggttgcccagggatttgtccttggggacatctcatccatcaagttgcacactcactggcatctttgctatggggacattccaatttgcactttcaggaacactctgaattccaagtagaattgatttcccttcttctgtcatctaccttttctcttcattttcccatttttattacccttctttccatttctctctccagtcttccacctggaagccctctctggctaaggacaggcaggtgcccctctctccatcagaggacacctgtactggagagcaacacaggatggtctctgccatgaactggaggccaggaatctcctcactgaaaattacagtatggtaactttgcaaatggtggttgtttcttccaagactccagccctgattgcgcaaaactgaaaggcatgtgaagggaaggaagaggaagagtgcaaaacattgaagagagagctgagtgagctgaagagtgaggatatgagtagccccaacccaaacctggagatggggagaaacctacagaatactagccagagctcctccttgtcttggcagcctactagggacctggggaagcaaaaacgaaagctgggcaacatgcctgctttagaatgttttccttctacttacacatcttccacaggtctcagaatctttccttcctctcatccttttctcctatcttcatatctatcagagtatccactgtttattcaacaactactacttgatggtcagacacaaacaaacaagctaggtgctaattaataaagatacgagttttggccgggtgcggtggctcacgcctgtaatcccagcactttgggaggccgaggcgggcgaatcacgaggtcaggagttcaagaccagcctggccaacatggtgaaaccccatctctactaaaaatacaaacaattaactgagcatagtggtgggcacctataataccagctactccggaggctgaggcaggagaatcgcttgaacccaggaggcagaggttgcagtgagctgagatcgcgccactgcactctagccggagtgacagagtaagactctgtctcaaaaataaataaataaataaataaataaataaataaataaataaaaaataataatacaagttttcataagcacacttctaa

SEQ ID NO: 18891 - DNA, 1560 bp, Homo sapiens
  source 1..1560: mol_type = unassigned DNA
atggcaagcttatcgagaccctctctgcccagctgcctctgctccttcctcctcctcctcctcctccaagtgtcttccagctatgcagggcagttcagagtgataggaccaagacaccctatccgggctctggtcggggatgaagtggaattgccatgtcgcatatctcctgggaagaacgctacaggcatggaggtggggtggtaccgcccccccttctctagggtggttcatctctacagaaatggcaaggaccaagatggagaccaggcacctgaatatcggggccggacagagctgctgaaagatgctattggtgagggaaaggtgactctcaggatccggaatgtaaggttctcagatgaaggaggtttcacctgcttcttccgagatcattcttaccaagaggaggcagcaatggaattgaaagtagaagatcctttctactgggtgagccctggagtgctggttctcctcgcggtgctgcctgtgctcctcctgcagatcactcttggcctcgtcttcctctgcctgcagtacagactgagaggaaaacttcgagcagagatagagaatctccaccggacttttgggcaattccttgaagagctactcttccacctggaagccctctctggctaaggacaggcaggtgcccctctctccatcagaggacacctgtactggagagcaacacaggatggtctctgccatgaactggaggccaggaatctcctcactgaaaattacagtatggtaactttgcaaatggtggttgtttcttccaagactccagccctgattgcgcaaaactgaaaggcatgtgaagggaaggaagaggaagagtgcaaaacattgaagagagagctgagtgagctgaagagtgaggatatgagtagccccaacccaaacctggagatggggagaaacctacagaatactagccagagctcctccttgtcttggcagcctactagggacctggggaagcaaaaacgaaagctgggcaacatgcctgctttagaatgttttccttctacttacacatcttccacaggtctcagaatctttccttcctctcatccttttctcctatcttcatatctatcagagtatccactgtttattcaacaactactacttgatggtcagacacaaacaaacaagctaggtgctaattaataaagatacgagttttggccgggtgcggtggctcacgcctgtaatcccagcactttgggaggccgaggcgggcgaatcacgaggtcaggagttcaagaccagcctggccaacatggtgaaaccccatctctactaaaaatacaaacaattaactgagcatagtggtgggcacctataataccagctactccggaggctgaggcaggagaatcgcttgaacccaggaggcagaggttgcagtgagctgagatcgcgccactgcactctagccggagtgacagagtaagactctgtctcaaaaataaataaataaataaataaataaataaataaataaataaaaaataataatacaagttttcataagcacacttctaa

SEQ ID NO: 18892 - DNA, 1537 bp, Homo sapiens
  source 1..1537: mol_type = unassigned DNA
agcttatcgagaccctctctgcccagctgcctctgctccttcctcctcctcctcctcctccaagtgtcttccagctatgcagggcagttcagagtgataggaccaagacaccctatccgggctctggtcggggatgaagtggaattgccatgtcgcatatctcctgggaagaacgctacaggcatggaggtggggtggtaccgcccccccttctctagggtggttcatctctacagaaatggcaaggaccaagatggagaccaggcacctgaatatcggggccggacagagctgctgaaagatgctattggtgagggaaaggtgactctcaggatccggaatgtaaggttctcagatgaaggaggtttcacctgcttcttccgagatcattcttaccaagaggaggcagcaatggaattgaaagtagaagatcctttctactgggtgagccctggagtgctggttctcctcgcggtgctgcctgtgctcctcctgcagatcactgttggcctcgtcttcctctgcctgcagtacagactgagaggaaaacttcgagcagagatagagaatctccaccggacttttgtcttccacctggaagccctctctggctaaggacaggcaggtgcccctctctccatcagaggacacctgtactggagagcaacacaggatggtctctgccatgaactggaggccaggaatctcctcactgaaaattacagtatggtaactttgcaaatggtggttgtttcttccaagactccagccctgattgcgcaaaactgaaaggcatgtgaagggaaggaagaggaagagtgcaaaacattgaagagagagctgagtgagctgaagagtgaggatatgagtagccccaacccaaacctggagatggggagaaacctacagaatactagccagagctcctccttgtcttggcagcctactagggacctggggaagcaaaaacgaaagctgggcaacatgcctgctttagaatgttttccttctacttacacatcttccacaggtctcagaatctttccttcctctcatccttttctcctatcttcatatctatcagagtatccactgtttattcaacaactactacttgatggtcagacacaaacaaacaagctaggtgctaattaataaagatacgagttttggccgggtgcggtggctcacgcctgtaatcccagcactttgggaggccgaggcgggcgaatcacgaggtcaggagttcaagaccagcctggccaacatggtgaaaccccatctctactaaaaatacaaacaattaactgagcatagtggtgggcacctataataccagctactccggaggctgaggcaggagaatcgcttgaacccaggaggcagaggttgcagtgagctgagatcgcgccactgcactctagccggagtgacagagtaagactctgtctcaaaaataaataaataaataaataaataaataaataaataaataaataaaaaataataatacaagttttcataagcacacttctaa

SEQ ID NO: 18893 - DNA, 1612 bp, Homo sapiens
  source 1..1612: mol_type = unassigned DNA
atggcaagcttatcgagaccctctctgcccagctgcctctgctccttcctcctcctcctcctcctccaagtgtcttccagctatgcagggcagttcagagtgataggaccaagacaccctatccgggctctggtcggggatgaagtggaattgccatgtcgcatatctcctgggaagaacgctacaggcatggaggtggggtggtaccgcccccccttctctagggtggttcatctctacagaaatggcaaggaccaagatggagaccaggcacctgaatatcggggccggacagagctgctgaaagatgctattggtgagggaaaggtgactctcaggatccggaatgtaaggttctcagatgaaggaggtttcacctgcttcttccgagatcattcttaccaagaggaggcagcaatggaattgaaagtagaagatcctttctactgggtgagccctggagtgctggttctcctcgcggtgctgcctgtgctcctcctgcagatcactgttggcctcgtcttcctctgcctgcagtacagactgagaggaaaacttcgagcagagatagagaatctccaccggacttttgagtcctttggtgttctaggaccccaggttaaggaaccaaaaaagacagggcaattccttgaagagctactcttccacctggaagccctctctggctaaggacaggcaggtgcccctctctccatcagaggacacctgtactggagagcaacacaggatggtctctgccatgaactggaggccaggaatctcctcactgaaaattacagtatggtaactttgcaaatggtggttgtttcttccaagactccagccctgattgcgcaaaactgaaaggcatgtgaagggaaggaagaggaagagtgcaaaacattgaagagagagctgagtgagctgaagagtgaggatatgagtagccccaacccaaacctggagatggggagaaacctacagaatactagccagagctcctccttgtcttggcagcctactagggacctggggaagcaaaaacgaaagctgggcaacatgcctgctttagaatgttttccttctacttacacatcttccacaggtctcagaatctttccttcctctcatccttttctcctatcttcatatctatcagagtatccactgtttattcaacaactactacttgatggtcagacacaaacaaacaagctaggtgctaattaataaagatacgagttttggccgggtgcggtggctcacgcctgtaatcccagcactttgggaggccgaggcgggcgaatcacgaggtcaggagttcgagaccagcctggccaacatggtgaaaccccatctctactaaaaatacaaacaattaactgagcatagtggtgggcacctataataccagctactccggaggctgaggcaggagaatcgcttgaacccaggaggcagaggttgcagtgagctgagatcgcgccactgcactctagccagagtgacagagtaagactctgtctcaaaaataaataaataaataaataaataaataaataaataaataaataaaaaataataatacaagttttcataagcacacttctaa

SEQ ID NO: 18894 - DNA, 1537 bp, Homo sapiens
  source 1..1537: mol_type = unassigned DNA
agcttatcgagaccctctctgcccagctgcctctgctccttcctcctcctcctcctcctccaagtgtcttccagctatgcagggcagttcagagtgataggaccaagacaccctatccgggctctggtcggggatgaagtggaattgccatgtcgcatatctcctgggaagaacgctacaggcatggaggtggggtggtaccgcccccccttctctagggtggttcatctctacagaaatggcaaggaccaagatggagaccaggcacctgaatatcggggccggacagagctgctgaaagatgctattggtgagggaaaggtgactctcaggatccggaatgtaaggttctcagatgaaggaggtttcacctgcttcttccgagatcattcttaccaagaggaggcagcaatggaattgaaagtagaagatcctttctactgggtgagccctggagtgctggttctcctcgcggtgctgcctgtgctcctcctgcagatcactgttggcctcgtcttcctctgcctgcagtacagactgagaggaaaacttcgagcagagatagagaatctccaccggacttttgtcttccacctggaagccctctctggctaaggacaggcaggtgcccctctctccatcagaggacacctgtactggagagcaacacaggatggtctctgccatgaactggaggccaggaatctcctcactgaaaattacagtatggtaactttgcaaatggtggttgtttcttccaagactccagccctgattgcgcaaaactgaaaggcatgtgaagggaaggaagaggaagagtgcaaaacattgaagagagagctgagtgagctgaagagtgaggatatgagtagccccaacccaaacctggagatggggagaaacctacagaatactagccagagctcctccttgtcttggcagcctactagggacctggggaagcaaaaacgaaagctgggcaacatgcctgctttagaatgttttccttctacttacacatcttccacaggtctcagaatctttccttcctctcatccttttctcctatcttcatatctatcagagtatccactgtttattcaacaactactacttgatggtcagacacaaacaaacaagctaggtgctaattaataaagatacgagttttggccgggtgcggtggctcacgcctgtaatcccagcactttgggaggccgaggcgggcgaatcacgaggtcaggagttcgagaccagcctggccaacatggtgaaaccccatctctactaaaaatacaaacaattaactgagcatagtggtgggcacctataataccagctactccggaggctgaggcaggagaatcgcttgaacccaggaggcagaggttgcagtgagctgagatcgcgccactgcactctagccagagtgacagagtaagactctgtctcaaaaataaataaataaataaataaataaataaataaataaataaataaaaaataataatacaagttttcataagcacacttctaa

SEQ ID NO: 18895 - DNA, 1608 bp, Homo sapiens
  source 1..1608: mol_type = unassigned DNA
atggcaagcttatcgagaccctctctgcccagctgcctctgctccttcctcctcctcctcctcctccaagtgtcttccagctatgcagggcagttcagagtgataggaccaagacaccctatccgggctctggtcggggatgaagtggaattgccatgtcgcatatctcctgggaagaacgctacaggcatggaggtggggtggtaccgcccccccttctctagggtggttcatctctacagaaatggcaaggaccaagatggagaccaggcacctgaatatcggggccggacagagctgctgaaagatgctattggtgagggaaaggtgactctcaggatccggaatgtaaggttctcagatgaaggaggtttcacctgcttcttccgagatcattcttaccaagaggaggcagcaatggaattgaaagtagaagatcctttctactgggtgagccctggagtgctggttctcctcgcggtgctgcctgtgctcctcctgcagatcactcttggcctcgtcttcctctgcctgcagtacagactgagaggaaaacttcgagcagagatagagaatctccaccggacttttgagtcctttggtgttctaggaccccaggttaaggaaccaaaaaagacagggcaattccttgaagagctactcttccacctggaagccctctctggctaaggacaggcaggtgcccctctctccatcagaggacacctgtactggagagcaacacaggatggtctctgccatgaactggaggccaggaatctcctcactgaaaattacagtatggtaactttgcaaatggtggttgtttcttccaagactccagccctgattgcgcaaaactgaaaggcatgtgaagggaaggaagaggaagagtgcaaaacattgaagagagagctgagtgagctgaagagtgaggatatgagtagccccaacccaaacctggagatggggagaaacctacagaatactagccagagctcctccttgtcttggcagcctactagggacctggggaagcaaaaacgaaagctgggcaacatgcctgctttagaatgttttccttctacttacacatcttccacaggtctcagaatctttccttcctctcatccttttctcctatcttcatatctatcagagtatccactgtttattcaacaactactacttgatggtcagacacaaacaaacaagctaggtgctaattaataaagatacgagttttggccgggtgcggtggctcacgcctgtaatcccagcactttgggaggccgaggcgggcgaatcacgaggtcaggagttcaagaccagcctggccaacatggtgaaaccccatctctactaaaaatacaaacaattaactgagcatagtggtgggcacctataataccagctactccggaggctgaggcaggagaatcgcttgaacccaggaggcagaggttgcagtgagctgagatcgcgccactgcactctagccggagtgacagagtaagactctgtctcaaaaataaataaataaataaataaataaataaataaataaataaaaaataataatacaagttttcataagcacacttctaa

SEQ ID NO: 18896 - DNA, 958 bp, Homo sapiens
  source 1..958: mol_type = unassigned DNA
atggcaagcttatcaagaccctctctgcccagctgcctctgctccttcctcctcctcctcctcctccaagtgtcttccagctatgcagggcagttcagagtgataggaccaagacaccctatccgggctctggtcggggatgaagtggaattgccatgtcgcatatctcctgggaagaacgctacaggcatggaggtggggtggtaccgcccccccttctctagggtggttcatctctacagaaatggcaaggaccaagatggagaccaggcacctgaatatcggggccggacagagctgctgaaagatgctattggtgagggaaaggtgactctcaggatccggaatgtaaggttctcagatgaaggaggtttcacctgcttcttccgagatcattcttaccaagaggaggcagcaatggaattgaaagtagaagatcctttctactgggtgagccctggagtgctggttctcctcgcggtgctgcctgtgctcctcctgcagatcactgttggcctcatcttcctctgcctgcagtacagactgagaggaaaacttcgagcagagatagagaatctccaccggacttttgagtcctttggtgttctaggaccccaggttaaggaaccaaaaaagacagggcaattccttgaagagctactcttccacctggaagccctctctggctaaggacaggcaggtgcccctctctccatcagaggacacctgtactggagagcaacacaggatggtctctgccatgaactggaggccaggaatctcctcactgaaaattacagtatggtaactttgcaaatggtggttgtttcttccaagactccagccctgattgcgcaaaactgaaaggcatgtgaagggaaggaagaggaagagtgcaaaacattgaagagagagctgagtgagctgaagagtgaggatatgagtagccccaacccaa

SEQ ID NO: 18897 - DNA, 2046 bp, Homo sapiens
  source 1..2046: mol_type = unassigned DNA
gtcatcccctcagtctgtagcccttttgtgtgagtgcctggcaagggtgacgtggggctgtttctgcgggcacagctgcagcaattaccggagtggaggcagggcccaggcagcactgccctccaagatcttcccttgggcttttcagcagtaaggggacatgcaccccaagggcctccacttggcctgaccttgctgcgggggctctctgtccccaggaacagtagagatggcaagcttatcaagaccctctctgcccagctgcctctgctccttcctcctcctcctcctcctccaagtgtcttccagctatgcagggcagttcagagtgataggaccaagacaccctatccgggctctggtcggggatgaagtggaattgccatgtcgcatatctcctgggaagaacgctacaggcatggaggtggggtggtaccgcccccccttctctagggtggttcatctctacagaaatggcaaggaccaagatggagaccaggcacctgaatatcggggccggacagagctgctgaaagatgctattggtgagggaaaggtgactctcaggatccggaatgtaaggttctcagatgaaggaggtttcacctgcttcttccgagatcattcttaccaagaggaggcagcaatggaattgaaagtagaagtgtctcactctgtcacccaggattggttgcagtggcacgatcatggctcattgcagcctccacctcccaggctcaagtgatcctcctgactcagcctcttgaatagctgagaccacaggcttgtgtcaccatgcccagatcctttctactgggtgagccctggagtgctggttctcctcgcggtgctgcctgtgctcctcctgcagatcactgttggcctcatcttcctctgcctgcagtacagactgagaggaaaacttcgagcagagatagagaatctccaccggacttttgatccccactttctgagggtgccctgctggaagataaccctgtttgtaattgtgccggttcttggacccttggttgccttgatcatctgctacaactggctacatcgaagactagcagggcaattccttgaagagctactcttccacctggaagccctctctggctaaggacaggcaggtgcccctctctccatcagaggacacctgtactggagagcaacacaggatggtctctgccatgaactggaggccaggaatctcctcactgaaaattacagtatggtaactttgcaaatggtggttgtttcttccaagactccagccctgattgcgcaaaactgaaaggcatgtgaagggaaggaagaggaagagtgcaaaacattgaagagagagctgagtgagctgaagagtgaggatatgagtagccccaacccaaacctggagatggggagaaacctacagaatactagccagagctcctccttgtcttggcagcctactagggacctggggaagcaaaaacgaaagctgggcaacatgcctgctttagaatgttttccttctacttacacatcttccacaggtctcagaatctttccttcctctcatccttttctcctatcttcatatctatcagagtatccactgtttattcaacaactactacttgatggtcagacacaaacaaacaagctaggtgctaattaataaagatacgagttttggccgggtgcggtggctcacgcctgtaatcccagcactttgggaggccgaggcgggcgaatcacgaggtcaggagttcaagaccagcctggccaacatggtgaaaccccatctctactaaaaatacaaacaattaactgagcatagtggtgggcacctataataccagctactccggaggctgaggcaggagaatcgcttgaacccaggaggcagaggttgcagtgagctgagatcgtgccactgcactctagccggagtgacagagtaagactctgtctcaaaaataaataaataaataaataaataaataaataaataaataaataaaaaataataatacaagttttcataagcacacttct

SEQ ID NO: 18898 - DNA, 1436 bp, Homo sapiens
  source 1..1436: mol_type = unassigned DNA
aagatcttcccttgggcttttcagcagtaaggggacatgcaccccaagggcctccacttggcctgaccttgctgcgggggctctctgtccccaggaacagtagagatggcaagcttatcgagaccctctctgcccagctgcctctgctccttcctcctcctcctcctcctccaagtgtcttccagctatgcagggcagttcagagtgataggaccaagacaccctatccgggctctggtcggggatgaagtggaattgccatgtcgcatatctcctgggaagaacgctacagaaatggcaaggaccaagatggagaccaggcacctgaatatcggggccggacagagctgctgaaagatgctattggtgagggaaaggtgactctcaggatccggaatgtaaggttctcagatgaaggaggtttcacctgcttcttccgagatcattcttaccaagaggaggcagcaatggaattgaaagtagaagatcctttctactgggtgagccctggagtgctggttctcctcgcggtgctgcctgtgctcctcctgcagatcactgttggcctcgtcttcctctgcctgcagtacagactgagaggaaaacttcgagcagagatagagaatctccaccggacttttgatccccactttctgagggtgccctgctggaagataaccctgtttgtaattgtgccggttcttggacccttggttgccttgatcatctgctacaactggctacatcgaagactagcagggcaattccttgaagagctacgaaatcccttctgagtgatgtcacatcttggcaggggtggaggagagcctggttgcccagggatttgtccttggggacatctcatccatcaagttgcacactcactggcatctttgctatggggacattccaatttgcactttcaggaacactctgaattccaagtagaattgatttcccttcttctgtcatctaccttttctcttcattttcccatttttattacccttctttccatttctctctccagtcttccacctggaagccctctctggctaaggacaggcaggtgcccctctctccatcagaggacacctgtactggagagcaacacaggatggtctctgccatgaactggaggccaggaatctcctcactgaaaattacagtatggtaactttgcaaatggtggttgtttcttccaagactccagccctgattgcgcaaaactgaaaggcatgtgaagggaaggaagaggaagagtgcaaaacattgaagagagagctgagtgagctgaagagtgaggatatgagtagccccaacccaaacctggagatggggagaaacctacagaatactagccagagctcctccttgtcttggcagcctactagggacctggggaagcaaaaacgaaagctgggcaacatgcctgc

SEQ ID NO: 18899 - DNA, 322 bp, Homo sapiens
  source 1..322: mol_type = unassigned DNA
caattaccggagtggaggcagggcccaggcagcactgccctccaagatcttcccttgggcttttcagcagtaaggggacatgcaccccaagggcctccacttggcctgaccttgctgcgggggctctctgtccccaggaacagtagagatggcaagcttatcgagaccctctctgcccagctgcctctgctccttcctcctcctcctcctcctccaagtgtcttccagctatgcaggattggttgcagtggcacgatcatggctcattgcagcctccacctcccaggctcaagtgatcctcctgactcagcctcttgaatag

SEQ ID NO: 18900 - DNA, 2045 bp, Homo sapiens
  source 1..2045: mol_type = unassigned DNA
gtcatcccctcagtctgtagcccttttgtgtgagtgcctggcaagggtgacgtggggctgtttctgcgggcacagctgcagcaattaccggagtggaggcagggcccaggcagcactgccctccaagatcttcccttgggcttttcagcagtaaggggacatgcaccccaagggcctccacttggcctgaccttgctgcgggggctctctgtccccaggaacagtagagatggcaagcttatcgagaccctctctgcccagctgcctctgctccttcctcctcctcctcctcctccaagtgtcttccagctatgcagggcagttcagagtgataggaccaagacaccctatccgggctctggtcggggatgaagtggaattgccatgtcgcatatctcctgggaagaacgctacaggcatggaggtggggtggtaccgcccccccttctctagggtggttcatctctacagaaatggcaaggaccaagatggagaccaggcacctgaatatcggggccggacagagctgctgaaagatgctattggtgagggaaaggtgactctcaggatccggaatgtaaggttctcagatgaaggaggtttcacctgcttcttccgagatcattcttaccaagaggaggcagcaatggaattgaaagtagaagatcctttctactgggtgagccctggagtgctggttctcctcgcggtgctgcctgtgctcctcctgcagatcactgttggcctcgtcttcctctgcctgcagtacagactgagaggaaaacttcgagcagagatagagaatctccaccggacttttgggcaattccttgaagagctacgaaatcccttctgagtgatgtcacatcttggcaggggtggaggagagcctggttgcccagggatttgtccttggggacatctcatccatcaagttgcacactcactggcatctttgctatggggacattccaatttgcactttcaggaacactctgaattccaagtagaattgatttcccttcttctgtcatctaccttttctcttcattttcccatttttattacccttctttccatttctctctccagtcttccacctggaagccctctctggctaaggacaggcaggtgcccctctctccatcagaggacacctgtactggagagcaacacaggatggtctctgccatgaactggaggccaggaatctcctcactgaaaattacagtatggtaactttgcaaatggtggttgtttcttccaagactccagccctgattgcgcaaaactgaaaggcatgtgaagggaaggaagaggaagagtgcaaaacattgaagagagagctgagtgagctgaagagtgaggatatgagtagccccaacccaaacctggagatggggagaaacctacagaatactagccagagctcctccttgtcttggcagcctactagggacctggggaagcaaaaacgaaagctgggcaacatgcctgctttagaatgttttccttctacttacacatcttccacaggtctcagaatctttccttcctctcatccttttctcctatcttcatatctatcagagtatccactgtttattcaacaactactacttgatggtcagacacaaacaaacaagctaggtgctaattaataaagatatgagttttggccgggtgcggtggctcacgcctgtaatcccagcactttgggaggccgaggcgggcgaatcacgaggtcaggagttcgagaccagcctggccaacatggtgaaaccccatctctactaaaaatacaaacaattaactgagcatagtggtgggcacctataataccagctactccggaggctgaggcaggagaatcgcttgaacccaggaggcagaggttgcagtgagctgagatcgcgccactgcactctagccagagtgacagagtaagactctgtctcaaaaataaataaataaataaataaataaataaataaataaataaataaataaaaaataataatacaagttttcataagcacacttct

SEQ ID NO: 18901 - DNA, 2296 bp, Homo sapiens
  source 1..2296: mol_type = unassigned DNA
gtcatcccctcagtctgtagcccttttgtgtgagtgcctggcaagggtgacgtggggctgtttctgcgggcacagctgcagcaattaccggagtggaggcagggcccaggcagcactgccctccaagatcttcccttgggcttttcagcagtaaggggacatgcaccccaagggcctccacttggcctgaccttgctgcgggggctctctgtccccaggaacagtagagatggcaagcttatcgagaccctctctgcccagctgcctctgctccttcctcctcctcctcctcctccaagtgtcttccagctatgcagggcagttcagagtgataggaccaagacaccctatccgggctctggtcggggatgaagtggaattgccatgtcgcatatctcctgggaagaacgctacaggcatggaggtggggtggtaccgcccccccttctctagggtggttcatctctacagaaatggcaaggaccaagatggagaccaggcacctgaatatcggggccggacagagctgctgaaagatgctattggtgagggaaaggtgactctcaggatccggaatgtaaggttctcagatgaaggaggtttcacctgcttcttccgagatcattcttaccaagaggaggcagcaatggaattgaaagtagaagtgtctcactctgtcacccaggattggttgcagtggcacgatcatggctcattgcagcctccacctcccaggctcaagtgatcctcctgactcagcctcttgaatagctgagaccacaggcttgtgtcaccatgcccagatcctttctactgggtgagccctggagtgctggttctcctcgcggtgctgcctgtgctcctcctgcagatcactgttggcctcgtcttcctctgcctgcagtacagactgagaggaaaacttcgagcagagatagagaatctccaccggacttttgatccccactttctgagggtgccctgctggaagataaccctgtttgtaattgtgccggttcttggacccttggttgccttgatcatctgctacaactggctacatcgaagactagcagggcaattccttgaagagctacgaaatcccttctgagtgatgtcacatcttggcaggggtggaggagagcctggttgcccagggatttgtccttggggacatctcatccatcaagttgcacactcactggcatctttgctatggggacattccaatttgcactttcaggaacactctgaattccaagtagaattgatttcccttcttctgtcatctaccttttctcttcattttcccatttttattacccttctttccatttctctctccagtcttccacctggaagccctctctggctaaggacaggcaggtgcccctctctccatcagaggacacctgtactggagagcaacacaggatggtctctgccatgaactggaggccaggaatctcctcactgaaaattacagtatggtaactttgcaaatggtggttgtttcttccaagactccagccctgattgcgcaaaactgaaaggcatgtgaagggaaggaagaggaagagtgcaaaacattgaagagagagctgagtgagctgaagagtgaggatatgagtagccccaacccaaacctggagatggggagaaacctacagaatactagccagagctcctccttgtcttggcagcctactagggacctggggaagcaaaaacgaaagctgggcaacatgcctgctttagaatgttttccttctacttacacatcttccacaggtctcagaatctttccttcctctcatccttttctcctatcttcatatctatcagagtatccactgtttattcaacaactactacttgatggtcagacacaaacaaacaagctaggtgctaattaataaagatacgagttttggccgggtgcggtggctcacgcctgtaatcccagcactttgggaggccgaggcgggcgaatcacgaggtcaggagttcgagaccagcctggccaacatggtgaaaccccatctctactaaaaatacaaacaattaactgagcatagtggtgggcacctataataccagctactccggaggctgaggcaggagaatcgcttgaacccaggaggcagaggttgcagtgagctgagatcgcgccactgcactctagccagagtgacagagtaagactctgtctcaaaaataaataaataaataaataaataaataaataaataaataaataaaaaataataatacaagttttcataagcacacttct

SEQ ID NO: 18902 - DNA, 2296 bp, Homo sapiens
  source 1..2296: mol_type = unassigned DNA
gtcatcccctcagtctgtagcccttttgtgtgagtgcctggcaagggtgacgtggggctgtttctgcgggcacagctgcagcaattaccggagtggaggcagggcccaggcagcactgccctccaagatcttcccttgggcttttcagcagtaaggggacatgcaccccaagggcctccacttggcctgaccttgctgcgggggctctctgtccccaggaacagtagagatggcaagcttatcgagaccctctctgcccagctgcctctgctccttcctcctcctcctcctcctccaagtgtcttccagctatgcagggcagttcagagtgataggaccaagacaccctatccgggctctggtcggggatgaagtggaattgccatgtcgcatatctcctgggaagaacgctacaggcatggaggtggggtggtaccgcccccccttctctagggtggttcatctctacagaaatggcaaggaccaagatggagaccaggcacctgaatatcggggccggacagagctgctgaaagatgctattggtgagggaaaggtgactctcaggatccggaatgtaaggttctcagatgaaggaggtttcacctgcttcttccgagatcattcttaccaagaggaggcagcaatggaattgaaagtagaagtgtctcactctgtcacccaggattggttgcagtggcacgatcatggctcattgcagcctccacctcccaggctcaagtgatcctcctgactcagcctcttgaatagctgagaccacaggcttgtgtcaccatgcccagatcctttctactgggtgagccctggagtgctggttctcctcgcggtgctgcctgtgctcctcctgcagatcactgttggcctcgtcttcctctgcctgcagtacagactgagaggaaaacttcgagcagagatagagaatctccaccggacttttgatccccactttctgagggtgccctgctggaagataaccctgtttgtaattgtgccggttcttggacccttggttgccttgatcatctgctacaactggctacatcgaagactagcagggcaattccttgaagagctacgaaatcccttctgagtgatgtcacatcttggcaggggtggaggagagcctggttgcccagggatttgtccttggggacatctcatccatcaagttgcacactcactggcatctttgctatggggacattccaatttgcactttcaggaacactctgaattccaagtagaattgatttcccttcttctgtcatctaccttttctcttcattttcccatttttattacccttctttccatttctctctccagtcttccacctggaagccctctctggctaaggacaggcaggtgcccctctctccatcagaggacacctgtactggagagcaacacaggatggtctctgccatgaactggaggccaggaatctcctcactgaaaattacagtatggtaactttgcaaatggtggttgtttcttccaagactccagccctgattgcgcaaaactgaaaggcatgtgaagggaaggaagaggaagagtgcaaaacattgaagagagagctgagtgagctgaagagtgaggatatgagtagccccaacccaaacctggagatggggagaaacctacagaatactagccagagctcctccttgtcttggcagcctactagggacctggggaagcaaaaacgaaagctgggcaacatgcctgctttagaatgttttccttctacttacacatcttccacaggtctcagaatctttccttcctctcatccttttctcctatcttcatatctatcagagtatccactgtttattcaacaactactacttgatggtcagacacaaacaaacaagctaggtgctaattaataaagatacgagttttggccgggtgcggtggctcacgcctgtaatcccagcactttgggaggccgaggcgggcgaatcacgaggtcaggagttcaagaccagcctggccaacatggtgaaaccccatctctactaaaaatacaaacaattaactgagcatagtggtgggcacctataataccagctactccggaggctgaggcaggagaatcgcttgaacccaggaggcagaggttgcagtgagctgagatcgcgccactgcactctagccggagtgacagagtaagactctgtctcaaaaataaataaataaataaataaataaataaataaataaataaataaaaaataataatacaagttttcataagcacacttct

SEQ ID NO: 18903 - DNA, 1774 bp, Homo sapiens
  source 1..1774: mol_type = unassigned DNA
gtcatcccctcagtctgtagcccttttgtgtgagtgcctggcaagggtgacgtggggctgtttctgcgggcacagctgcagcaattaccggagtggaggcagggcccaggcagcactgccctccaagatcttcccttgggcttttcagcagtaaggggacatgcaccccaagggcctccacttggcctgaccttgctgcgggggctctctgtccccaggaacagtagagatggcaagcttatcgagaccctctctgcccagctgcctctgctccttcctcctcctcctcctcctccaagtgtcttccagctatgcagggcagttcagagtgataggaccaagacaccctatccgggctctggtcggggatgaagtggaattgccatgtcgcatatctcctgggaagaacgctacaggcatggaggtggggtggtaccgcccccccttctctagggtggttcatctctacagaaatggcaaggaccaagatggagaccaggcacctgaatatcggggccggacagagctgctgaaagatgctattggtgagggaaaggtgactctcaggatccggaatgtaaggttctcagatgaaggaggtttcacctgcttcttccgagatcattcttaccaagaggaggcagcaatggaattgaaagtagaagatcctttctactgggtgagccctggagtgctggttctcctcgcggtgctgcctgtgctcctcctgcagatcactgttggcctcgtcttcctctgcctgcagtacagactgagaggaaaacttcgagcagagatagagaatctccaccggacttttgtcttccacctggaagccctctctggctaaggacaggcaggtgcccctctctccatcagaggacacctgtactggagagcaacacaggatggtctctgccatgaactggaggccaggaatctcctcactgaaaattacagtatggtaactttgcaaatggtggttgtttcttccaagactccagccctgattgcgcaaaactgaaaggcatgtgaagggaaggaagaggaagagtgcaaaacattgaagagagagctgagtgagctgaagagtgaggatatgagtagccccaacccaaacctggagatggggagaaacctacagaatactagccagagctcctccttgtcttggcagcctactagggacctggggaagcaaaaacgaaagctgggcaacatgcctgctttagaatgttttccttctacttacacatcttccacaggtctcagaatctttccttcctctcatccttttctcctatcttcatatctatcagagtatccactgtttattcaacaactactacttgatggtcagacacaaacaaacaagctaggtgctaattaataaagatacgagttttggccgggtgcggtggctcacgcctgtaatcccagcactttgggaggccgaggcgggcgaatcacgaggtcaggagttcaagaccagcctggccaacatggtgaaaccccatctctactaaaaatacaaacaattaactgagcatagtggtgggcacctataataccagctactccggaggctgaggcaggagaatcgcttgaacccaggaggcagaggttgcagtgagctgagatcgcgccactgcactctagccggagtgacagagtaagactctgtctcaaaaataaataaataaataaataaataaataaataaataaataaataaataaaaaataataatacaagttttcataagcacacttct

SEQ ID NO: 18904 - DNA, 2045 bp, Homo sapiens
  source 1..2045: mol_type = unassigned DNA
gtcatcccctcagtctgtagcccttttgtgtgagtgcctggcaagggtgacgtggggctgtttctgcgggcacagctgcagcaattaccggagtggaggcagggcccaggcagcactgccctccaagatcttcccttgggcttttcagcagtaaggggacatgcaccccaagggcctccacttggcctgaccttgctgcgggggctctctgtccccaggaacagtagagatggcaagcttatcgagaccctctctgcccagctgcctctgctccttcctcctcctcctcctcctccaagtgtcttccagctatgcagggcagttcagagtgataggaccaagacaccctatccgggctctggtcggggatgaagtggaattgccatgtcgcatatctcctgggaagaacgctacaggcatggaggtggggtggtaccgcccccccttctctagggtggttcatctctacagaaatggcaaggaccaagatggagaccaggcacctgaatatcggggccggacagagctgctgaaagatgctattggtgagggaaaggtgactctcaggatccggaatgtaaggttctcagatgaaggaggtttcacctgcttcttccgagatcattcttaccaagaggaggcagcaatggaattgaaagtagaagatcctttctactgggtgagccctggagtgctggttctcctcgcggtgctgcctgtgctcctcctgcagatcactgttggcctcgtcttcctctgcctgcagtacagactgagaggaaaacttcgagcagagatagagaatctccaccggacttttgggcaattccttgaagagctacgaaatcccttctgagtgatgtcacatcttggcaggggtggaggagagcctggttgcccagggatttgtccttggggacatctcatccatcaagttgcacactcactggcatctttgctatggggacattccaatttgcactttcaggaacactctgaattccaagtagaattgatttcccttcttctgtcatctaccttttctcttcattttcccatttttattacccttctttccatttctctctccagtcttccacctggaagccctctctggctaaggacaggcaggtgcccctctctccatcagaggacacctgtactggagagcaacacaggatggtctctgccatgaactggaggccaggaatctcctcactgaaaattacagtatggtaactttgcaaatggtggttgtttcttccaagactccagccctgattgcgcaaaactgaaaggcatgtgaagggaaggaagaggaagagtgcaaaacattgaagagagagctgagtgagctgaagagtgaggatatgagtagccccaacccaaacctggagatggggagaaacctacagaatactagccagagctcctccttgtcttggcagcctactagggacctggggaagcaaaaacgaaagctgggcaacatgcctgctttagaatgttttccttctacttacacatcttccacaggtctcagaatctttccttcctctcatccttttctcctatcttcatatctatcagagtatccactgtttattcaacaactactacttgatggtcagacacaaacaaacaagctaggtgctaattaataaagatacgagttttggccgggtgcggtggctcacgcctgtaatcccagcactttgggaggccgaggcgggcgaatcacgaggtcaggagttcaagaccagcctggccaacatggtgaaaccccatctctactaaaaatacaaacaattaactgagcatagtggtgggcacctataataccagctactccggaggctgaggcaggagaatcgcttgaacccaggaggcagaggttgcagtgagctgagatcgcgccactgcactctagccggagtgacagagtaagactctgtctcaaaaataaataaataaataaataaataaataaataaataaataaataaataaaaaataataatacaagttttcataagcacacttct

SEQ ID NO: 18905 - DNA, 1774 bp, Homo sapiens
  source 1..1774: mol_type = unassigned DNA
gtcatcccctcagtctgtagcccttttgtgtgagtgcctggcaagggtgacgtggggctgtttctgcgggcacagctgcagcaattaccggagtggaggcagggcccaggcagcactgccctccaagatcttcccttgggcttttcagcagtaaggggacatgcaccccaagggcctccacttggcctgaccttgctgcgggggctctctgtccccaggaacagtagagatggcaagcttatcgagaccctctctgcccagctgcctctgctccttcctcctcctcctcctcctccaagtgtcttccagctatgcagggcagttcagagtgataggaccaagacaccctatccgggctctggtcggggatgaagtggaattgccatgtcgcatatctcctgggaagaacgctacaggcatggaggtggggtggtaccgcccccccttctctagggtggttcatctctacagaaatggcaaggaccaagatggagaccaggcacctgaatatcggggccggacagagctgctgaaagatgctattggtgagggaaaggtgactctcaggatccggaatgtaaggttctcagatgaaggaggtttcacctgcttcttccgagatcattcttaccaagaggaggcagcaatggaattgaaagtagaagatcctttctactgggtgagccctggagtgctggttctcctcgcggtgctgcctgtgctcctcctgcagatcactgttggcctcgtcttcctctgcctgcagtacagactgagaggaaaacttcgagcagagatagagaatctccaccggacttttgtcttccacctggaagccctctctggctaaggacaggcaggtgcccctctctccatcagaggacacctgtactggagagcaacacaggatggtctctgccatgaactggaggccaggaatctcctcactgaaaattacagtatggtaactttgcaaatggtggttgtttcttccaagactccagccctgattgcgcaaaactgaaaggcatgtgaagggaaggaagaggaagagtgcaaaacattgaagagagagctgagtgagctgaagagtgaggatatgagtagccccaacccaaacctggagatggggagaaacctacagaatactagccagagctcctccttgtcttggcagcctactagggacctggggaagcaaaaacgaaagctgggcaacatgcctgctttagaatgttttccttctacttacacatcttccacaggtctcagaatctttccttcctctcatccttttctcctatcttcatatctatcagagtatccactgtttattcaacaactactacttgatggtcagacacaaacaaacaagctaggtgctaattaataaagatatgagttttggccgggtgcggtggctcacgcctgtaatcccagcactttgggaggccgaggcgggcgaatcacgaggtcaggagttcgagaccagcctggccaacatggtgaaaccccatctctactaaaaatacaaacaattaactgagcatagtggtgggcacctataataccagctactccggaggctgaggcaggagaatcgcttgaacccaggaggcagaggttgcagtgagctgagatcgcgccactgcactctagccagagtgacagagtaagactctgtctcaaaaataaataaataaataaataaataaataaataaataaataaataaataaaaaataataatacaagttttcataagcacacttct

SEQ ID NO: 18906 - DNA, 1436 bp, Homo sapiens; identical to SEQ ID NO: 18898
  source 1..1436: mol_type = unassigned DNA

SEQ ID NO: 18907 - DNA, 1770 bp, Homo sapiens
  source 1..1770: mol_type = unassigned DNA
gtcatcccctcagtctgtagcccttttgtgtgagtgcctggcaagggtgacgtggggctgtttctgcgggcacagctgcagcaattaccggagtggaggcagggcccaggcagcactgccctccaagatcttcccttgggcttttcagcagtaaggggacatgcaccccaagggcctccacttggcctgaccttgctgcgggggctctctgtccccaggaacagtagagatggcaagcttatcgagaccctctctgcccagctgcctctgctccttcctcctcctcctcctcctccaagtgtcttccagctatgcagggcagttcagagtgataggaccaagacaccctatccgggctctggtcggggatgaagtggaattgccatgtcgcatatctcctgggaagaacgctacaggcatggaggtggggtggtaccgcccccccttctctagggtggttcatctctacagaaatggcaaggaccaagatggagaccaggcacctgaatatcggggccggacagagctgctgaaagatgctattggtgagggaaaggtgactctcaggatccggaatgtaaggttctcagatgaaggaggtttcacctgcttcttccgagatcattcttaccaagaggaggcagcaatggaattgaaagtagaagatcctttctactgggtgagccctggagtgctggttctcctcgcggtgctgcctgtgctcctcctgcagatcactgttggcctcgtcttcctctgcctgcagtacagactgagaggaaaacttcgagcagagatagagaatctccaccggacttttgtcttccacctggaagccctctctggctaaggacaggcaggtgcccctctctccatcagaggacacctgtactggagagcaacacaggatggtctctgccatgaactggaggccaggaatctcctcactgaaaattacagtatggtaactttgcaaatggtggttgtttcttccaagactccagccctgattgcgcaaaactgaaaggcatgtgaagggaaggaagaggaagagtgcaaaacattgaagagagagctgagtgagctgaagagtgaggatatgagtagccccaacccaaacctggagatggggagaaacctacagaatactagccagagctcctccttgtcttggcagcctactagggacctggggaagcaaaaacgaaagctgggcaacatgcctgctttagaatgttttccttctacttacacatcttccacaggtctcagaatctttccttcctctcatccttttctcctatcttcatatctatcagagtatccactgtttattcaacaactactacttgatggtcagacacaaacaaacaagctaggtgctaattaataaagatacgagttttggccgggtgcggtggctcacgcctgtaatcccagcactttgggaggccgaggcgggcgaatcacgaggtcaggagttcgagaccagcctggccaacatggtgaaaccccatctctactaaaaatacaaacaattaactgagcatagtggtgggcacctataataccagctactccggaggctgaggcaggagaatcgcttgaacccaggaggcagaggttgcagtgagctgagatcgcgccactgcactctagccagagtgacagagtaagactctgtctcaaaaataaataaataaataaataaataaataaataaataaataaataaaaaataataatacaagttttcataagcacacttct

SEQ ID NO: 18908 - DNA, 1774 bp, Homo sapiens; identical to SEQ ID NO: 18905
  source 1..1774: mol_type = unassigned DNA

SEQ ID NO: 18909 - DNA, 1436 bp, Homo sapiens; identical to SEQ ID NO: 18898
  source 1..1436: mol_type = unassigned DNA

SEQ ID NO: 18910 - DNA, 1770 bp, Homo sapiens
  source 1..1770: mol_type = unassigned DNA
gtcatcccctcagtctgtagcccttttgtgtgagtgcctggcaagggtgacgtggggctgtttctgcgggcacagctgcagcaattaccggagtggaggcagggcccaggcagcactgccctccaagatcttcccttgggcttttcagcagtaaggggacatgcaccccaagggcctccacttggcctgaccttgctgcgggggctctctgtccccaggaacagtagagatggcaagcttatcgagaccctctctgcccagctgcctctgctccttcctcctcctcctcctcctccaagtgtcttccagctatgcagggcagttcagagtgataggaccaagacaccctatccgggctctggtcggggatgaagtggaattgccatgtcgcatatctcctgggaagaacgctacaggcatggaggtggggtggtaccgcccccccttctctagggtggttcatctctacagaaatggcaaggaccaagatggagaccaggcacctgaatatcggggccggacagagctgctgaaagatgctattggtgagggaaaggtgactctcaggatccggaatgtaaggttctcagatgaaggaggtttcacctgcttcttccgagatcattcttaccaagaggaggcagcaatggaattgaaagtagaagatcctttctactgggtgagccctggagtgctggttctcctcgcggtgctgcctgtgctcctcctgcagatcactgttggcctcgtcttcctctgcctgcagtacagactgagaggaaaacttcgagcagagatagagaatctccaccggacttttgtcttccacctggaagccctctctggctaaggacaggcaggtgcccctctctccatcagaggacacctgtactggagagcaacacaggatggtctctgccatgaactggaggccaggaatctcctcactgaaaattacagtatggtaactttgcaaatggtggttgtttcttccaagactccagccctgattgcgcaaaactgaaaggcatgtgaagggaaggaagaggaagagtgcaaaacattgaagagagagctgagtgagctgaagagtgaggatatgagtagccccaacccaaacctggagatggggagaaacctacagaatactagccagagctcctccttgtcttggcagcctactagggacctggggaagcaaaaacgaaagctgggcaacatgcctgctttagaatgttttccttctacttacacatcttccacaggtctcagaatctttccttcctctcatccttttctcctatcttcatatctatcagagtatccactgtttattcaacaactactacttgatggtcagacacaaacaaacaagctaggtgctaattaataaagatacgagttttggccgggtgcggtggctcacgcctgtaatcccagcactttgggaggccgaggcgggcgaatcacgaggtcaggagttcaagaccagcctggccaacatggtgaaaccccatctctactaaaaatacaaacaattaactgagcatagtggtgggcacctataataccagctactccggaggctgaggcaggagaatcgcttgaacccaggaggcagaggttgcagtgagctgagatcgcgccactgcactctagccggagtgacagagtaagactctgtctcaaaaataaataaataaataaataaataaataaataaataaataaataaaaaataataatacaagttttcataagcacacttct

SEQ ID NO: 18911 - DNA, 322 bp, Homo sapiens; identical to SEQ ID NO: 18899
  source 1..322: mol_type = unassigned DNA

SEQ ID NO: 18912 - DNA, 1778 bp, Homo sapiens
  source 1..1778: mol_type = unassigned DNA
gtcatcccctcagtctgtagcccttttgtgtgagtgcctggcaagggtgacgtggggctgtttctgcgggcacagctgcagcaattaccggagtggaggcagggcccaggcagcactgccctccaagatcttcccttgggcttttcagcagtaaggggacatgcaccccaagggcctccacttggcctgaccttgctgcgggggctctctgtccccaggaacagtagagatggcaagcttatcgagaccctctctgcccagctgcctctgctccttcctcctcctcctcctcctccaagtgtcttccagctatgcagggcagttcagagtgataggaccaagacaccctatccgggctctggtcggggatgaagtggaattgccatgtcgcatatctcctgggaagaacgctacaggcatggaggtggggtggtaccgcccccccttctctagggtggttcatctctacagaaatggcaaggaccaagatggagaccaggcacctgaatatcggggccggacagagctgctgaaagatgctattggtgagggaaaggtgactctcaggatccggaatgtaaggttctcagatgaaggaggtttcacctgcttcttccgagatcattcttaccaagaggaggcagcaatggaattgaaagtagaagatcctttctactgggtgagccctggagtgctggttctcctcgcggtgctgcctgtgctcctcctgcagatcactgttggcctcgtcttcctctgcctgcagtacagactgagaggaaaacttcgagcagagatagagaatctccaccggacttttgtcttccacctggaagccctctctggctaaggacaggcaggtgcccctctctccatcagaggacacctgtactggagagcaacacaggatggtctctgccatgaactggaggccaggaatctcctcactgaaaattacagtatggtaactttgcaaatggtggttgtttcttccaagactccagccctgattgcgcaaaactgaaaggcatgtgaagggaaggaagaggaagagtgcaaaacattgaagagagagctgagtgagctgaagagtgaggatatgagtagccccaacccaaacctggagatggggagaaacctacagaatactagccagagctcctccttgtcttggcagcctactagggacctggggaagcaaaaacgaaagctgggcaacatgcctgctttagaatgttttccttctacttacacatcttccacaggtctcagaatctttccttcctctcatccttttctcctatcttcatatctatcagagtatccactgtttattcaacaactactacttgatggtcagacacaaacaaacaagctaggtgctaattaataaagatacgagttttggccgggtgcggtggctcacgcctgtaatcccagcactttgggaggccgaggcgggcgaatcacgaggtcaggagttcaagaccagcctggccaacatggtgaaaccccatctctactaaaaatacaaacaattaactgagcatagtggtgggcacctataataccagctactccggaggctgaggcaggagaatcgcttgaacccaggaggcagaggttgcagtgagctgagatcgcgccactgcactctagccggagtgacagagtaagactctgtctcaaaaataaataaataaataaataaataaataaataaataaataaataaataaataaaaaataataatacaagttttcataagcacacttct

SEQ ID NO: 18913 - DNA, 2300 bp, Homo sapiens
  source 1..2300: mol_type = unassigned DNA
gtcatcccctcagtctgtagcccttttgtgtgagtgcctggcaagggtgacgtggggctgtttctgcgggcacagctgcagcaattaccggagtggaggcagggcccaggcagcactgccctccaagatcttcccttgggcttttcagcagtaaggggacatgcaccccaagggcctccacttggcctgaccttgctgcgggggctctctgtccccaggaacagtagagatggcaagcttatcgagaccctctctgcccagctgcctctgctccttcctcctcctcctcctcctccaagtgtcttccagctatgcagggcagttcagagtgataggaccaagacaccctatccgggctctggtcggggatgaagtggaattgccatgtcgcatatctcctgggaagaacgctacaggcatggaggtggggtggtaccgcccccccttctctagggtggttcatctctacagaaatggcaaggaccaagatggagaccaggcacctgaatatcggggccggacagagctgctgaaagatgctattggtgagggaaaggtgactctcaggatccggaatgtaaggttctcagatgaaggaggtttcacctgcttcttccgagatcattcttaccaagaggaggcagcaatggaattgaaagtagaagtgtctcactctgtcacccaggattggttgcagtggcacgatcatggctcattgcagcctccacctcccaggctcaagtgatcctcctgactcagcctcttgaatagctgagaccacaggcttgtgtcaccatgcccagatcctttctactgggtgagccctggagtgctggttctcctcgcggtgctgcctgtgctcctcctgcagatcactgttggcctcgtcttcctctgcctgcagtacagactgagaggaaaacttcgagcagagatagagaatctccaccggacttttgatccccactttctgagggtgccctgctggaagataaccctgtttgtaattgtgccggttcttggacccttggttgccttgatcatctgctacaactggctacatcgaagactagcagggcaattccttgaagagctacgaaatcccttctgagtgatgtcacatcttggcaggggtggaggagagcctggttgcccagggatttgtccttggggacatctcatccatcaagttgcacactcactggcatctttgctatggggacattccaatttgcactttcaggaacactctgaattccaagtagaattgatttcccttcttctgtcatctaccttttctcttcattttcccatttttattacccttctttccatttctctctccagtcttccacctggaagccctctctggctaaggacaggcaggtgcccctctctccatcagaggacacctgtactggagagcaacacaggatggtctctgccatgaactggaggccaggaatctcctcactgaaaattacagtatggtaactttgcaaatggtggttgtttcttccaagactccagccctgattgcgcaaaactgaaaggcatgtgaagggaaggaagaggaagagtgcaaaacattgaagagagagctgagtgagctgaagagtgaggatatgagtagccccaacccaaacctggagatggggagaaacctacagaatactagccagagctcctccttgtcttggcagcctactagggacctggggaagcaaaaacgaaagctgggcaacatgcctgctttagaatgttttccttctacttacacatcttccacaggtctcagaatctttccttcctctcatccttttctcctatcttcatatctatcagagtatccactgtttattcaacaactactacttgatggtcagacacaaacaaacaagctaggtgctaattaataaagatatgagttttggccgggtgcggtggctcacgcctgtaatcccagcactttgggaggccgaggcgggcgaatcacgaggtcaggagttcgagaccagcctggccaacatggtgaaaccccatctctactaaaaatacaaacaattaactgagcatagtggtgggcacctataataccagctactccggaggctgaggcaggagaatcgcttgaacccaggaggcagaggttgcagtgagctgagatcgcgccactgcactctagccagagtgacagagtaagactctgtctcaaaaataaataaataaataaataaataaataaataaataaataaataaataaaaaataataatacaagttttcataagcacacttct

SEQ ID NO: 18914 - DNA, 769 bp, Homo sapiens
  source 1..769: mol_type = unassigned DNA
caattaccggagtggaggcagggcccaggcagcactgccctccaagatcttcccttgggcttttcagcagtaaggggacatgcaccccaagggcctccacttggcctgaccttgctgcgggggctctctgtccccaggaacagtagagatggcaagcttatcgagaccctctctgcccagctgcctctgctccttcctcctcctcctcctcctccaagtgtcttccagctatgcagggcagttcagagtgataggaccaagacaccctatccgggctctggtcggggatgaagtggaattgccatgtcgcatatctcctgggaagaacgctacaggcatggaggtggggtggtaccgcccccccttctctagggtggttcatctctacagaaatggcaaggaccaagatggagaccaggcacctgaatatcggggccggacagagctgctgaaagatgctattggtgagggaaaggtgactctcaggatccggaatgtaaggttctcagatgaaggaggtttcacctgcttcttccgagatcattcttaccaagaggaggcagcaatggaattgaaagtagaagatcctttctactgggtgagccctggagtgctggttctcctcgcggtgctgcctgtgctcctcctgcagatcactcttggcctcgtcttcctctgcctgcagtacagactgagaggaaaacttcgagcagagatagagaatctccaccggacttttgtcttccacctggaagccctctctggctaa

SEQ ID NO: 18915 - DNA, 2300 bp, Homo sapiens; identical to SEQ ID NO: 18913
  source 1..2300: mol_type = unassigned DNA

SEQ ID NO: 18916 - DNA, 664 bp, Homo sapiens
  source 1..664: mol_type = unassigned DNA
caattaccggagtggaggcagggcccaggcagcactgccctccaagatcttcccttgggcttttcagcagtaaggggacatgcaccccaagggcctccacttggcctgaccttgctgcgggggctctctgtccccaggaacagtagagatggcaagcttatcgagaccctctctgcccagctgcctctgctccttcctcctcctcctcctcctccaagtgtcttccagctatgcagggcagttcagagtgataggaccaagacaccctatccgggctctggtcggggatgaagtggaattgccatgtcgcatatctcctgggaagaacgctacaggcatggaggtggggtggtaccgcccccccttctctagggtggttcatctctacagaaatggcaaggaccaagatggagaccaggcacctgaatatcggggccggacagagctgctgaaagatgctattggtgagggaaaggtgactctcaggatccggaatgtaaggttctcagatgaaggaggtttcacctgcttcttccgagatcattcttaccaagaggaggcagcaatggaattgaaagtagaagtgtctcactctgtcacccaggattggttgcagtggcacgatcatggctcattgcagcctccacctcccaggctcaagtga

SEQ ID NO: 18917 - DNA, 2049 bp, Homo sapiens
  source 1..2049: mol_type = unassigned DNA
gtcatcccctcagtctgtagcccttttgtgtgagtgcctggcaagggtgacgtggggctgtttctgcgggcacagctgcagcaattaccggagtggaggcagggcccaggcagcactgccctccaagatcttcccttgggcttttcagcagtaaggggacatgcaccccaagggcctccacttggcctgaccttgctgcgggggctctctgtccccaggaacagtagagatggcaagcttatcgagaccctctctgcccagctgcctctgctccttcctcctcctcctcctcctccaagtgtcttccagctatgcagggcagttcagagtgataggaccaagacaccctatccgggctctggtcggggatgaagtggaattgccatgtcgcatatctcctgggaagaacgctacaggcatggaggtggggtggtaccgcccccccttctctagggtggttcatctctacagaaatggcaaggaccaagatggagaccaggcacctgaatatcggggccggacagagctgctgaaagatgctattggtgagggaaaggtgactctcaggatccggaatgtaaggttctcagatgaaggaggtttcacctgcttcttccgagatcattcttaccaagaggaggcagcaatggaattgaaagtagaagatcctttctactgggtgagccctggagtgctggttctcctcgcggtgctgcctgtgctcctcctgcagatcactgttggcctcgtcttcctctgcctgcagtacagactgagaggaaaacttcgagcagagatagagaatctccaccggacttttgggcaattccttgaagagctacgaaatcccttctgagtgatgtcacatcttggcaggggtggaggagagcctggttgcccagggatttgtccttggggacatctcatccatcaagttgcacactcactggcatctttgctatggggacattccaatttgcactttcaggaacactctgaattccaagtagaattgatttcccttcttctgtcatctaccttttctcttcattttcccatttttattacccttctttccatttctctctccagtcttccacctggaagccctctctggctaaggacaggcaggtgcccctctctccatcagaggacacctgtactggagagcaacacaggatggtctctgccatgaactggaggccaggaatctcctcactgaaaattacagtatggtaactttgcaaatggtggttgtttcttccaagactccagccctgattgcgcaaaactgaaaggcatgtgaagggaaggaagaggaagagtgcaaaacattgaagagagagctgagtgagctgaagagtgaggatatgagtagccccaacccaaacctggagatggggagaaacctacagaatactagccagagctcctccttgtcttggcagcctactagggacctggggaagcaaaaacgaaagctgggcaacatgcctgctttagaatgttttccttctacttacacatcttccacaggtctcagaatctttccttcctctcatccttttctcctatcttcatatctatcagagtatccactgtttattcaacaactactacttgatggtcagacacaaacaaacaagctaggtgctaattaataaagatacgagttttggccgggtgcggtggctcacgcctgtaatcccagcactttgggaggccgaggcgggcgaatcacgaggtcaggagttcaagaccagcctggccaacatggtgaaaccccatctctactaaaaatacaaacaattaactgagcatagtggtgggcacctataataccagctactccggaggctgaggcaggagaatcgcttgaacccaggaggcagaggttgcagtgagctgagatcgcgccactgcactctagccggagtgacagagtaagactctgtctcaaaaataaataaataaataaataaataaataaataaataaataaataaataaataaaaaataataatacaagttttcataagcacacttct

SEQ ID NO: 18918 - DNA, 322 bp, Homo sapiens; identical to SEQ ID NO: 18899
  source 1..322: mol_type = unassigned DNA

SEQ ID NO: 18919 - DNA, 2045 bp, Homo sapiens; identical to SEQ ID NO: 18900
  source 1..2045: mol_type = unassigned DNA

SEQ ID NO: 18920 - DNA, 322 bp, Homo sapiens; identical to SEQ ID NO: 18899
  source 1..322: mol_type = unassigned DNA

SEQ ID NO: 18921 - DNA, 1436 bp, Homo sapiens; identical to SEQ ID NO: 18898
  source 1..1436: mol_type = unassigned DNA

SEQ ID NO: 18922 - DNA, 2300 bp, Homo sapiens
  source 1..2300: mol_type = unassigned DNA
gtcatcccctcagtctgtagcccttttgtgtgagtgcctggcaagggtgacgtggggctgtttctgcgggcacagctgcagcaattaccggagtggaggcagggcccaggcagcactgccctccaagatcttcccttgggcttttcagcagtaaggggacatgcaccccaagggcctccacttggcctgaccttgctgcgggggctctctgtccccaggaacagtagagatggcaagcttatcgagaccctctctgcccagctgcctctgctccttcctcctcctcctcctcctccaagtgtcttccagctatgcagggcagttcagagtgataggaccaagacaccctatccgggctctggtcggggatgaagtggaattgccatgtcgcatatctcctgggaagaacgctacaggcatggaggtggggtggtaccgcccccccttctctagggtggttcatctctacagaaatggcaaggaccaagatggagaccaggcacctgaatatcggggccggacagagctgctgaaagatgctattggtgagggaaaggtgactctcaggatccggaatgtaaggttctcagatgaaggaggtttcacctgcttcttccgagatcattcttaccaagaggaggcagcaatggaattgaaagtagaagtgtctcactctgtcacccaggattggttgcagtggcacgatcatggctcattgcagcctccacctcccaggctcaagtgatcctcctgactcagcctcttgaatagctgagaccacaggcttgtgtcaccatgcccagatcctttctactgggtgagccctggagtgctggttctcctcgcggtgctgcctgtgctcctcctgcagatcactgttggcctcgtcttcctctgcctgcagtacagactgagaggaaaacttcgagcagagatagagaatctccaccggacttttgatccccactttctgagggtgccctgctggaagataaccctgtttgtaattgtgccggttcttggacccttggttgccttgatcatctgctacaactggctacatcgaagactagcagggcaattccttgaagagctacgaaatcccttctgagtgatgtcacatcttggcaggggtggaggagagcctggttgcccagggatttgtccttggggacatctcatccatcaagttgcacactcactggcatctttgctatggggacattccaatttgcactttcaggaacactctgaattccaagtagaattgatttcccttcttctgtcatctaccttttctcttcattttcccatttttattacccttctttccatttctctctccagtcttccacctggaagccctctctggctaaggacaggcaggtgcccctctctccatcagaggacacctgtactggagagcaacacaggatggtctctgccatgaactggaggccaggaatctcctcactgaaaattacagtatggtaactttgcaaatggtggttgtttcttccaagactccagccctgattgcgcaaaactgaaaggcatgtgaagggaaggaagaggaagagtgcaaaacattgaagagagagctgagtgagctgaagagtgaggatatgagtagccccaacccaaacctggagatggggagaaacctacagaatactagccagagctcctccttgtcttggcagcctactagggacctggggaagcaaaaacgaaagctgggcaacatgcctgctttagaatgttttccttctacttacacatcttccacaggtctcagaatctttccttcctctcatccttttctcctatcttcatatctatcagagtatccactgtttattcaacaactactacttgatggtcagacacaaacaaacaagctaggtgctaattaataaagatacgagttttggccgggtgcggtggctcacgcctgtaatcccagcactttgggaggccgaggcgggcgaatcacgaggtcaggagttcaagaccagcctggccaacatggtgaaaccccatctctactaaaaatacaaacaattaactgagcatagtggtgggcacctataataccagctactccggaggctgaggcaggagaatcgcttgaacccaggaggcagaggttgcagtgagctgagatcgcgccactgcactctagccggagtgacagagtaagactctgtctcaaaaataaataaataaataaataaataaataaataaataaataaataaataaaaaataataatacaagttttcataagcacacttct

SEQ ID NO: 18923 - DNA, 1436 bp, Homo sapiens
  source 1..1436: mol_type = unassigned DNA
aagatcttcccttgggcttttcagcagtaaggggacatgcaccccaagggcctccacttggcctgaccttgctgcgggggctctctgtccccaggaacagtagagatggcaagcttatcgagaccctctctgcccagctgcctctgctccttcctcctcctcctcctcctccaagtgtcttccagctatgcagggcagttcagagtgataggaccaagacaccctatccgggctctggtcggggatgaagtggaattgccatgtcgcatatctcctgggaagaacgctacagaaatggcaaggaccaagatggagaccaggcacctgaatatcggggccggacagagctgctgaaagatgctattggtgagggaaaggtgactctcaggatccggaatgtaaggttctcagatgaaggaggtttcacctgcttcttccgagatcattcttaccaagaggaggcagcaatggaattgaaagtagaagatcctttctactgggtgagccctggagtgctggttctcctcgcggtgctgcctgtgctcctcctgcagatcactcttggcctcgtcttcctctgcctgcagtacagactgagaggaaaacttcgagcagagatagagaatctccaccggacttttgatccccactttctgagggtgccctgctggaagataaccctgtttgtaattgtgccggttcttggacccttggttgccttgatcatctgctacaactggctacatcgaagactagcagggcaattccttgaagagctacgaaatcccttctgagtgatgtcacatcttggcaggggtggaggagagcctggttgcccagggatttgtccttggggacatctcatccatcaagttgcacactcactggcatctttgctatggggacattccaatttgcactttcaggaacactctgaattccaagtagaattgatttcccttcttctgtcatctaccttttctcttcattttcccatttttattacccttctttccatttctctctccagtcttccacctggaagccctctctggctaaggacaggcaggtgcccctctctccatcagaggacacctgtactggagagcaacacaggatggtctctgccatgaactggaggccaggaatctcctcactgaaaattacagtatggtaactttgcaaatggtggttgtttcttccaagactccagccctgattgcgcaaaactgaaaggcatgtgaagggaaggaagaggaagagtgcaaaacattgaagagagagctgagtgagctgaagagtgaggatatgagtagccccaacccaaacctggagatggggagaaacctacagaatactagccagagctcctccttgtcttggcagcctactagggacctggggaagcaaaaacgaaagctgggcaacatgcctgc

SEQ ID NO: 18924 - DNA, 2041 bp, Homo sapiens
  source 1..2041: mol_type = unassigned DNA
gtcatcccctcagtctgtagcccttttgtgtgagtgcctggcaagggtgacgtggggctgtttctgcgggcacagctgcagcaattaccggagtggaggcagggcccaggcagcactgccctccaagatcttcccttgggcttttcagcagtaaggggacatgcaccccaagggcctccacttggcctgaccttgctgcgggggctctctgtccccaggaacagtagagatggcaagcttatcgagaccctctctgcccagctgcctctgctccttcctcctcctcctcctcctccaagtgtcttccagctatgcagggcagttcagagtgataggaccaagacaccctatccgggctctggtcggggatgaagtggaattgccatgtcgcatatctcctgggaagaacgctacaggcatggaggtggggtggtaccgcccccccttctctagggtggttcatctctacagaaatggcaaggaccaagatggagaccaggcacctgaatatcggggccggacagagctgctgaaagatgctattggtgagggaaaggtgactctcaggatccggaatgtaaggttctcagatgaaggaggtttcacctgcttcttccgagatcattcttaccaagaggaggcagcaatggaattgaaagtagaagatcctttctactgggtgagccctggagtgctggttctcctcgcggtgctgcctgtgctcctcctgcagatcactgttggcctcgtcttcctctgcctgcagtacagactgagaggaaaacttcgagcagagatagagaatctccaccggacttttgggcaattccttgaagagctacgaaatcccttctgagtgatgtcacatcttggcaggggtggaggagagcctggttgcccagggatttgtccttggggacatctcatccatcaagttgcacactcactggcatctttgctatggggacattccaatttgcactttcaggaacactctgaattccaagtagaattgatttcccttcttctgtcatctaccttttctcttcattttcccatttttattacccttctttccatttctctctccagtcttccacctggaagccctctctggctaaggacaggcaggtgcccctctctccatcagaggacacctgtactggagagcaacacaggatggtctctgccatgaactggaggccaggaatctcctcactgaaaattacagtatggtaactttgcaaatggtggttgtttcttccaagactccagccctgattgcgcaaaactgaaaggcatgtgaagggaaggaagaggaagagtgcaaaacattgaagagagagctgagtgagctgaagagtgaggatatgagtagccccaacccaaacctggagatggggagaaacctacagaatactagccagagctcctccttgtcttggcagcctactagggacctggggaagcaaaaacgaaagctgggcaacatgcctgctttagaatgttttccttctacttacacatcttccacaggtctcagaatctttccttcctctcatccttttctcctatcttcatatctatcagagtatccactgtttattcaacaactactacttgatggtcagacacaaacaaacaagctaggtgctaattaataaagatacgagttttggccgggtgcggtggctcacgcctgtaatcccagcactttgggaggccgaggcgggcgaatcacgaggtcaggagttcgagaccagcctggccaacatggtgaaaccccatctctactaaaaatacaaacaattaactgagcatagtggtgggcacctataataccagctactccggaggctgaggcaggagaatcgcttgaacccaggaggcagaggttgcagtgagctgagatcgcgccactgcactctagccagagtgacagagtaagactctgtctcaaaaataaataaataaataaataaataaataaataaataaataaataaaaaataataatacaagttttcataagcacacttct

SEQ ID NO: 18925 - DNA, 322 bp, Homo sapiens; identical to SEQ ID NO: 18899
  source 1..322: mol_type = unassigned DNA

SEQ ID NO: 18926 - DNA, 322 bp, Homo sapiens; identical to SEQ ID NO: 18899
  source 1..322: mol_type = unassigned DNA

SEQ ID NO: 18927 - DNA, 1436 bp, Homo sapiens; identical to SEQ ID NO: 18898
  source 1..1436: mol_type = unassigned DNA

SEQ ID NO: 18928 - DNA, 2304 bp, Homo sapiens
  source 1..2304: mol_type = unassigned DNA
gtcatcccctcagtctgtagcccttttgtgtgagtgcctggcaagggtgacgtggggctgtttctgcgggcacagctgcagcaattaccggagtggaggcagggcccaggcagcactgccctccaagatcttcccttgggcttttcagcagtaaggggacatgcaccccaagggcctccacttggcctgaccttgctgcgggggctctctgtccccaggaacagtagagatggcaagcttatcgagaccctctctgcccagctgcctctgctccttcctcctcctcctcctcctccaagtgtcttccagctatgcagggcagttcagagtgataggaccaagacaccctatccgggctctggtcggggatgaagtggaattgccatgtcgcatatctcctgggaagaacgctacaggcatggaggtggggtggtaccgcccccccttctctagggtggttcatctctacagaaatggcaaggaccaagatggagaccaggcacctgaatatcggggccggacagagctgctgaaagatgctattggtgagggaaaggtgactctcaggatccggaatgtaaggttctcagatgaaggaggtttcacctgcttcttccgagatcattcttaccaagaggaggcagcaatggaattgaaagtagaagtgtctcactctgtcacccaggattggttgcagtggcacgatcatggctcattgcagcctccacctcccaggctcaagtgatcctcctgactcagcctcttgaatagctgagaccacaggcttgtgtcaccatgcccagatcctttctactgggtgagccctggagtgctggttctcctcgcggtgctgcctgtgctcctcctgcagatcactgttggcctcgtcttcctctgcctgcagtacagactgagaggaaaacttcgagcagagatagagaatctccaccggacttttgatccccactttctgagggtgccctgctggaagataaccctgtttgtaattgtgccggttcttggacccttggttgccttgatcatctgctacaactggctacatcgaagactagcagggcaattccttgaagagctacgaaatcccttctgagtgatgtcacatcttggcaggggtggaggagagcctggttgcccagggatttgtccttggggacatctcatccatcaagttgcacactcactggcatctttgctatggggacattccaatttgcactttcaggaacactctgaattccaagtagaattgatttcccttcttctgtcatctaccttttctcttcattttcccatttttattacccttctttccatttctctctccagtcttccacctggaagccctctctggctaaggacaggcaggtgcccctctctccatcagaggacacctgtactggagagcaacacaggatggtctctgccatgaactggaggccaggaatctcctcactgaaaattacagtatggtaactttgcaaatggtggttgtttcttccaagactccagccctgattgcgcaaaactgaaaggcatgtgaagggaaggaagaggaagagtgcaaaacattgaagagagagctgagtgagctgaagagtgaggatatgagtagccccaacccaaacctggagatggggagaaacctacagaatactagccagagctcctccttgtcttggcagcctactagggacctggggaagcaaaaacgaaagctgggcaacatgcctgctttagaatgttttccttctacttacacatcttccacaggtctcagaatctttccttcctctcatccttttctcctatcttcatatctatcagagtatccactgtttattcaacaactactacttgatggtcagacacaaacaaacaagctaggtgctaattaataaagatacgagttttggccgggtgcggtggctcacgcctgtaatcccagcactttgggaggccgaggcgggcgaatcacgaggtcaggagttcaagaccagcctggccaacatggtgaaaccccatctctactaaaaatacaaacaattaactgagcatagtggtgggcacctataataccagctactccggaggctgaggcaggagaatcgcttgaacccaggaggcagaggttgcagtgagctgagatcgcgccactgcactctagccggagtgacagagtaagactctgtctcaaaaataaataaataaataaataaataaataaataaataaataaataaataaataaaaaataataatacaagttttcataagcacacttct

SEQ ID NO: 18929 - DNA, 1436 bp, Homo sapiens; identical to SEQ ID NO: 18898
  source 1..1436: mol_type = unassigned DNA

SEQ ID NO: 18930 - DNA, 322 bp, Homo sapiens; identical to SEQ ID NO: 18899
  source 1..322: mol_type = unassigned DNA

SEQ ID NO: 18931 - DNA, 2041 bp, Homo sapiens
  source 1..2041: mol_type = unassigned DNA
gtcatcccctcagtctgtagcccttttgtgtgagtgcctggcaagggtgacgtggggctgtttctgcgggcacagctgcagcaattaccggagtggaggcagggcccaggcagcactgccctccaagatcttcccttgggcttttcagcagtaaggggacatgcaccccaagggcctccacttggcctgaccttgctgcgggggctctctgtccccaggaacagtagagatggcaagcttatcgagaccctctctgcccagctgcctctgctccttcctcctcctcctcctcctccaagtgtcttccagctatgcagggcagttcagagtgataggaccaagacaccctatccgggctctggtcggggatgaagtggaattgccatgtcgcatatctcctgggaagaacgctacaggcatggaggtggggtggtaccgcccccccttctctagggtggttcatctctacagaaatggcaaggaccaagatggagaccaggcacctgaatatcggggccggacagagctgctgaaagatgctattggtgagggaaaggtgactctcaggatccggaatgtaaggttctcagatgaaggaggtttcacctgcttcttccgagatcattcttaccaagaggaggcagcaatggaattgaaagtagaagatcctttctactgggtgagccctggagtgctggttctcctcgcggtgctgcctgtgctcctcctgcagatcactgttggcctcgtcttcctctgcctgcagtacagactgagaggaaaacttcgagcagagatagagaatctccaccggacttttgggcaattccttgaagagctacgaaatcccttctgagtgatgtcacatcttggcaggggtggaggagagcctggttgcccagggatttgtccttggggacatctcatccatcaagttgcacactcactggcatctttgctatggggacattccaatttgcactttcaggaacactctgaattccaagtagaattgatttcccttcttctgtcatctaccttttctcttcattttcccatttttattacccttctttccatttctctctccagtcttccacctggaagccctctctggctaaggacaggcaggtgcccctctctccatcagaggacacctgtactggagagcaacacaggatggtctctgccatgaactggaggccaggaatctcctcactgaaaattacagtatggtaactttgcaaatggtggttgtttcttccaagactccagccctgattgcgcaaaactgaaaggcatgtgaagggaaggaagaggaagagtgcaaaacattgaagagagagctgagtgagctgaagagtgaggatatgagtagccccaacccaaacctggagatggggagaaacctacagaatactagccagagctcctccttgtcttggcagcctactagggacctggggaagcaaaaacgaaagctgggcaacatgcctgctttagaatgttttccttctacttacacatcttccacaggtctcagaatctttccttcctctcatccttttctcctatcttcatatctatcagagtatccactgtttattcaacaactactacttgatggtcagacacaaacaaacaagctaggtgctaattaataaagatacgagttttggccgggtgcggtggctcacgcctgtaatcccagcactttgggaggccgaggcgggcgaatcacgaggtcaggagttcaagaccagcctggccaacatggtgaaaccccatctctactaaaaatacaaacaattaactgagcatagtggtgggcacctataataccagctactccggaggctgaggcaggagaatcgcttgaacccaggaggcagaggttgcagtgagctgagatcgcgccactgcactctagccggagtgacagagtaagactctgtctcaaaaataaataaataaataaataaataaataaataaataaataaataaaaaataataatacaagttttcataagcacacttct

SEQ ID NO: 18932 - DNA, 327 bp, Homo sapiens
  source 1..327: mol_type = unassigned DNA
atggcaagcttatcaagaccctctctgcccagctgcctctgctccttcctcctcctcctcctcctccaagtgtcttccagctatgcagatcctttctactgggtgagccctggagtgctggttctcctcgcggtgctgcctgtgctcctcctgcagatcactgttggcctcatcttcctctgcctgcagtacagactgagaggaaaacttcgagcagagatagagaatctccaccggacttttgagtcctttggtgttctaggaccccaggttaaggaaccaaaaaagacagggcaattccttgaagagctacgaaatcccttctga

SEQ ID NO: 18933 - DNA, 820 bp, Homo sapiens
  source 1..820: mol_type = unassigned DNA
gttcagttcctggtcccccactttctcaaccccacagatgctccgggcccctgcccctgccccagctatggctcctggggctccctcatccagccccagccctatcctggctgtgctgctcttctcttctttggtgctgtccccggcccaggccatcgtggtttacaccgacagggaggtccatggtgctgtgggctcccgggtgaccctgcactgctccttctggtccagtgagtgggtctcagatgacatctccttcacctggcgctaccagcccgaagggggcagagatgccatttcgatcttccactatgccaagggacaaccctacattgacgaggtggggaccttcaaagagcgcatccagtgggtaggggaccctcgctggaaggatggctccattgtcatacacaacctagactacagtgacaatggcacgttcacttgtgacgtcaaaaaccctccagacatagtgggcaagacctctcaggtcacgctgtatgtctttgaaaaagtgccaactaggtacggggtcgttctgggagctgtgatcgggggtgtcctcggggtggtgctgttgctgctgctgcttttctacgtggttcggtactgctggctacgcaggcaggcggccctgcagaggaggctcagtgctatggagaaggggaaattgcacaagccaggaaaggacgcgtcgaagcgcgggcggcagacgccagtgctgtatcaatgctggaccacagcagaagcaccaaagctgtcagtgagaagaaggccaaggggctgggggagtctcgcaaggataagaaatagcggttag

SEQ ID NO: 18934 - DNA, 1951 bp, Homo sapiens
  source 1..1951: mol_type = unassigned DNA
gttcagttcctggtcccccactttctcaaccccacagatgctccgggcccctgcccctgccccagctatggctcctggggctccctcatccagccccagccctatcctggctgtgctgctcttctcttctttggtgctgtccccggcccaggccatcgtggtttacaccgacagggaggtccatggtgctgtgggctcccgggtgaccctgcactgctccttctggtccagtgagtgggtctcagatgacatctccttcacctggcgctaccagcccgaagggggcagagatgccatttcgatcttccactatgccaagggacaaccctacattgacgaggtggggaccttcaaagagcgcatccagtgggtaggggaccctcgctggaaggatggctccattgtcatacacaacctagactacagtgacaatggcacgttcacttgtgacgtcaaaaaccctccagacatagtgggcaagacctctcaggtcacgctgtatgtctttgaaaaagtgccaactaggtacggggtcgttctgggagctgtgatcgggggtgtcctcggggtggtgctgttgctgctgctgcttttctacgtggttcggtactgctggctacgcaggcaggcggccctgcagaggaggctcagtgctatggagaaggggaaattgcacaagccaggaaaggacgcgtcgaagcgcgggcggcagacgccagtgctgtatgcaatgctggaccacagcagaagcaccaaagctgtcagtgagaagaaggccaaggggctgggggagtctcgcaaggataagaaatagcggttagcgggccgggcgggggatcgggggttaggggtggagtccgccaaaggcccaaaggtgatggtcatcgagatggagctacgaaaggatgagcagagcccggagctccggcctgctgtcaagtcccccagcagaaccagcctcaaaaacgccctcaagaacatgatgggcctgaactcggacaagtgatcgccacccccccaccccaggccctgccagagcagggggacctaggctcctcttacccccgtctaggtgctttccctctttgctcccccgccctgccctgccctcacctccctttgagatgtaagtttcattccagaattcattccccaggcaattgtattctcccccaccttcacccctggctttctgggagcccaggagctaatcctacccctcacctgccccgggggctgtgtgtttggtgcctgtccacctgagcactgagaagaaagggactttgataccctctgcctcaagtccaggccacctggcattcccatctcctgcatcccccagcctgtccccctggctgtttcctctcccgtccctccctcccctctaccaggtggcccagctccatactctgtccccccagctaatacccagagcacccagatcagactctccttcagggtttatttaggttattattttttattttttaatccattctttgtttgtttacctgtgctcatcctctgcccttacacccatgactgaggaccaatgacgtcatgtggcttttgcaattcacgccccccttaagtccttaatgaagagccagcccaagtagaggggcccctgatcctcacacttcagtatagcattggttccccctgaccactttggagcactgttctgggactccaggtcttgaggagagagacagagagagagaatggatcctcataggtcagggagtgggggagggggcaaatgagccttaagaaatggtttttaaacaaccaaacaaaaagcaggaaaaacaaatgggaaatgggggggcgggggggaggaagaggctgcactgcagccacaggggattcttaggatttttctacattctgtatatttcttctcaaacctccaaatgtccttaaatgtttaataaacactgacatttcc

SEQ ID NO: 18935 - DNA, 1693 bp, Homo sapiens
  source 1..1693: mol_type = unassigned DNA
cactttctcaaccccacagatgctccgggcccctgcccctgccccagctatggctcctggggctccctcatccagccccagccctatcctggctgtgctgctcttctcttctttggtgctgtccccggcccaggccatcgtggtttacaccgacagggaggtccatggtgctgtgggctcccgggtgaccctgcactgctccttctggtccagtgagtgggtctcagatgacatctccttcacctggcgctaccagcccgaagggggcagagatgccatttcgatcttccactatgccaagggacaaccctacattgacgaggtggggaccttcaaagagcgcatccagtgggtaggggaccctcgctggaaggatggctccattgtcatacacaacctagactacagtgacaatggcacgttcacttgtgacgtcaaaaaccctccagacatagtgggcaagacctctcaggtcacgctgtatgtctttgaaaaagtgccaactaggtacggggtcgttctgggagctgtgatcgggggtgtcctcggggtggtgctgttgctgctgctgcttttctacgtggttcggtactgctggctacgcaggcaggcggccctgcagaggaggctcagtgctatggagaaggggaaattgcacaagccaggaaaggacgcgtcgaagcgcgggcggcagacgccagtgctgtatgcaatgctggaccacagcagaagcaccaaagctgtcagtgagaagaaggccaaggggctgggggagtctcgcaaggataagaaatagcggttagcgggccgggcgggggatcgggggttaggggtggagtccgccaaaggcccaaaggtgatggtcatcgagatggagctacgaaaggatgagcagagcccggagctccggcctgctgtcaagtcccccagcagaaccagcctcaaaaacgccctcaagaacatgatgggcctgaactcggacaagtgatcgccacccccccaccccaggccctgccagagcagggggacctaggctcctcttacccccgtctaggtgctttccctctttgctcccccgccctgccctgccctcacctccctttgagatgtaagtttcattccagaattcattccccagctccatactctgtccccccagctaatacccagagcacccagatcagactctccttcagggtttatttaggttattattttttattttttaatccattctttgtttgtttacctgtgctcatcctctgcccttacacccatgactgaggaccaatgacgtcatgtggcttttgcaattcacgccccccttaagtccttaatgaagagccagcccaagtagaggggcccctgatcctcacacttcagtatagcattggttccccctgaccactttggagcactgttctgggactccaggtcttgaggagagagacagagagagagaatggatcctcataggtcagggagtgggggagggggcaaatgagccttaagaaatggtttttaaacaaccaaacaaaaagcaggaaaaacaaatgggaaatgggggggcgggggggaggaagaggctgcactgcagccacaggggattcttaggatttttctacattctgtatatttcttctcaaacctccaaatgtccttaaatgtttaataaacactgacatttccagaa

SEQ ID NO: 18936 - DNA, 1955 bp, Homo sapiens
  source 1..1955: mol_type = unassigned DNA
gttcagttcctggtcccccactttctcaaccccacagatgctccgggcccctgcccctgccccagctatggctcctggggctccctcatccagccccagccctatcctggctgtgctgctcttctcttctttggtgctgtccccggcccaggccatcgtggtttacaccgacagggaggtccatggtgctgtgggctcccgggtgaccctgcactgctccttctggtccagtgagtgggtctcagatgacatctccttcacctggcgctaccagcccgaagggggcagagatgccatttcgatcttccactatgccaagggacaaccctacattgacgaggtggggaccttcaaagagcgcatccagtgggtaggggaccctcgctggaaggatggctccattgtcatacacaacctagactacagtgacaatggcacgttcacttgtgacgtcaaaaaccctccagacatagtgggcaagacctctcaggtcacgctgtatgtctttgaaaaagtgccaactaggtacggggtcgttctgggagctgtgatcgggggtgtcctcggggtggtgctgttgctgctgctgcttttctacgtggttcggtactgctggctacgcaggcaggcggccctgcagaggaggctcagtgctatggagaaggggaaattgcacaagccaggaaaggacgcgtcgaagcgcgggcggcagacgccagtgctgtatgcaatgctggaccacagcagaagcaccaaagctgtcagtgagaagaaggccaaggggctgggggagtctcgcaaggataagaaatagcggttagcgggccgggcgggggatcgggggttaggggtggagtccgccaaaggcccaaaggtgatggtcatcgagatggagctacgaaaggatgagcagagcccggagctccggcctgctgtcaagtcccccagcagaaccagcctcaaaaacgccctcaagaacatgatgggcctgaactcggacaagtgatcgccacccccccaccccaggccctgccagagcagggggacctaggctcctcttacccccgtctaggtgctttccctctttgctcccccgccctgccctgccctcacctccctttgagatgtaagtttcattccagaattcattccccaggcaattgtattctcccccaccttcacccctggctttctgggagcccaggagctaatcctacccctcacctgccccgggggctgtgtgtttggtgcctgtccacctgagcactgagaagaaagggactttgataccctctgcctcaagtccaggccacctggcattcccatctcctgcatcccccagcctgtccccctggctgtttcctctcccgtccctccctcccctctaccaggtggcccagctccatactctgtccccccagctaatacccagagcacccagatcagactctccttcagggtttatttaggttattattttttattttttaatccattctttgtttgtttacctgtgctcatcctctgcccttacacccatgactgaggaccaatgacgtcatgtggcttttgcaattcacgccccccttaagtccttaatgaagagccagcccaagtagaggggcccctgatcctcacacttcagtatagcattggttccccctgaccactttggagcactgttctgggactccaggtcttgaggagagagacagagagagagaatggatcctcataggtcagggagtgggggagggggcaaatgagccttaagaaatggtttttaaacaaccaaacaaaaagcaggaaaaacaaatgggaaatgggggggcgggggggaggaagaggctgcactgcagccacaggggattcttaggatttttctacattctgtatatttcttctcaaacctccaaatgtccttaaatgtttaataaacactgacatttccagaa

SEQ ID NO: 18937 - DNA, 2620 bp, Homo sapiens
  source 1..2620: mol_type = unassigned DNA
gaggaactcaactcaaactcctctctctgggaaaacgcggtgcttgctcctcccggagtggccttggcagggtgttggagccctcggtctgccccgtccggtctctggggccaaggctgggtttccctcatgtatggcaagagctctactcgtgcggtgcttcttctccttggcatacagctcacagctctttggcctatagcagctgtggaaatttatacctcccgggtgctggaggctgttaatgggacagatgctcggttaaaatgcactttctccagctttgcccctgtgggtgatgctctaacagtgacctggaattttcgtcctctagacgggggacctgagcagtttgtattctactaccacatagatcccttccaacccatgagtgggcggtttaaggaccgggtgtcttgggatgggaatcctgagcggtacgatgcctccatccttctctggaaactgcagttcgacgacaatgggacatacacctgccaggtgaagaacccacctgatgttgatggggtgataggggagatccggctcagcgtcgtgcacactgtacgcttctctgagatccacttcctggctctggccattggctctgcctgtgcactgatgatcataatagtaattgtagtggtcctcttccagcattaccggaaaaagcgatgggccgaaagagctcataaagtggtggagataaaatcaaaagaagaggaaaggctcaaccaagagaaaaaggtctctgtttatttagaagacacagactaacaattttagatggaagctgagatgatttccaagaacaagaaccctagtatttcttgaagttaatggaaacttttctttggcttttccagttgtgacccgttttccaaccagttctgcagcatattagattctagacaagcaacacccctctggagccagcacagtgctcctccatatcaccagtcatacacagcctcattattaaggtcttatttaatttcagagtgtaaattttttcaagtgctcattaggttttataaacaagaagctacatttttgcccttaagacactacttacagtgttatgacttgtatacacatatattggtatcaaaagggataaaagccaatttgtctgttacatttcctttcacgtatttcttttagcagcacttctgctactaaagttaatgtgtttactctctttccttcccacattctcaattaaaaggtgagctaagcctcctcggtgtttctgattaacagtaaatcctaaattcaaactgttaaatgacatttttatttttatgtctctccttaactatgagacacatcttgttttactgaatttctttcaatattccaggtgatagatttttgttgttttgttaattaatccaagatttacaatagcacaacgctaaatcacacagtaactacaaaaggttacatagatatgaaaagattggcagaggccattgcaggatgaatcacttgtcacttttcttctgtgctgggaaaaataatcaacaatgtgggtctttcatgagcagtgacggatagtttagcttactatgtttcccccccaattcaatgatctataacaacagagcaaagtctatgctcatttgcagactggaatcattaagtaatttaataaaaaaattgtgaaacagcatattacaagtttgaaaattcagggctggtgaaaaaaatcaactctaaatgatgataattttgtacagttttatataaaactctgagaactagaagaaattattaactttttttcttttttaattctaattcacttgtttattttgggggaggaagactttggtatggagcaaagaaataccaaaactactttaaatggaataaaaccaactttattctttttttcccccatactggtagataaagcaaactttataagtgggctattgaaagaaaagttacaagcttaagatacagaagcatttgttcaaaggatagaaagcatctaaaagtttaggctcaagatcaatctttacagattgatattttcagtttttaatcgactggactgcagatgttttttcttttaacaaactggaattttcaaacagattatctgtatttaaatgtatagaccttgatatttttccaatactattttttaaaaaattgtatgatttacatatgaacctcagttctgaaattcattacatatctgtctcattctgccttttatactgtctaaaaaagcaaagttttaaagtgcaattttaaaactgtaaattacatctgaaggctatatatcctttaatcacattttatattttttcttcacaattctaacctttgaaaatattataactggatatttcttcaaacagatgtcctggatgatggtccataagaataatgaagaagtagttaaaaatgtatggacagtttttccggcaaaatttgtagcttatgtcttggctaaatagtcaaggggtaatatgggcctgttgtttagtgtctccttcctaaagagcacttttgtattgtaatttattttttattatgctttaaacactatgtaaataaacctttagtaataaagaattatcagttatataatttgtgtatatac

SEQ ID NO: 18938 - DNA, 1370 bp, Homo sapiens
  source 1..1370: mol_type = unassigned DNA
aacagtctgggacatttcagactggcaccacctcctctggctgtttccgaggccatctagaggccagagcccagtcagattaactgaaagtaaagagaggactgcgggagtttgggacctttgtgcagacgtgctcatgctcgttcgtgtagagggcgggagagaggaaaggaaggagggcattgggagctgaggccccacctttcatttcagaaaagtgcacaggcagagcgggctgagtcacaggcacaggtgaggaactcaactcaaactcctctctctgggaaaacgcggtgcttgctcctcccggagtggccttggcagggtgttggagccctcggtctgccccgtccggtctctggggccaaggctgggtttccctcatgtatggcaagagctctactcgtgcggtgcttcttctccttggcatacagctcacagctctttggcctatagcagctgtggaaatttatacctcccgggtgctggaggctgttaatgggacagatgctcggttaaaatgcactttctccagctttgcccctgtgggtgatgctctaacagtgacctggaattttcgtcctctagacgggggacctgagcagtttgtattctactaccacatagatcccttccaacccatgagtgggcggtttaaggaccgggtgtcttgggatgggaatcctgagcggtacgatgcctccatccttctctggaaactgcagttcgacgacaatgggacatacacctgccaggtgaagaacccacctgatgttgatggggtgataggggagatccggctcagcgtcgtgcacactgtacgcttctctgagatccacttcctggctctggccattggctctgcctgtgcactgatgatcataatagtaattgtagtggtcctcttccagcattaccggaaaaagcgatgggccgaaagagctcataaagtggtggagataaaatcaaaagaagaggaaaggctcaaccaagagaaaaaggtctctgtttatttagaagacacagactaacaattttagatggtaaggttcacaaataggttgatttctttcttcagctttctgacatgtccagcccatctctaatgaggactcccagatcatcactttatggctgttaggtgtttcccatatgaaattagaggagctgggtcagggagacaaaagtcttctattagtcttatggatagctcctccttgagtgtattttgtgcaaaagattaagaagctggactctactgccattaaagctgagagaatcctaaggttatttgtggcttcggggttatatttattactactactactaataaatattcaacaagtaaataaatcttttttaaatcaaaa

SEQ ID NO: 18939 - DNA, 3964 bp, Homo sapiens
  source 1..3964: mol_type = unassigned DNA
tgtgtcgttaccgggagctgtaaacaaggtgtgcaagcatctgaagagctgccgggatgcagcagagaggagcagctggaagccgtggctgcgctctcttccctctgctgggcgtcctgttcttccagggtgtttatatcgtcttttccttggagattcgtgcagatgcccatgtccgaggttatgttggagaaaagatcaagttgaaatgcactttcaagtcaacttcagatgtcactgacaaacttactatagactggacatatcgccctcccagcagcagccacacagtatcaatatttcattatcagtctttccagtacccaaccacagcaggcacatttcgggatcggatttcctgggttggaaatgtatacaaaggggatgcatctataagtataagcaaccctaccataaaggacaatgggacattcagctgtgctgtgaagaatcccccagatgtgcatcataatattcccatgacagagctaacagtcacagaaaggggttttggcaccatgctttcctctgtggcccttctttccatccttgtctttgtgccctcagccgtggtggttgctctgctgctggtgagaatggggaggaaggctgctgggctgaagaagaggagcaggtctggctataagaagtcatctattgaggtttccgatgacactgatcaggaggaggaagaggcgtgtatggcgaggctttgtgtccgttgcgctgagtgcctggattcagactatgaagagacatattgatgaaagtctgtatgacacaagaagagtcacctaaagacaggaaacatcccattccactggcagctaaagcctgtcagagaaagtggagctggcctggaccatagcgatggacaatcctggagatcatcagtaaagactttaggaaccacttatttattgaataaatgttcttgttgtatttataaactgttcaggaactctcataagagactcatgacttcccctttcaatgaattatgctgtaattgaatgaagaaattcttttcctgagcaaaaagatactttttgattcatctttgctctggaatgtattacatgttttcttccaactgtttgaaggagaattttgaatgtttgccacaccgctgatacccaaataattttttaaatgaagtggagcttgtggcttcctgatgtgtcaccagacaaaatattcgcttgggatatgtattctttgttttttgctccatgtacactttcagctgtgagttagtatagggcgtatacttaccggtttaatgacctcaacctcagttgtgtttggataacttagggtgtatacccttagtttccttagagttggtaggatcaagtcattggtttgctttgactgggtttttaaagtattaagtacagtgtcatcaatttacagttaaggaaaggaatcgtgaagtagaaaaattattttctttagtcttgctggtacaatttgggctaaggagtctttgttattttctgtcttgcttttttttttttttttttttttttgaggcagagtctcactctgtcgccaggctggagtgcagtggtgtgatcttggctcactgcaacctctgcctcctgggttcaagcgattcttgtgcctcagcctctcgagtagctgggattacaggcatgcgccaccacacccagctaatttttgtgtttttagtagagacggggtttcaccattttggccaggatggtctcaatcccctgacctcgtgatccacctgcctcggcctcccaaagtgttgggattacaggcatgagccactgtgcttggcctgttattttattttcttataactacaacttttcttcttgaattttcaggtcagaggcaagaaaaactctttacaggtttttagtggggggcttatggagtatttcaggagttctttgcaaattaaatcatcttttcacttgtattgtttttcaaaactttgttgatttctaaaatgtgccaactgtgagtaaactatggtatttgcaagtggtttttacataatatttgagatgaggaagtgagattgtgcatgacatacttctcctttgtattctctcagtgccttacagcaggttactccattctgctatgacaacttgtttcaaatgttaatttacataggattttttataagccattaaggcatatgtatagtatatcagtaaagatggatggtgcatatataaatagtcttctgtaatagtgattggatttacttctcaattatgagagacaaaaattatcccctcacctgtctctattctttcaacaggttgatcccttttcatgatttttcattaggtggttcaggaagtttccatattacagcgcttcagactgtatatgttagtttaaaaatcacttttctctctctcaacttctttcttttttttttgaagacttaatttaaaaaatttgggttgttagatccgtatcatagatttggcctagcctcttctgttaacctagtccacagatgagcgaatctggttagttgaaggacattgtgatttgactctggtcacgcgaggaagtagaagggcaaagacaggaccggcagtttacatttccagtggttaaacctcacggtactttgggactgcttgttaacttttgtggttgtctgaggccaatctaacgtgaccatttctgacacctcaacagagagaggaaagcaacttgagcaatgagagtaaataacttgggctctcagagatttgaagatagagatctcattgtgagggggactattttgcaggtcctcatttctccaagaaagagatggtgttacaggaacccactgaaagccatatcccattaaatgaggaactaattttggctgggccttcttgtaatgtcctcgcaggtgtgttgtgaagattaatgcagggtagtatgtttgtagattgacacctagtctaaacttgaggtaattggtgctctgtgaatactcagtcgtgttcttttatagccttaatcatgatttgaactagtcccttgctttttaaatgactgaatgaagtccttcgtggtaagggagtacgttgataacttagtttactatatgggtttgtggtcgcatcccagtcatcagctgctatcattttccttcttcatcccttatactgagatttgggttacagctttttattcttcgaaggatcacaaagcagtgtacagacacctgccttctttaaggatgaaaggaagataaagtggtctttttttgtttacttatttgtttcacctcttgtttgagtaacttctaaggtgctattctctctctctttttgctacctcatgagctcttgtcacagccatggaaaccagcctcgtttagaaagggaacttagttcagaaggggttaaaagccttccagaatttttctttagctgctgaagtttttacatgtggttacatgactttaagttttatgcattacgctcttaattctattacaaaatgtggactcaccaattgctttgtgttttccatgtgacctgttacttcaggctacttggggaacatcttagtcctctgtagctcctgaacccagcactggtgcttcaagagagaaggtagcacgtctttgttcaaaacaaaacaaaacgacacttctggaggccacatcctgaatatgaatgttctactaagtcactcagttatggttctaaagggaaactgtaagaagacccacaaggagtggaccaagactattatttaattgcacaacttgaaactttgctgccagaagaggcagctccattcctttgactccagtgttgggctgttaactgctgcacctcattgcctttttttgtttttgtttttgttttgtaggagggtaggcactgttgggccatatgcacaaatattgtaactcttggtatctttactgcatcatagtcaataaacttctttgtaccctttg

SEQ ID NO: 18940 - DNA, 1381 bp, Homo sapiens
  source 1..1381: mol_type = unassigned DNA
gtcgttaccgggagctgtaaacaaggtgtgcaagcatctgaagagctgccgggatgcagcagagaggagcagctggaagccgtggctgcgctctcttccctctgctgggcgtcctgttcttccaggatgcccatgtccgaggttatgttggagaaaagatcaagttgaaatgcactttcaagtcaacttcagatgtcactgacaaacttactatagactggacatatcgccctcccagcagcagccacacagtatcaatatttcattatcagtctttccagtacccaaccacagcaggcacatttcgggatcggatttcctgggttggaaatgtatacaaaggggatgcatctataagtataagcaaccctaccataaaggacaatgggacattcagctgtgctgtgaagaatcccccagatgtgcatcataatattcccatgacagagctaacagtcacagaaaggggttttggcaccatgctttcctctgtggcccttctttccatccttgtctttgtgccctcagccgtggtggttgctctgctgctggtgagaatggggaggaaggctgctgggctgaagaagaggagcaggtctggctataagaagtcatctattgaggtttccgatgacactgatcaggaggaggaagaggcgtgtatggcgaggctttgtgtccgttgcgctgagtgcctggattcagactatgaagagacatattgatgaaagtctgtatgacacaagaagagtcacctaaagacaggaaacatcccattccactggcagctaaagcctgtcagagaaagtggagctggcctggaccatagcgatggacaatcctggagatcatcagtaaagactttaggaaccacttatttattgaataaatgttcttgttgtatttataaactgttcaggaactctcataagagactcatgacttcccctttcaatgaattatgctgtaattgaatgaagaaattcttttcctgagcaaaaagatactttttgattcatctttgctctggaatgtattacatgttttcttccaactgtttgaaggagaattttgaatgtttgccacaccgctgatacccaaataattttttaaatgaagtggagcttgtggcttcctgatgtgtcaccagacaaaatattcgcttgggatatgtattctttgttttttgctccatgtacactttcagctgtgagttagtatagggcgtatacttaccggtttaatgacctcaacctcagttgtgtttggataacttagggtgtatacccttagtttccttagagttggtaggatcaagtcattggtttgctttgactgggtttttaaagtattaagtacagtgtcatcaatttacagttaa

SEQ ID NO: 18941 - DNA, 5533 bp, Homo sapiens
  source 1..5533: mol_type = unassigned DNA
ctccgccagcccgtgccaccgctgctaatgagagcagtcattaagtaaatgagacgtcgcctttagctggcttaggagttcgcacactaaggggagaagatatttaattgaaacccgcacgcaggcttccccacatgtgaccgctgtacgggaggcagctgccttccctctcctcccccagtccaccctgcaccccccatgtaaatttcatgattgctttccgtgatgtcattttgaaagaggacagacaatagctgtggggaaagaaaatgagttccgaggtgagctgttaaatcagaggtggacacacggaggcaaggccagcagctgcaggacctcaagacacctgggcagacactgcaagatgagcttagaaaatgaagacaagcgagctcgcacccgatccaaggccctgcgaggacccccagagaccacagctgcagacctcagctgccccaccccaggatgcacaggctcagggcacgtccggggcaagtactccaggcaccgaagtttacagagctgccccctggccaagaagaggaagctggagggcgctgaggctgagcacctggtgtccaagaggaagtcacaccccctgaagctggctctggacgagggctatggtgtggacagcgacggcagtgaggacactgaggtgaaggacgcctctgtttcggatgaatcggaaggaactctggagggggccgaggctgagacgtcaggacaggacgagattcatcgccccgagacagctgaaggaaggagccccgtcaagtcccattttggatccaaccccatcggcagcgccactgcctcctccaagggcagctacagcagctaccagggaatcatcgcaacttctctcctgaacttgggtcaaattgctgaagagaccctggtggaagaggacttgggccaggcggccaagccaggtcctggcattgtgcacctgcttcaggaggctgcagagggagctgccagcgaggagggtgaaaagggcctcttcatccagccagaggatgccgaggaggtcgtcgaagtcaccaccgagcgctcccaggacctgtgtccccagtccctggaggatgcagccagtgaggagtccagcaagcagaaaggcatcctgagtcacgaagaggaggacgaggaggaggaggaggaggaagaggaggaggaggaggatgaagaagaggaagaggaagaggaggaggaagaggaagaggaggaggaggaagaggaagaggaggaggaagaggaagaggaagaggaggaggaggaggcagctcctgatgtgatctttcaggaagacacctctcacacctctgcccagaaggcccctgagctccggggcccagaatcacccagtcccaagcctgagtactctgttattgtggaggtccgctcggatgatgacaaggacgaggacacccactcccggaagtcaacagtcactgacgagtcggagatgcaggacatgatgacccggggaaacctgggcctcctggagcaggccatcgccctgaaggctgaacaggtgcgcacagtctgcgagccgggctgcccgcctgccgagcagagccagctgggcctgggagagccagggaaggcagcaaagcccctggacactgtgcggaagagttactacagtaaagatccttcaagagctgagaagcgtgagatcaagtgtccaacaccaggctgtgatggcactggccacgttaccgggttgtaccctcaccaccgcagcctttctggctgtccccacaaggataggatccccccagagatcttagccatgcatgagaacgtgctgaagtgccccactcctggctgcacaggccagggtcacgtgaacagcaaccgcaacacgcacagaagtttgtctgggtgtcccattgctgccgccgaaaaattagccaaatcccatgagaagcagcagccgcagacaggagatccttccaagagtagctccaattccgatcggatcctcaggcccatgtgcttcgtgaagcagctcgaggtccctccatatgggagctaccggcccaacgtggcccccgccacacccagggccaacttggccaaggagctggagaagttctccaaggtcacctttgactacgcaagtttcgatgctcaggtttttggcaaacgcatgcttgccccaaagattcagaccagcgaaacctcacctaaagcctttcaatgctttgactactcgcaggacgccgaggctgcacacatggctgccactgccatcctgaacctctccacgcgctgctgggagatgcctgagaacctcagcacgaagccacaggacctccccagcaagtctgtggatatcgaggtagacgaaaatggaaccctggacttgagcatgcacaaacaccgcaaacgagaaaatgctttccccagcagcagcagctgcagcagcagccccggtgtgaagtctcccgacgcctcccagcgccacagcagcaccagcgcccccagcagctccatgacctctccccagtccagccaggcctcccgccaggacgagtgggaccggcccctggactacaccaagcctagccgcctgagagaggaggaacctgaggagtcagagccagcagcccattcttttgcttcttctgaagcagatgaccaggaagtgtcggaagagaattttgaggagcggaagtatccgggggaagtcaccctgaccaactttaagctgaagtttctctccaaggacataaagaaggagctgctcacctgtcccacccctggctgtgacggcagcggccacatcaccgggaactacgcctcccaccgcagcctctctggttgccctcttgctgacaagagcctcagaaacctcatggctgcccactctgctgacctcaagtgccccacgcccggctgtgacggctctggccacatcacagggaactacgcttcacaccggagcttgtccggctgccctcgtgcaaagaaaagtggagtcaaggtggcacccaccaaggacgacaaggaggaccccgagctgatgaagtgcccagttccaggctgtgtggggctcggtcacatcagcgggaaatacgcctctcacaggagcgcatccggctgcccactggccgcccgcaggcagaaggaagggtccctcaatggctcgtcattctcctggaagtccctgaagaatgaaggaccgacctgccccaccccgggctgtgacggctctggccacgccaatgggagtttcctcacccaccggagtttgtcaggctgtcccagagcaacctttgctggaaagaagggaaaactgtcaggggatgaggtcctcagtccaaagttcaagactagcgacgtgttggagaatgatgaggagatcaagcagctgaaccaggagatccgagacctgaacgagtccaactcggagatggaggctgccatggtgcagctgcagtcccagatctcctccatggagaagaacctgaagaacatcgaggaggagaacaagctcattgaggagcagaatgaagccctgtttctggagctgtccggcctgagccaggccctcatccaaagtctcgccaatatccgccttccgcacatggagccaatatgcgaacagaatttcgatgcctatgtgagcaccctcaccgacatgtactccaaccaggacccggagaacaaggacctcctggagagcatcaagcaggctgtgaggggcatccaggtctaggccgtgtggtacccagaagtgtcccagcccaccacaccgtttacctccctcgccctgccccgcaccgtggggatgcccaactcacagtgacttcccgtttggggcccggtgtggccgcgggcgggtttatccaaagggatggctggaaattggccgctcccacgaggctccctccaggcttggggccgtggtggccctatctgtgtgcataggggcactgaagaattacaaagtgatttatttttgttttctgaaagaaatctgaagagcagctcaaagtctccagtggaagctcatggacaaggttctcagggaagttttggagtttgcaaccacagtattcctttgtctgtcgaggctgggagggtagccgtgagcgtggtgggtgggtggtgtgagtggcatcttggcctggaggacacgcctggggcagcgtgtctgtgctcagtgagggccgatgaagaaagtgcgttttctgttttcatttaattcagttttgtgttaagggtggaacaaagctctgttctagagggaaagttaggaataggcctcccagaggatactccagacagttgacaagcatcgcagcccctgtcaggtcaaggaattttaacctgggagactcctgaaaatcagcctaatgtctgggggcagctggcgctgaggctgtgcagatgtgtatggccttgggtcacagctccctactggggctgcagcctttagaccctgggtctgggatccacgtctagggaccactctggcttctgtgcatccacccaggcccccgacccatcactgccacattctccgggtcatggccgagcttgacctctgcatccatggtgacggaggtggcaatgacatcatcaaggtcagagggtaaattcctaacaggagaccacaaaggtttcacttcttttagatccatccaatatgcgaaaaaagggtacattttaatttaatgtgttaaaaacacaatgtccctaccgtgtaaatagaatccaagtcaattgtgactgcaattccaagttagtatttaaaaatagagaaattgcacttcctggaaaaaattaaaaagtagttagtttaattattctgtaaattatttaattttgtcaagatgtaagtatttatattcacagcctcttatgttaacgtttgctatttatttaacatttttatttattaattttatactatttcaactagaccccacaccagggcaccctaagaggggaaaaaagtgaattcaaagcaaaaataactatttgactataatataggccacaaaaaatcttgatataactcctagttataattttgatgcaaccaagttattttttatatattttgttatttattcttttaataatggaatttttttaaaaagtattttgtaactgaggaattttgataatttggggattttgttttcccttggtctaatggagagaaagacattttggttttctttttccattttgggttccttttgtttcaggcacggataacagcaaatggaattctgtatttattattatttaagtgtagcgcagatgtgtgtgcttgggcgtgtttctcgtgtcgcgtttgcgtgtcggctcttgcggtggagtcctgttgctgtgagggagtgctggccgcaggcagcctcgagtcaccgccaggctcacaggctgtgccacccgtccctccgacagctccaatactgtgaccctccttcctcaggaagcgcgttgaacccacagcactccgtggtgtgtttgcagggtgatttcctaataaaagtccactctgactgtg

SEQ ID NO: 18942 - DNA, 2059 bp, Homo sapiens
  source 1..2059: mol_type = unassigned DNA
cggagtagcaggagtttgcaagctgcttcattaacttggagccagtggaatgtctgggatcgtctgtgatttggaaaccggtggcagaatgttcccgcgtttctggtcctcatcagtcagaaaatgagttccgaggtgagctgttaaatcagaggtggacacacggaggcaaggccagcagctgcaggacctcaagacacctgggcagacactgcaagatgagcttagaaaatgaagacaagcgagctcgcacccgatccaaggccctgcgaggacccccagagaccacagctgcagacctcagctgccccaccccaggatgcacaggctcagggcacgtccggggcaagtactccaggcaccgaagtttacagagctgccccctggccaagaagaggaagctggagggcgctgaggctgagcacctggtgtccaagaggaagtcacaccccctgaagctggctctggacgagggctatggtgtggacagcgacggcagtgaggacactgaggtgaaggacgcctctgtttcggatgaatcggaaggaactctggagggggccgaggctgagacgtcaggacaggacgagattcatcgccccgagacagctgaagatccttcaagagctgagaagcgtgagatcaagtgtccaacaccaggctgtgatggcactggccacgttaccgggttgtaccctcaccaccgcagcctttctggctgtccccacaaggataggatccccccagagatcttagccatgcatgagaacgtgctgaagtgccccactcctggctgcacaggccagggtcacgtgaacagcaaccgcaacacgcacagaagtttgtctgggtgtcccattgctgccgccgaaaaattagccaaatcccatgagaagcagcagccgcagacaggagatccttccaagagtagctccaattccgatcggatcctcaggcccatgtgcttcgtgaagcagctcgaggtccctccatatgggagctaccggcccaacgtggcccccgccacacccagggccaacttggccaaggagctggagaagttctccaaggtcacctttgactacgcaagtttcgatgctcaggtttttggcaaacgcatgcttgccccaaagattcagaccagcgaaacctcacctaaagcctttcaatgctttgactactcgcaggacgccgaggctgcacacatggctgccactgccatcctgaacctctccacgcgctgctgggagatgcctgagaacctcagcacgaagccacaggacctccccagcaagtctgtggatatcgaggtagacgaaaatggaaccctggacttgagcatgcacaaacaccgcaaacgagaaaatgctttccccagcagcagcagctgcagcagcagccccggtgtgaagtctcccgacgcctcccagcgccacagcagcaccagcgcccccagcagctccatgacctctccccagtccagccaggcctcccgccaggacgagtgggaccggcccctggactacaccaagcctagccgcctgagagaggaggaacctgaggagtcagagccagcagcccattcttttgcttcttctgaagcagatgaccaggaagtgtcggaagagaattttgaggagcggaagtatccgggggaagtcaccctgaccaactttaagctgaagtttctctccaaggacataaagaaggagctgctcacctgtcccacccctggctgtgacggcagcggccacatcaccgggaactacgcctcccaccgcaggtgccccacgcccggctgtgacggctctggccacatcacagggaactacgcttcacaccggagcttgtccggctgccctcgtgcaaagaaaagtggagtcaaggtggcacccaccaaggacgacaaggaggaccccgagctgatgaagtacgttgggccatgctggctctttcattgcattgcggaattgagattttcgtgtgttttataatgtaaaaaaactcctactagattcccttttcattaatacaacgggtcacctaactgaccaacgcc

SEQ ID NO: 18943 - DNA, 5614 bp, Homo sapiens
  source 1..5614: mol_type = unassigned DNA
ctccgccagcccgtgccaccgctgctaatgagagcagtcattaagtaaatgagacgtcgcctttagctggcttaggagttcgcacactaaggggagaagatatttaattgaaacccgcacgcaggcttccccacatgtgaccgctgtacgggaggcagctgccttccctctcctcccccagtccaccctgcaccccccatgtaaatttcatgattgctttccgtgatgtcattttgaaagaggacagacaatagctgtggggaaagaaaatgagttccgaggtgagctgttaaatcagaggtggacacacggaggcaaggccagcagctgcaggacctcaagacacctgggcagacactgcaagatgagcttagaaaatgaagacaagcgagctcgcacccgatccaaggccctgcgaggacccccagagaccacagctgcagacctcagctgccccaccccaggatgcacaggctcagggcacgtccggggcaagtactccaggcaccgaagtttacagagctgccccctggccaagaagaggaagctggagggcgctgaggctgagcacctggtgtccaagaggaagtcacaccccctgaagctggctctggacgagggctatggtgtggacagcgacggcagtgaggacactgaggtgaaggacgcctctgtttcggatgaatcggaaggaactctggagggggccgaggctgagacgtcaggacaggacgagattcatcgccccgagacagctgaaggaaggagccccgtcaagtcccattttggatccaaccccatcggcagcgccactgcctcctccaagggcagctacagcagctaccagggaatcatcgcaacttctctcctgaacttgggtcaaattgctgaagagaccctggtggaagaggacttgggccaggcggccaagccaggtcctggcattgtgcacctgcttcaggaggctgcagagggagctgccagcgaggagggtgaaaagggcctcttcatccagccagaggatgccgaggaggtcgtcgaagtcaccaccgagcgctcccaggacctgtgtccccagtccctggaggatgcagccagtgaggagtccagcaagcagaaaggcatcctgagtcacgaagaggaggacgaggaggaggaggaggaggaagaggaggaggaggaggatgaagaagaggaagaggaagaggaggaggaagaggaagaggaggaggaggaagaggaagaggaggaggaagaggaagaggaagaggaggaggaggaggcagctcctgatgtgatctttcaggaagacacctctcacacctctgcccagaaggcccctgagctccggggcccagaatcacccagtcccaagcctgagtactctgttattgtggaggtccgctcggatgatgacaaggacgaggacacccactcccggaagtcaacagtcactgacgagtcggagatgcaggacatgatgacccggggaaacctgggcctcctggagcaggccatcgccctgaaggctgaacaggtgcgcacagtctgcgagccgggctgcccgcctgccgagcagagccagctgggcctgggagagccagggaaggcagcaaagcccctggacactgtgcggaagagttactacagtaaagatccttcaagagctgagaagcgtgagatcaagtgtccaacaccaggctgtgatggcactggccacgttaccgggttgtaccctcaccaccgcagcctttctggctgtccccacaaggataggatccccccagagatcttagccatgcatgagaacgtgctgaagtgccccactcctggctgcacaggccagggtcacgtgaacagcaaccgcaacacgcacagaagtttgtctgggtgtcccattgctgccgccgaaaaattagccaaatcccatgagaagcagcagccgcagacaggagatccttccaagagtagctccaattccgatcggatcctcaggcccatgtgcttcgtgaagcagctcgaggtccctccatatgggagctaccggcccaacgtggcccccgccacacccagggccaacttggccaaggagctggagaagttctccaaggtcacctttgactacgcaagtttcgatgctcaggtttttggcaaacgcatgcttgccccaaagattcagaccagcgaaacctcacctaaagcctttcaatccaaacctttcccaaaggcctcttcccccaggcacagcccctccagtagttatgtgaggagcacttcatcctcttctgcaggctttgactactcgcaggacgccgaggctgcacacatggctgccactgccatcctgaacctctccacgcgctgctgggagatgcctgagaacctcagcacgaagccacaggacctccccagcaagtctgtggatatcgaggtagacgaaaatggaaccctggacttgagcatgcacaaacaccgcaaacgagaaaatgctttccccagcagcagcagctgcagcagcagccccggtgtgaagtctcccgacgcctcccagcgccacagcagcaccagcgcccccagcagctccatgacctctccccagtccagccaggcctcccgccaggacgagtgggaccggcccctggactacaccaagcctagccgcctgagagaggaggaacctgaggagtcagagccagcagcccattcttttgcttcttctgaagcagatgaccaggaagtgtcggaagagaattttgaggagcggaagtatccgggggaagtcaccctgaccaactttaagctgaagtttctctccaaggacataaagaaggagctgctcacctgtcccacccctggctgtgacggcagcggccacatcaccgggaactacgcctcccaccgcagcctctctggttgccctcttgctgacaagagcctcagaaacctcatggctgcccactctgctgacctcaagtgccccacgcccggctgtgacggctctggccacatcacagggaactacgcttcacaccggagcttgtccggctgccctcgtgcaaagaaaagtggagtcaaggtggcacccaccaaggacgacaaggaggaccccgagctgatgaagtgcccagttccaggctgtgtggggctcggtcacatcagcgggaaatacgcctctcacaggagcgcatccggctgcccactggccgcccgcaggcagaaggaagggtccctcaatggctcgtcattctcctggaagtccctgaagaatgaaggaccgacctgccccaccccgggctgtgacggctctggccacgccaatgggagtttcctcacccaccggagtttgtcaggctgtcccagagcaacctttgctggaaagaagggaaaactgtcaggggatgaggtcctcagtccaaagttcaagactagcgacgtgttggagaatgatgaggagatcaagcagctgaaccaggagatccgagacctgaacgagtccaactcggagatggaggctgccatggtgcagctgcagtcccagatctcctccatggagaagaacctgaagaacatcgaggaggagaacaagctcattgaggagcagaatgaagccctgtttctggagctgtccggcctgagccaggccctcatccaaagtctcgccaatatccgccttccgcacatggagccaatatgcgaacagaatttcgatgcctatgtgagcaccctcaccgacatgtactccaaccaggacccggagaacaaggacctcctggagagcatcaagcaggctgtgaggggcatccaggtctaggccgtgtggtacccagaagtgtcccagcccaccacaccgtttacctccctcgccctgccccgcaccgtggggatgcccaactcacagtgacttcccgtttggggcccggtgtggccgcgggcgggtttatccaaagggatggctggaaattggccgctcccacgaggctccctccaggcttggggccgtggtggccctatctgtgtgcataggggcactgaagaattacaaagtgatttatttttgttttctgaaagaaatctgaagagcagctcaaagtctccagtggaagctcatggacaaggttctcagggaagttttggagtttgcaaccacagtattcctttgtctgtcgaggctgggagggtagccgtgagcgtggtgggtgggtggtgtgagtggcatcttggcctggaggacacgcctggggcagcgtgtctgtgctcagtgagggccgatgaagaaagtgcgttttctgttttcatttaattcagttttgtgttaagggtggaacaaagctctgttctagagggaaagttaggaataggcctcccagaggatactccagacagttgacaagcatcgcagcccctgtcaggtcaaggaattttaacctgggagactcctgaaaatcagcctaatgtctgggggcagctggcgctgaggctgtgcagatgtgtatggccttgggtcacagctccctactggggctgcagcctttagaccctgggtctgggatccacgtctagggaccactctggcttctgtgcatccacccaggcccccgacccatcactgccacattctccgggtcatggccgagcttgacctctgcatccatggtgacggaggtggcaatgacatcatcaaggtcagagggtaaattcctaacaggagaccacaaaggtttcacttcttttagatccatccaatatgcgaaaaaagggtacattttaatttaatgtgttaaaaacacaatgtccctaccgtgtaaatagaatccaagtcaattgtgactgcaattccaagttagtatttaaaaatagagaaattgcacttcctggaaaaaattaaaaagtagttagtttaattattctgtaaattatttaattttgtcaagatgtaagtatttatattcacagcctcttatgttaacgtttgctatttatttaacatttttatttattaattttatactatttcaactagaccccacaccagggcaccctaagaggggaaaaaagtgaattcaaagcaaaaataactatttgactataatataggccacaaaaaatcttgatataactcctagttataattttgatgcaaccaagttattttttatatattttgttatttattcttttaataatggaatttttttaaaaagtattttgtaactgaggaattttgataatttggggattttgttttcccttggtctaatggagagaaagacattttggttttctttttccattttgggttccttttgtttcaggcacggataacagcaaatggaattctgtatttattattatttaagtgtagcgcagatgtgtgtgcttgggcgtgtttctcgtgtcgcgtttgcgtgtcggctcttgcggtggagtcctgttgctgtgagggagtgctggccgcaggcagcctcgagtcaccgccaggctcacaggctgtgccacccgtccctccgacagctccaatactgtgaccctccttcctcaggaagcgcgttgaacccacagcactccgtggtgtgtttgcagggtgatttcctaataaaagtccactctgactgtg

SEQ ID NO: 18944 - DNA, 6953 bp, Homo sapiens
  source 1..6953: mol_type = unassigned DNA
cagtgagagagcttttccctgcagtcttgttgaagcaccccgggttttttgctcattgttggtgggtgcattttaattttttcattccctggactatgggttatgatatccatactcactgaagacaaaaagccaccttttctgcgtcttggtggcatgcatgtgtctcatcatcctttcaaacttgtggtggaacagggttttcttccctgtctgtgtattttgagccagcacagttaccaaaattgaacttgtctttcgcttgtgagcggttgtggtcattgtgagggcgggtcatgaggaggctgtagccaaggacgaggtgtgtgcggctgttgcctggacgtttgtccaatccacgttgacatttgagggatcacagcgtgtgaaaatgaactcagaggagaattggtgaattcctatccagtgggcatcttcaaaccctggtcgacggcggaagaatatcaggtcctgagatcacccacccggcgcggcaacagtgcagagtggccacatctggtggaagaagaaaaaaatgtagttattgaattcaatcaagtgtttgcatctttcaagctatcaacaaaattccatcaagaaaggttccagttggtctcacagacgtatggatatccgaggagccacctaaagatggagaaatcaaggcatagagagattaagtgactttgccacagtcacaagctggagaggaccaggagtagagcttagagcgagcccctgactctgggcctgcgtcctgccaggagtcacgctgcctccgttcctaggagagaagacttcctgtaagatggaggtggacaccgaggagaagcggcatcgcacgcggtccaaaggggttcgagttcccgtggaaccagccatacaagagctgttcagctgtcccacccctggctgtgacggcagtggtcatgtcagtggcaaatatgcaagacacagaagtgtatatggttgtcccttggcgaaaaaaagaaaaacacaagataaacagccccaggaacctgctcctaaacgaaagccatttgccgtgaaagcagacagctcctcagtggatgagtgtgacgacagtgatgggactgaggacatggatgagaaggaggaggatgaggaggaggaggaggaagaggaagaagaaaacgaagaccatcaaatgaattgtcacaatactcgaataatgcaagacacagaaaaggatgataacaataatgacgaatatgacaattacgatgaactggtggccaagtcattgttaaacctcggcaaaatcgctgaggatgcagcctaccgggccaggactgagtcagaaatgaacagcaatacctccaatagtctggaagacgatagtgacaaaaacgaaaacctgggtcggaaaagtgagttgagtttagacttagacagtgatgttgttagagaaacagtggactcccttaaactattagcccaaggacacggtgttgtgctctcagaaaacatgaatgacagaaattatgcagacagcatgtcgcagcaagacagtagaaatatgaattacgtcatgttggggaagcccatgaacaacggactcatggaaaagatggtggaggagagcgatgaggaggtgtgtctgagcagtctggagtgtttgaggaatcagtgcttcgacctggccaggaagctcagtgagaccaacccgcaggagaggaatccgcagcagaacatgaacatccgtcagcatgtccggccagaagaggacttccccggaaggacgccggacagaaactactcggacatgctgaacctcatgcggctggaggagcagttgagcccccggtcgagagtgtttgccagctgtgcgaaggaggatgggtgtcatgagcgggacgacgataccacctctgtgaactcggacaggtctgaagaggtgttcgacatgaccaaggggaacctgaccctgctggagaaagccatcgctttggaaacggaaagagcaaaggccatgagggagaagatggccatggaagctgggaggagggacaatatgaggtcatatgaggaccagtctccgagacaacttcccggggaggacagaaagcctaaatccagtgacagccatgtcaaaaagccatactatgatccctcaagaacagaaaagaaagagagcaagtgtccaacccccgggtgtgatggaaccggccacgtaactgggctgtacccacatcaccgcagcctgtccggatgcccgcacaaagatagggtccctccagaaatccttgccatgcatgaaagtgtcctcaagtgccccactccgggctgcacggggcgcgggcatgtcaacagcaacaggaactcccaccgaagcctctccggatgcccgatcgctgcagcagagaaactggccaaggcacaggaaaagcaccagagctgcgacgtgtccaagtccagccaggcctcggaccgcgtgctcaggccaatgtgctttgtgaagcagctggagattcctcagtatggctacagaaacaatgtccccacaactacgccgcgttccaacctggccaaggagctcgagaaatattccaagacctcgtttgaatacaacagttacgacaaccatacttatggcaagcgagccatagctcccaaggtgcaaaccagggatatatcccccaaaggatatgatgatgcgaagcggtactgcaaggaccccagccccagcagcagcagcaccagcagctacgcgcccagcagcagcagcaacctgagctgcggcgggggcagcagcgccagcagcacgtgcagcaagagcagcttcgactacacgcacgacatggaggcggcccacatggcggccaccgccatcctcaacctgtccacgcgctgccgcgagatgccgcagaacctgagcaccaagccgcaggacctgtgcgccacgcggaaccctgacatggaggtggatgagaacgggaccctggacctcagcatgaacaagcagaggccgcgggacagctgctgccccatcctgacccctctggagcccatgtccccccagcagcaggcagtgatgaacaaccggtgtttccagctgggcgagggcgactgctgggacttgcccgtagactacaccaaaatgaaaccccggaggatagacgaggacgagtccaaagacattactccagaagacttggacccattccaggaggctctagaagaaagacggtatcccggggaggtgaccatcccaagtcccaaacccaagtaccctcagtgcaaggagagcaaaaaggacttaataactctgtctggctgccccctggcggacaaaagcattcgaagtatgctggccaccagctcccaagaactcaagtgccccacgcctggctgtgatggttctggacatatcaccggcaattatgcttctcatcggagcctttcaggttgcccaagagcaaagaaaagtggtatcaggatagcacagagcaaagaagataaagaagatcaagaacccatcaggtgtccggtccccgggtgcgacggccagggccacatcactgggaagtacgcgtcccatcgcagcgcctccgggtgccccttggcggccaagaggcagaaagacgggtacctgaatggctcccagttctcctggaagtcggtcaagacggaaggcatgtcctgccccacgccaggatgcgacggctcaggccacgtcagcggcagcttcctcacacaccgcagcttgtcaggatgcccgagagccacgtcagcgatgaagaaggcaaagctttctggagagcagatgctgaccatcaaacagcgggccagcaacggtatagaaaatgatgaagaaatcaaacagttagatgaagaaatcaaggagctaaatgaatccaattcccagatggaagccgatatgattaaactcagaactcagattaccacgatggagagcaacctgaagaccatcgaagaggagaacaaagtgattgagcagcagaacgagtctctcctccacgagctggcgaacctgagccagtctctgatccacagcctggctaacatccagctgccgcacatggatccaatcaatgaacaaaattttgatgcttacgtgactactttgacggaaatgtatacaaatcaagatcgttatcagagtccagaaaataaagccctactggaaaatataaagcaggctgtgagaggaattcaggtctgaacagctgctgtagtgatgaaactcttgcttaaaaaggatgcctcttgttttttgctgctgtaacttaccagaaagtgttctatatttatttctgtttgaatttgaaacagtgttatgcttacaagacttcataatgattttatgtcttgctttaaagatagtacctgcagaatagtttttgaatacacccacattttgtacgtttccatgtaagctgacatagtgttctgccatgtaatgtttatagctgctgatgtatgcacatttgggggtatatctatttctgaagaggtaagctgatcaaaataaatagagtgtaaattctttttaatgctttagtgattaaatgttttagtattttgaactgaaatggacacacaaacacacacacgcacacacagacccacagctttgaatgatcatgttgtggctgagcagccgctttttagacgttatcattttgcctcatgttggaggactttatggaatttaagaaatacattttgtgtgcatattgtttcatagcaagaattcgttgcaaaaatgctttatttttgaacaatgcttggaaatattatgtgacttttttgtttgtttgttttaggaggatggtgtatggtgggggcaataaatgaggttttttgcattccaaggaaatggcatatggattaactgtaagaaatgaaataagtaatttattgtaagacaacatcaagccatggaaacttggcagaagattcaaagcagcttaaacagcacttttaaattaactcctaagcgttacatggttgtgactatggaaactccagttaagacaggatcttatcagaggtggacaacgtgaagatttccttttccattttcaataaactttggaacaaccttctcgtatctcccctagagtttcgtgcccctctgaactgtctgttattgcaatgtagtttatcaacagaatttgtgtgttttcgatttaagctaaaagataatttaagaacatttatttccccttttcactttaaaaaattatgattattcctattattgttatgaaccttcttattttacatttgagggataaaggcaaatgatttgtgagtcttctagttactggaccgagttttctgctggatctggtgggaaggcagctcggtaaagtttccctcctgctccccccgcccgactttgactctgaatcagcatttggtcctattcagaggactcttaccacgacgtttctgttctacacttgggtggagaccagttgaccatagagcatttgcagagcctcattgtttgatttcttgtgactattctaagaatgaatgcaatcagattttaaaagtaactaaatatacttcagcacttttttgctttaaactagatcatcttagacttgtttataccttccagatttgattgttttactcccaatgactgcactatatgtatgcataagaccacttttgagcgctgtgttcccccttctgagtagtcctttgacgacgtgttgtgttttctgatgttgacttgagttccatttagtagcatctcttccttccatgtcttgatgttatgcaggaagtacagacgtactttaaatttttgttatgaaataaaaaaaagatgggttttgtaaaaataaaaaaaaaatatttttagcagaacaggacttacagggtcattgtccccacaatgtgccagtcgactatttgcacttaccttgtcctatatatccgtacggaggtgtgcaattcctcgtgtcagtagccttgtgacactgaacctggatggattatagaggagccctcacggctgatcaataatgttgcaaagggagactacagggatctcacgacgaatattctgatacaatactcaacctcggtatatatatatgtgtataaatatatgtatatcccagcggcactttatactgttcactgtacaaaagcttacagttttccacaaggactttaataactagctgggaaaagacgatgtaattatttcggggctctgcggaaccttctctgtacagcgccccctttctgttgtgctattggttgcagctgccatgctcagaatgcgttttgagagctgaagcaaggtgcttgcagtcacctgaggccgtccgtgtggcccagggccccagctgcctttagggcccccattgttcataacagcatatgcatttccccaccgcgttgtgtctgcagcttctttgccaatatagtaatgcttttagtagagtactagatagtatcagttttggattcttattgttatcacctatgtacaatggaaagggattttaagcacaaacctgctgctcatctaacgttggtacataatctcaaatcaaaagttatctgtgactattatatagggatcacaaaagtgtcacatattagaatgctgacctttcatatggattattgtgagtcatcagagtttattataacttattgttcatattcatttctaagttaatttaagtaatcatttattaagacagaattttgtataaactatttattgtgctctctgtggaactgaagtttgatttatttttgtactacacggcatgggtttgttgacactttaattttgctataaatgtgtggaatcacaagttgctgtgatacttcatttttaaattgtgaactttgtacaaattttgtcatgctggatgttaacacatcttactctaaataaacaaggtgttgccacatttgtagcacgaagg

SEQ ID NO: 18945 - DNA, 7063 bp, Homo sapiens
  source 1..7063: mol_type = unassigned DNA
ggtgggtgcattttaattttttcattccctggactatgggttatgatatccatactcactgaagacaaaaagccaccttttctgcgtcttggtggcatgcatgtgtctcatcatcctttcaaacttgtggtggaacagggttttcttccctgtctgtgtattttgagccagcacagttaccaaaattgaacttgtctttcgcttgtgagcggttgtggtcattgtgagggcgggtcatgaggaggctgtagccaaggacgaggtgtgtgcggctgttgcctggacgtttgtccaatccacgttgacatttgagggatcacagcgtgtgaaaatgaactcagaggagaattggtgaattcctatccagtgggcatcttcaaaccctggtcgacggcggaagaatatcaggtcctgagatcacccacccggcgcggcaacagtgcagagtggccacatctggtggaagaagaaaaaaatgtagttattgaattcaatcaagtgtttgcatctttcaagctatcaacaaaattccatcaagaaaggttccagttggtctcacagacgtatggatatccgaggagccacctaaagatggagaaatcaaggcatagagagattaagtgactttgccacagtcacaagctggagaggaccaggagtagagcttagagcgagcccctgactctgggcctgcgtcctgccaggagtcacgctgcctccgttcctaggagagaagacttcctgtaagatggaggtggacaccgaggagaagcggcatcgcacgcggtccaaaggggttcgagttcccgtggaaccagccatacaagagctgttcagctgtcccacccctggctgtgacggcagtggtcatgtcagtggcaaatatgcaagacacagaagtgtatatggttgtcccttggcgaaaaaaagaaaaacacaagataaacagccccaggaacctgctcctaaacgaaagccatttgccgtgaaagcagacagctcctcagtggatgagtgtgacgacagtgatgggactgaggacatggatgagaaggaggaggatgagggggaggagtactccgaggacaatgatgagccaggggatgaggacgaggaggacgaggagggggaccgggaggaggaggaggagatcgaggaggaggatgaggacgatgacgaggatggagaagatgtggaggatgaagaagaggaagaggaggaggaggaggaggaggaagaggaagaagaaaacgaagaccatcaaatgaattgtcacaatactcgaataatgcaagacacagaaaaggatgataacaataatgacgaatatgacaattacgatgaactggtggccaagtcattgttaaacctcggcaaaatcgctgaggatgcagcctaccgggccaggactgagtcagaaatgaacagcaatacctccaatagtctggaagacgatagtgacaaaaacgaaaacctgggtcggaaaagtgagttgagtttagacttagacagtgatgttgttagagaaacagtggactcccttaaactattagcccaaggacacggtgttgtgctctcagaaaacatgaatgacagaaattatgcagacagcatgtcgcagcaagacagtagaaatatgaattacgtcatgttggggaagcccatgaacaacggactcatggaaaagatggtggaggagagcgatgaggaggtgtgtctgagcagtctggagtgtttgaggaatcagtgcttcgacctggccaggaagctcagtgagaccaacccgcaggagaggaatccgcagcagaacatgaacatccgtcagcatgtccggccagaagaggacttccccggaaggacgccggacagaaactactcggacatgctgaacctcatgcggctggaggagcagttgagcccccggtcgagagtgtttgccagctgtgcgaaggaggatgggtgtcatgagcgggacgacgataccacctctgtgaactcggacaggtctgaagaggtgttcgacatgaccaaggggaacctgaccctgctggagaaagccatcgctttggaaacggaaagagcaaaggccatgagggagaagatggccatggaagctgggaggagggacaatatgaggtcatatgaggaccagtctccgagacaacttcccggggaggacagaaagcctaaatccagtgacagccatgtcaaaaagccatactatggtaaagatccctcaagaacagaaaagaaagagagcaagtgtccaacccccgggtgtgatggaaccggccacgtaactgggctgtacccacatcaccgcagcctgtccggatgcccgcacaaagatagggtccctccagaaatccttgccatgcatgaaagtgtcctcaagtgccccactccgggctgcacggggcgcgggcatgtcaacagcaacaggaactcccaccgaagcctctccggatgcccgatcgctgcagcagagaaactggccaaggcacaggaaaagcaccagagctgcgacgtgtccaagtccagccaggcctcggaccgcgtgctcaggccaatgtgctttgtgaagcagctggagattcctcagtatggctacagaaacaatgtccccacaactacgccgcgttccaacctggccaaggagctcgagaaatattccaagacctcgtttgaatacaacagttacgacaaccatacttatggcaagcgagccatagctcccaaggtgcaaaccagggatatatcccccaaaggatatgatgatgcgaagcggtactgcaaggaccccagccccagcagcagcagcaccagcagctacgcgcccagcagcagcagcaacctgagctgcggcgggggcagcagcgccagcagcacgtgcagcaagagcagcttcgactacacgcacgacatggaggcggcccacatggcggccaccgccatcctcaacctgtccacgcgctgccgcgagatgccgcagaacctgagcaccaagccgcaggacctgtgcgccacgcggaaccctgacatggaggtggatgagaacgggaccctggacctcagcatgaacaagcagaggccgcgggacagctgctgccccatcctgacccctctggagcccatgtccccccagcagcaggcagtgatgaacaaccggtgtttccagctgggcgagggcgactgctgggacttgcccgtagactacaccaaaatgaaaccccggaggatagacgaggacgagtccaaagacattactccagaagacttggacccattccaggaggctctagaagaaagacggtatcccggggaggtgaccatcccaagtcccaaacccaagtaccctcagtgcaaggagagcaaaaaggacttaataactctgtctggctgccccctggcggacaaaagcattcgaagtatgctggccaccagctcccaagaactcaagtgccccacgcctggctgtgatggttctggacatatcaccggcaattatgcttctcatcggagcctttcaggttgcccaagagcaaagaaaagtggtatcaggatagcacagagcaaagaagataaagaagatcaagaacccatcaggtgtccggtccccgggtgcgacggccagggccacatcactgggaagtacgcgtcccatcgcagcgcctccgggtgccccttggcggccaagaggcagaaagacgggtacctgaatggctcccagttctcctggaagtcggtcaagacggaaggcatgtcctgccccacgccaggatgcgacggctcaggccacgtcagcggcagcttcctcacacaccgcagcttgtcaggatgcccgagagccacgtcagcgatgaagaaggcaaagctttctggagagcagatgctgaccatcaaacagcgggccagcaacggtatagaaaatgatgaagaaatcaaacagttagatgaagaaatcaaggagctaaatgaatccaattcccagatggaagccgatatgattaaactcagaactcagattaccacgatggagagcaacctgaagaccatcgaagaggagaacaaagtgattgagcagcagaacgagtctctcctccacgagctggcgaacctgagccagtctctgatccacagcctggctaacatccagctgccgcacatggatccaatcaatgaacaaaattttgatgcttacgtgactactttgacggaaatgtatacaaatcaagatcgttatcagagtccagaaaataaagccctactggaaaatataaagcaggctgtgagaggaattcaggtctgaacagctgctgtagtgatgaaactcttgcttaaaaaggatgcctcttgttttttgctgctgtaacttaccagaaagtgttctatatttatttctgtttgaatttgaaacagtgttatgcttacaagacttcataatgattttatgtcttgctttaaagatagtacctgcagaatagtttttgaatacacccacattttgtacgtttccatgtaagctgacatagtgttctgccatgtaatgtttatagctgctgatgtatgcacatttgggggtatatctatttctgaagaggtaagctgatcaaaataaatagagtgtaaattctttttaatgctttagtgattaaatgttttagtattttgaactgaaatggacacacaaacacacacacgcacacacagacccacagctttgaatgatcatgttgtggctgagcagccgctttttagacgttatcattttgcctcatgttggaggactttatggaatttaagaaatacattttgtgtgcatattgtttcatagcaagaattcgttgcaaaaatgctttatttttgaacaatgcttggaaatattatgtgacttttttgtttgtttgttttaggaggatggtgtatggtgggggcaataaatgaggttttttgcattccaaggaaatggcatatggattaactgtaagaaatgaaataagtaatttattgtaagacaacatcaagccatggaaacttggcagaagattcaaagcagcttaaacagcacttttaaattaactcctaagcgttacatggttgtgactatggaaactccagttaagacaggatcttatcagaggtggacaacgtgaagatttccttttccattttcaataaactttggaacaaccttctcgtatctcccctagagtttcgtgcccctctgaactgtctgttattgcaatgtagtttatcaacagaatttgtgtgttttcgatttaagctaaaagataatttaagaacatttatttccccttttcactttaaaaaattatgattattcctattattgttatgaaccttcttattttacatttgagggataaaggcaaatgatttgtgagtcttctagttactggaccgagttttctgctggatctggtgggaaggcagctcggtaaagtttccctcctgctccccccgcccgactttgactctgaatcagcatttggtcctattcagaggactcttaccacgacgtttctgttctacacttgggtggagaccagttgaccatagagcatttgcagagcctcattgtttgatttcttgtgactattctaagaatgaatgcaatcagattttaaaagtaactaaatatacttcagcacttttttgctttaaactagatcatcttagacttgtttataccttccagatttgattgttttactcccaatgactgcactatatgtatgcataagaccacttttgagcgctgtgttcccccttctgagtagtcctttgacgacgtgttgtgttttctgatgttgacttgagttccatttagtagcatctcttccttccatgtcttgatgttatgcaggaagtacagacgtactttaaatttttgttatgaaataaaaaaaagatgggttttgtaaaaataaaaaaaaaatatttttagcagaacaggacttacagggtcattgtccccacaatgtgccagtcgactatttgcacttaccttgtcctatatatccgtacggaggtgtgcaattcctcgtgtcagtagccttgtgacactgaacctggatggattatagaggagccctcacggctgatcaataatgttgcaaagggagactacagggatctcacgacgaatattctgatacaatactcaacctcggtatatatatatgtgtataaatatatgtatatcccagcggcactttatactgttcactgtacaaaagcttacagttttccacaaggactttaataactagctgggaaaagacgatgtaattatttcggggctctgcggaaccttctctgtacagcgccccctttctgttgtgctattggttgcagctgccatgctcagaatgcgttttgagagctgaagcaaggtgcttgcagtcacctgaggccgtccgtgtggcccagggccccagctgcctttagggcccccattgttcataacagcatatgcatttccccaccgcgttgtgtctgcagcttctttgccaatatagtaatgcttttagtagagtactagatagtatcagttttggattcttattgttatcacctatgtacaatggaaagggattttaagcacaaacctgctgctcatctaacgttggtacataatctcaaatcaaaagttatctgtgactattatatagggatcacaaaagtgtcacatattagaatgctgacctttcatatggattattgtgagtcatcagagtttattataacttattgttcatattcatttctaagttaatttaagtaatcatttattaagacagaattttgtataaactatttattgtgctctctgtggaactgaagtttgatttatttttgtactacacggcatgggtttgttgacactttaattttgctataaatgtgtggaatcacaagttgctgtgatacttcatttttaaattgtgaactttgtacaaattttgtcatgctggatgttaacacatcttactctaaataaacaaggtgttgccacatttgtagcacgaaggatctctaa

SEQ ID NO: 18946 - DNA, 3642 bp, Homo sapiens
  source 1..3642: mol_type = unassigned DNA
aagcgcctggaagcggaagctggacagacgaggagaggccttgggtgtgacatcaacggaacctgagggaagcaaaactcagcaaggacgcacccggtctgctggactggggctttggcctttcaggttgcccaagagcaaagaaaagtggtatcaggatagcacagagcaaagaagataaagaagatcaagaacccatcaggtgtccggtccccgggtgcgacggccagggccacatcactgggaagtacgcgtcccatcgcagcgcctccgggtgccccttggcggccaagaggcagaaagacgggtacctgaatggctcccagttctcctggaagtcggtcaagacggaaggcatgtcctgccccacgccaggatgcgacggctcaggccacgtcagcggcagcttcctcacacaccgcagcttgtcaggatgcccgagagccacgtcagcgatgaagaaggcaaagctttctggagagcagatgctgaccatcaaacagcgggccagcaacggtatagaaaatgatgaagaaatcaaacagttagatgaagaaatcaaggagctaaatgaatccaattcccagatggaagccgatatgattaaactcagaactcaggtaacaattaccacgatggagagcaacctgaagaccatcgaagaggagaacaaagtgattgagcagcagaacgagtctctcctccacgagctggcgaacctgagccagtctctgatccacagcctggctaacatccagctgccgcacatggatccaatcaatgaacaaaattttgatgcttacgtgactactttgacggaaatgtatacaaatcaagatcgttatcagagtccagaaaataaagccctactggaaaatataaagcaggctgtgagaggaattcaggtctgaacagctgctgtagtgatgaaactcttgcttaaaaaggatgcctcttgttttttgctgctgtaacttaccagaaagtgttctatatttatttctgtttgaatttgaaacagtgttatgcttacaagacttcataatgattttatgtcttgctttaaagatagtacctgcagaatagtttttgaatacacccacattttgtacgtttccatgtaagctgacatagtgttctgccatgtaatgtttatagctgctgatgtatgcacatttgggggtatatctatttctgaagaggtaagctgatcaaaataaatagagtgtaaattctttttaatgctttagtgattaaatgttttagtattttgaactgaaatggacacacaaacacacacacgcacacacagacccacagctttgaatgatcatgttgtggctgagcagccgctttttagacgttatcattttgcctcatgttggaggactttatggaatttaagaaatacattttgtgtgcatattgtttcatagcaagaattcgttgcaaaaatgctttatttttgaacaatgcttggaaatattatgtgacttttttgtttgtttgttttaggaggatggtgtatggtgggggcaataaatgaggttttttgcattccaaggaaatggcatatggattaactgtaagaaatgaaataagtaatttattgtaagacaacatcaagccatggaaacttggcagaagattcaaagcagcttaaacagcacttttaaattaactcctaagcgttacatggttgtgactatggaaactccagttaagacaggatcttatcagaggtggacaacgtgaagatttccttttccattttcaataaactttggaacaaccttctcgtatctcccctagagtttcgtgcccctctgaactgtctgttattgcaatgtagtttatcaacagaatttgtgtgttttcgatttaagctaaaagataatttaagaacatttatttccccttttcactttaaaaaattatgattattcctattattgttatgaaccttcttattttacatttgagggataaaggcaaatgatttgtgagtcttctagttactggaccgagttttctgctggatctggtgggaaggcagctcggtaaagtttccctcctgctccccccgcccgactttgactctgaatcagcatttggtcctattcagaggactcttaccacgacgtttctgttctacacttgggtggagaccagttgaccatagagcatttgcagagcctcattgtttgatttcttgtgactattctaagaatgaatgcaatcagattttaaaagtaactaaatatacttcagcacttttttgctttaaactagatcatcttagacttgtttataccttccagatttgattgttttactcccaatgactgcactatatgtatgcataagaccacttttgagcgctgtgttcccccttctgagtagtcctttgacgacgtgttgtgttttctgatgttgacttgagttccatttagtagcatctcttccttccatgtcttgatgttatgcaggaagtacagacgtactttaaatttttgttatgaaataaaaaaaagatgggttttgtaaaaataaaaaaaaaatatttttagcagaacaggacttacagggtcattgtccccacaatgtgccagtcgactatttgcacttaccttgtcctatatatccgtacggaggtgtgcaattcctcgtgtcagtagccttgtgacactgaacctggatggattatagaggagccctcacggctgatcaataatgttgcaaagggagactacagggatctcacgacgaatattctgatacaatactcaacctcggtatatatatatgtgtataaatatatgtatatcccagcggcactttatactgttcactgtacaaaagcttacagttttccacaaggactttaataactagctgggaaaagacgatgtaattatttcggggctctgcggaaccttctctgtacagcgccccctttctgttgtgctattggttgcagctgccatgctcagaatgcgttttgagagctgaagcaaggtgcttgcagtcacctgaggccgtccgtgtggcccagggccccagctgcctttagggcccccattgttcataacagcatatgcatttccccaccgcgttgtgtctgcagcttctttgccaatatagtaatgcttttagtagagtactagatagtatcagttttggattcttattgttatcacctatgtacaatggaaagggattttaagcacaaacctgctgctcatctaacgttggtacataatctcaaatcaaaagttatctgtgactattatatagggatcacaaaagtgtcacatattagaatgctgacctttcatatggattattgtgagtcatcagagtttattataacttattgttcatattcatttctaagttaatttaagtaatcatttattaagacagaattttgtataaactatttattgtgctctctgtggaactgaagtttgatttatttttgtactacacggcatgggtttgttgacactttaattttgctataaatgtgtggaatcacaagttgctgtgatacttcatttttaaattgtgaactttgtacaaattttgtcatgctggatgttaacacatcttactctaaataaacaaggtgttgccaca

SEQ ID NO: 18947 - DNA, 4850 bp, Homo sapiens
  source 1..4850: mol_type = unassigned DNA
tttctgcgtcttggtggcatgcatgtgtctcatcatcctttcaaacttgtggtggaacagggttttcttccctgtctgtgtattttgagccagcacagttaccaaaattgaacttgtctttcgcttgtgagcggttgtggtcattgtgagggcgggtcatgaggaggctgtagccaaggacgaggtgtgtgcggctgttgcctggacgtttgtccaatccacgttgacatttgagggatcacagcgtgtgaaaatgaactcagaggagaattggtgaattcctatccagtgggcatcttcaaaccctggtcgacggcggaagaatatcaggtcctgagatcacccacccggcgcggcaacagtgcagagtggccacatctggtggaagaagaaaaaaatgtagttattgaattcaatcaagtgtttgcatctttcaagctatcaacaaaattccatcaagaaaggttccagttggtctcacagacgtatggatatccgaggagccacctaaagatggagaaatcaaggcatagagagattaagtgactttgccacagtcacaagctggagaggaccaggagtagagcttagagcgagcccctgactctgggcctgcgtcctgccaggagtcacgctgcctccgttcctaggagagaagacttcctgtaagatggaggtggacaccgaggagaagcggcatcgcacgcggtccaaaggggttcgagttcccgtggaaccagccatacaagagctgttcagctgtcccacccctggctgtgacggcagtggtcatgtcagtggcaaatatgcaagacacagaagtgtatatggttgtcccttggcgaaaaaaagaaaaacacaagataaacagccccaggaacctgctcctaaacgaaagccatttgccgtgaaagcagacagctcctcagtggatgagtgtgacgacagtgatgggactgaggacatggatgagaaggaggaggatgagggggaggagtactccgaggacaatgatgagccaggggatgaggacgaggaggacgaggagggggaccgggaggaggaggaggagatcgaggaggaggatgaggacgatgacgaggatggagaagatgtggaggatgaagaagaggaagaggaggaggaggaggaggaggaagaggaagaagaaaacgaagaccatcaaatgaattgtcacaatactcgaataatgcaagacacagaaaaggatgataacaataatgacgaatatgacaattacgatgaactggtggccaagtcattgttaaacctcggcaaaatcgctgaggatgcagcctaccgggccaggactgagtcagaaatgaacagcaatacctccaatagtctggaagacgatagtgacaaaaacgaaaacctgggtcggaaaagtgagttgagtttagacttagacagtgatgttgttagagaaacagtggactcccttaaactattagcccaaggacacggtgttgtgctctcagaaaacatgaatgacagaaattatgcagacagcatgtcgcagcaagacagtagaaatatgaattacgtcatgttggggaagcccatgaacaacggactcatggaaaagatggtggaggagagcgatgaggaggtgtgtctgagcagtctggagtgtttgaggaatcagtgcttcgacctggccaggaagctcagtgagaccaacccgcaggagaggaatccgcagcagaacatgaacatccgtcagcatgtccggccagaagaggacttccccggaaggacgccggacagaaactactcggacatgctgaacctcatgcggctggaggagcagttgagcccccggtcgagagtgtttgccagctgtgcgaaggaggatgggtgtcatgagcgggacgacgataccacctctgtgaactcggacaggtctgaagaggtgttcgacatgaccaaggggaacctgaccctgctggagaaagccatcgctttggaaacggaaagagcaaaggccatgagggagaagatggccatggaagctgggaggagggacaatatgaggtcatatgaggaccagtctccgagacaacttcccggggaggacagaaagcctaaatccagtgacagccatgtcaaaaagccatactatgatccctcaagaacagaaaagaaagagagcaagtgtccaacccccgggtgtgatggaaccggccacgtaactgggctgtacccacatcaccgcagcctgtccggatgcccgcacaaagatagggtccctccagaaatccttgccatgcatgaaagtgtcctcaagtgccccactccgggctgcacggggcgcgggcatgtcaacagcaacaggaactcccaccgaagcctctccggatgcccgatcgctgcagcagagaaactggccaaggcacaggaaaagcaccagagctgcgacgtgtccaagtccagccaggcctcggaccgcgtgctcaggccaatgtgctttgtgaagcagctggagattcctcagtatggctacagaaacaatgtccccacaactacgccgcgttccaacctggccaaggagctcgagaaatattccaagacctcgtttgaatacaacagttacgacaaccatacttatggcaagcgagccatagctcccaaggtgcaaaccagggatatatcccccaaaggatatgatgatgcgaagcggtactgcaaggaccccagccccagcagcagcagcaccagcagctacgcgcccagcagcagcagcaacctgagctgcggcgggggcagcagcgccagcagcacgtgcagcaagagcagcttcgactacacgcacgacatggaggcggcccacatggcggccaccgccatcctcaacctgtccacgcgctgccgcgagatgccgcagaacctgagcaccaagccgcaggacctgtgcgccacgcggaaccctgacatggaggtggatgagaacgggaccctggacctcagcatgaacaagcagaggccgcgggacagctgctgccccatcctgacccctctggagcccatgtccccccagcagcaggcagtgatgaacaaccggtgtttccagctgggcgagggcgactgctgggacttgcccgtagactacaccaaaatgaaaccccggaggatagacgaggacgagtccaaagacattactccagaagacttggacccattccaggaggctctagaagaaagacggtatcccggggaggtgaccatcccaagtcccaaacccaagtaccctcagtgcaaggagagcaaaaaggacttaataactctgtctggctgccccctggcggacaaaagcattcgaagtatgctggccaccagctcccaagaactcaagtgccccacgcctggctgtgatggttctggacatatcaccggcaattatgcttctcatcggagcctttcaggttgcccaagagcaaagaaaagtggtatcaggatagcacagagcaaagaagataaagaagatcaagaacccatcaggtgtccggtccccgggtgcgacggccagggccacatcactgggaagtacgcgtcccatcgcagcgcctccgggtgccccttggcggccaagaggcagaaagacgggtacctgaatggctcccagttctcctggaagtcggtcaagacggaaggcatgtcctgccccacgccaggatgcgacggctcaggccacgtcagcggcagcttcctcacacaccgcagcttgtcaggatgcccgagagccacgtcagcgatgaagaaggcaaagctttctggagagcagatgctgaccatcaaacagcgggccagcaacggtatagaaaatgatgaagaaatcaaacagttagatgaagaaatcaaggagctaaatgaatccaattcccagatggaagccgatatgattaaactcagaactcagattaccacgatggagagcaacctgaagaccatcgaagaggagaacaaagtgattgagcagcagaacgagtctctcctccacgagctggcgaacctgagccagtctctgatccacagcctggctaacatccagctgccgcacatggatccaatcaatgaacaaaattttgatgcttacgtgactactttgacggaaatgtatacaaatcaagatcgttatcagagtccagaaaataaagccctactggaaaatataaagcaggctgtgagaggaattcaggtctgaacagctgctgtagtgatgaaactcttgcttaaaaaggatgcctcttgttttttgctgctgtaacttaccagaaagtgttctatatttatttctgtttgaatttgaaacagtgttatgcttacaagacttcataatgattttatgtcttgctttaaagatagtacctgcagaatagtttttgaatacacccacattttgtacgtttccatgtaagctgacatagtgttctgccatgtaatgtttatagctgctgatgtatgcacatttgggggtatatctatttctgaagaggtaagctgatcaaaataaatagagtgtaaattctttttaatgctttagtgattaaatgttttagtattttgaactgaaatggacacacaaacacacacacgcacacacagacccacagctttgaatgatcatgttgtggctgagcagccgctttttagacgttatcattttgcctcatgttggaggactttatggaatttaagaaatacattttgtgtgcatattgtttcatagcaagaattcgttgcaaaaatgctttatttttgaacaatgcttggaaatattatgtgacttttttgtttgtttgttttaggaggatggtgtatggtggggg

SEQ ID NO: 18948 - DNA, 802 bp, Homo sapiens
  source 1..802: mol_type = unassigned DNA
aagtggatcttcgctgaggactcatcaaaaacaccttgtgtaatgaaaaacccagatctataacctctccctatatattctgcatgcattgaagtaggctcaaaccctcagggacctggtatagacgcagaatctgtttcacacaacaactgctatttgaaggaaaaaaaaaaaaagaagcaaatgataccaagacaagctcataacagagatccaatcagcagatgtgtacggatgaaaatacagtgagatgagtcagaaaccggccaaggagggtcccagactctccaaaaaccagaagtactccgaacacttcagcatacactgctgcccgccgttcaccttcctcaattccaagaaggagatagtggatcggaaatacagcatctgtaagagcggctgcttctaccagaagaaagaggaggactggatctgctgcgcctgccagaagaccagaaccagccgccgtgccaagtcccctcagaggcccaagcaacagccagctgcgccccccgcggtggtcagagcgccagccaagccacggtcccctccgaggtctgagcgtcagccacggtcccctccgaggtctgagcgtcagccacggtcccctccgaggtctgagcgtcagccacggtcccctccgaggtctgagcgtcagccacgtccccgcccagaggtccgaccaccgccagccaagcagcgtccccctcagaagtccaagcaacagccgcgcagcagccccctcagagggccaggcgccagccgtggggggtcccccgtcaaagcttctaggttctggtaa

SEQ ID NO: 18949 - DNA, 3051 bp, Homo sapiens
  source 1..3051: mol_type = unassigned DNA
aaaaacaccttgtgtaatgaaaaacccagatctataacctctccctatatattctgcatgcattgaagtaggctcaaaccctcagggacctggtatagacgcagaatctgtttcacacaacaactgctatttgaaggaaaaaaaaaaaaagaagcaaatgataccaagacaagctcataacagagatccaatcagcagatgtgtacggatgaaaatacagtgagatgagtcagaaaccggccaaggagggtcccagactctccaaaaaccagaagtactccgaacacttcagcatacactgctgcccgccgttcaccttcctcaattccaagaaggagatagtggatcggaaatacagcatctgtaagagcggctgcttctaccagaagaaagaggaggactggatctgctgcgcctgccagaagaccagattgaaaaggaagatcaggccaaccccaaagaagaagtgaccaaggaggagtttaaactgaatgaacaacctcggctcctggactcattgcttcacaacccatctacccctggatgaagttatctggcttcaaatattatgcaggggcaaacacctgctgatgtggcaactgctgatgctcatggtccccatggcatgggggcctcagggcagcctgcctggaggtgagcagggctatctctgtgtgttgtactccagtcagggggttccagcagcacccgcaggctctagagctcaatgcacagttctttttgtttcacctgcagtcctttcttctccaggatatgcacaggcctccagggtctttcatggctcagggtcagggtggctcaagtgccaacccacatgttgtcctccaaatattcccttctatccctggcatgctgttgctgagctcaacttttaatttttgactttctcctttgtaattaatctctatctgggtttctctctttctctgtgccatttggtttccttaattagttccctgtgccagcccatagtcagagccataattggctctggggaagatccaagttattttctgagtaagatattaggcttccatatgatccagagatgcaaagaaatccctagagagtgtaggagttgtctaaatccatgtgtcagatgtagccaacgaattatgtcagaagcagagagaaaaggcctgaaaagcagctctctcccactcctcaggcccttgtctccaaccttacatgaggctttttgaacatctcctcctggcccagctggggtgagagcaagtcctcgaaggcactgcctttgagccttgctcagcccatctgaactatcccaactctagaattgactgctttcgaattgtgtgaccttgggaatgttatctggcttcaaccacaatgccctacccccagctcctctcccaaatgatcctagatacagggctgcttccccccgaccctaccccacctcgggacacaggctcatggcctcatggcacttcaccaccagaagtggtgctcagagttcctatttccacatctaaccccctaattcctgggaaagtctgaggcctggtccccccagtgctttccctggctggcctctccacattttcatctgatggtggagtgagatcaggaaaaataggacaggagctttgccttgggggagaagagagttaagtgtggaaaggggtgagttataggaggttaagcagtccaagatttctctctctgtgtaggaggccatttcctgatgtgaggggtctgaacccaattatgatgggacagggttgggcattgacttcccatctcttctctctgtttttctcccactatctgtagcccaaaactcttatggaggactttgatctttagtataggctattggtcagggccataggaactaaccccgatcctcactccaccaggatctaccacatcccctacacacaaacacatgctgtggggagggagttttcccctgggtcaagttgaggatccttagatcaccttgtgctcctgtggactggtgtgtgcgtgtgtgtgtgtgtgtgtgtgtgtgtgtgtgtgtgtgtgtgtgtgtgtgtatgttgggaaacttagctttcagagaatgtctatgggctctcattttctctctcacacaaaaatactcgggacttctccaagtccctgaggagcctgaccactgaagctgatcatgagatgactgtatgctgacacacccccttcaggggcctggccttgacttagggctgcactgtatcctcagcaacggccttgcaggagccccttttggactgctttccctattcagcccagagttggggtggtgggagaagaggggttggagtgaatccatctctattcaaattccagctgggattactctaggagtcttcctggcttgttttgggcccaaacttagctacattgtttattggctcccaaagtcgggattgaagagtgaaaagatgcaggcaatgaatccttctgcacactcctccccaacctttccagcgcttttctacttaggaggccagtggaagggaggagaggccatgccctagcccacaggggacaaggttcattgttcttccaggcttggttcactctgcttttgattcagaagctctttccctacccagcaagactacactttcttgccttctttctattttttctttttgtgcgtataaatggtatgttgtgatatattctcagtgcttgtgcccaccttggaactctgttcttgctcttcattccgcatgtgatactctggtccaagatcttggccaggtgccttctgctcaaatatcgtctcagaggtgcttcccttgaaaactcggtgctgtttccatagttactctatttgatcactctaagtttggttgtcttcatagcacttgtcaccctctggaactattctattcatttatttacttgtttaatgcttggctcttttcccctcctaacgtaaactccatgattgccaacacctgtttacttactacagttccccctccccccacattcctgacactagtaagaaccaataaacacttgttgacggaa

SEQ ID NO: 18950 - DNA, 1714 bp, Homo sapiens
  source 1..1714: mol_type = unassigned DNA
tcagcagatgtgtacggatgaaaatacagtgagatgagtcagaaaccggccaaggagggtcccagactctccaaaaaccagaagtactccgaacacttcagcatacactgctgcccgccgttcaccttcctcaattccaagaaggagatagtggatcggaaatacagcatctgtaagagcggctgcttctaccagaagaaagaggaggactggatctgctgcgcctgccagaagaccagattgaaaaggaagatcaggccaaccccaaagaagaagtgaccaaggaggagtttaaactgaatgaacaacctcggctcctggactcattgcttcacaacccatctacccctggatgaagttatctggcttcaaatattatgcaggggcaaacacctgctgatgtggcaactgctgatgctcatggtccccatggcatgggggcctcagggcagcctgcctggagtactttgaagatgtcatcccattgtcttctgacctctataattgccactgagagatctgctgtcagtctgcttatccttccacggactcaagtttcttcaatctgaagatacatgtctttctccagggacatgtggaaaaaaaaaagatgttatacaaccatcaaagtggcaaaaataaaaaaaatcaagtattggcaaagatgtggggaaaattctcataagctactgatgagaatttataaattattatgacacctttgggttgcaatctggggatactggcaaagcagaaaattgtacaacctgtgatcaagcaataataattttaggcacccatcctagagaaaacttgaattcatagaaaaagtaggtacacgtaaatctgttcaaggaatcattgtttggcattgaaaataggagagagatcatgagaaattaccaaaatgtccaccaatagaatgagtgaatcacctgtggtatatttataaataaaaatattaaatagaaggtaaaacaaatcagacatacacacattagatagataaatttagaggacaaaataaggaacatgaaaagcaaatagtagatggcaaatgtaatataatatactatgcataaattttaacaacacacaatattatattgcatattgcccaataagcagaagccataaggtctcacacttttcttataatgcaatagaataaaaatgacaacaaagtaaaagggtatcccaaaaataaaactatccttttggaaaaaaaaagatttaaaataattcctggtttgaagaaataacaaattaaaagctatatataaacggttaacaatattaggtggacatatttgtttgaagagataggtgaaagatagttgaaaagcctgggggtatattcaaggttatatgtcttagaaaacaaaaatacttgtttgggttcagttttggatctgggcttgttcttgtggcttctgatgatttctgacttggggaaaaatggggaagagttgaaatacgtccttccacccaaacctttgtttagtaataggtaggaaaatgaagaagaaaatagaatgttgcagaatgtggagggatgtaaaatggacagtactagggtagaggggaagtcagattagaggaaagaaagagcatcaggaacagtcttgtgctaggagctggtgtggccaagcacagtcggatgcccaaagatccaacaaggccatggctctgtgtccttgagtgggcacaacca

SEQ ID NO: 18951 - DNA, 577 bp, Homo sapiens
  source 1..577: mol_type = unassigned DNA
aaaaacaccttgtgtaatgaaaaacccagatctataacctctccctatatattctgcatgcattgaagtaggctcaaaccctcagggacctggtatagacgcagaatctgtttcacacaacaactgctatttgaagcttgaaggcaggtccacgcctcctcctggaagccttcccttgactgactcctcgctgagttcacagtgagatgagtcagaaaccggccaaggagggtcccagactctccaaaaaccagaagtactccgaacacttcagcatacactgctgcccgccgttcaccttcctcaattccaagaaggagatagtggatcggaaatacagcatctgtaagagcggctgcttctaccagaagaaagaggaggactggatctgctgcgcctgccagaagaccagattgaaaaggaagatcaggccaaccccaaagaagaagtgaccaaggaggagtttaaactgaatgaacaacctcggctcctggactcattgcttcacaacccatctacccctggatgaagttatctggcttcaaatattatgcaggggcaaacacctgctgatgtg

SEQ ID NO: 18952 - DNA, 940 bp, Homo sapiens
  source 1..940: mol_type = unassigned DNA
aaaaacaccttgtgtaatgaaaaacccagatctataacctctccctatatattctgcatgcattgaagtaggctcaaaccctcagggacctggtatagacgcagaatctgtttcacacaacaactgctatttgaaggaaaaaaaaaaaaagaagcaaatgataccaagacaagctcataacagagatccaatcagcagatgtgtacggatgaaaatacagtgagatgagtcagaaaccggccaaggagggtcccagactctccaaaaaccagaagtactccgaacacttcagcatacactgctgcccgccgttcaccttcctcaattccaagaaggagatagtggatcggaaatacagcatctgtaagagcggctgcttctaccagaagaaagaggaggactggatctgctgcgcctgccagaagaccagaaccagccgccgtgccaagtcccctcagaggcccaagcaacagccagctgcgccccccgcggtggtcagagcgccagccaagccacggtcccctccgaggtctgagcgtcagccacggtcccctccgaggtctgagcgtcagccacggtcccctccgaggtctgagcgtcagccacggtcccctccgaggtctgagcgtcagccacgtccccgcccagaggtccgaccaccgccagccaagcagcgtccccctcagaagtccaagcaacagccgcgcagcagccccctcagagggccaggcgccagccgtggggggtcccccgtcaaagcttctaggttctggtaacaccatctcttcccttttgttccccagccctaagattgaaaaggaagatcaggccaaccccaaagaagaagtgaccaaggaggagtttaaactgaatgaacaacctcggctcctggactcattgcttcacaacccatctacccctggatgaagttatctggctt

SEQ ID NO: 18953 - DNA, 1340 bp, Homo sapiens
  source 1..1340: mol_type = unassigned DNA
cagtgagatgagtcagaaaccggccaaggagggtcccagactctccaaaaaccagaagtactccgaacacttcagcatacactgctgcccgccgttcaccttcctcaattccaagaaggagatagtggatcggaaatacagcatctgtaagagcggctgcttctaccagaagaaagaggaggactggatctgctgcgcctgccagaagaccagaaccagccgccgtgccaagtcccctcagaggcccaagcaacagccagctgcgccccccgcggtggtcagagcgccagccaagccacggtcccctccgaggtctgagcgtcagccacggtcccctccgaggtctgagcgtcagccacggtcccctccgaggtctgagcgtcagccacggtcccctccgaggtctgagcgtcagccacgtccccgcccagaggtccgaccaccgccagccaagcagcgtccccctcagaagtccaagcaacagccgcgcagcagccccctcagagggccaggcgccagccgtggggggtcccccgtcaaagcttctaggttctggtaacaccatctcttcccttttgttccccagccctaagattgaaaaggaagatcaggccaaccccaaagaagaagtgaccaaggaggagtttaaactgaatgaacaacctcggctcctggactcattgcttcacaacccatctacccctggatgaagttatctggcttcaaatattatgcaggggcaaacacctgctgatgtggcaactgctgatgctcatggtccccatggcatgggggcctcagggcagcctgcctggagtactttgaagatgtcatcccattgtcttctgacctctataattgccactgagagatctgctgtcagtctgcttatccttccacggactcaagtttcttcaatctgaagatacatgtctttctccagggacatgtggaaaaaaaaaagatgttatacaaccatcaaagtggcaaaaataaaaaaaatcaagtattggcaaagatgtggggaaaattctcataagctactgatgagaatttataaattattatgacacctttgggttgcaatctggggatactggcaaagcagaaaattgtacaacctgtgatcaagcaataataattttaggcacccatcctagagaaaacttgaattcatagaaaaagtaggtacacgtaaatctgttcaaggaatcattgtttggcattgaaaataggagagagatcatgagaaattaccaaaatgtccaccaatagaatgagtgaatcacctgtggtatatttataaataaaaatattaaatagaaggtaaaacaaatcag

SEQ ID NO: 18954 - DNA, 561 bp, Homo sapiens
  source 1..561: mol_type = unassigned DNA
aaaaacaccttgtgtaatgaaaaacccagatctataacctctccctatatattctgcatgcattgaagtaggctcaaaccctcagggacctggtatagacgcagaatctgtttcacacaacaactgctatttgaaggaaaaaaaaaaaaagaagcaaatgataccaagacaagctcataacagagatccaatcagcagatgtgtacggatgaaaatacagcttgaaggcaggtccacgcctcctcctggaagccttcccttgactgactcctcgctgagttcacagtgagatgagtcagaaaccggccaaggagggtcccagactctccaaaaaccagaagtactccgaacacttcagcatacactgctgcccgccgttcaccttcctcaattccaagaaggagatagtggatcggaaatacagcatctgtaagagcggctgcttctaccagaagaaagaggaggactggatctgctgcgcctgccagaagaccagattgaaaaggaagatcaggccaaccccaaagaagaagtgaccaaggaggagtttaaactgaatga

SEQ ID NO: 18955 - DNA, 830 bp, Homo sapiens
  source 1..830: mol_type = unassigned DNA
aaaccctcagggacctggtatagacgcagaatctgtttcacacaacaactgctatttgaagcttgaaggcaggtccacgcctcctcctggaagccttcccttgactgactcctcgctgagttcacagtgagatgagtcagaaaccggccaaggagggtcccagactctccaaaaaccagaagtactccgaacacttcagcatacactgctgcccgccgttcaccttcctcaattccaagaaggagatagtggatcggaaatacagcatctgtaagagcggctgcttctaccagaagaaagaggaggactggatctgctgcgcctgccagaagaccagaaccagccgccgtgccaagtcccctcagaggcccaagcaacagccagctgcgccccccgcggtggtcagagcgccagccaagccacggtcccctccgaggtctgagcgtcagccacggtcccctccgaggtctgagcgtcagccacggtcccctccgaggtctgagcgtcagccacggtcccctccgaggtctgagcgtcagccacgtccccgcccagaggtccgaccaccgccagccaagcagcgtccccctcagaagtccaagcaacagccgcgcagcagccccctcagagggccaggcgccagccgtggggggtcccccgtcaaagcttctaggttctggtaacaccatctcttcccttttgttccccagccctaaggttagtagttgcttcctgtgtttactaacaccgggctgtctccatggccctcttcagccttattacccaacctgtgtaatcagctccctccattaaatcccctctgtttgaaa

SEQ ID NO: 18956 - DNA, 566 bp, Homo sapiens
  source 1..566: mol_type = unassigned DNA
aaaaacaccttgtgtaatgaaaaacccagatctataacctctccctatatattctgcatgcattgaagtaggctcaaaccctcagggacctggtatagacgcagaatctgtttcacacaacaactgctatttgaagtgagatgagtcagaaaccggccaaggagggtcccagactctccaaaaaccagaagtactccgaacacttcagcatacactgctgcccgccgttcaccttcctcaattccaagaaggagatagtggatcggaaatacagcatctgtaagagcggctgcttctaccagaagaaagaggaggactggatctgctgcgcctgccagaagaccagattgaaaaggaagatcaggccaaccccaaagaagaagtgaccaaggaggagtttaaactgaatgaacaacctcggctcctggactcattgcttcacaacccatctacccctggatgaagttatctggcttcaaatattatgcaggggcaaacacctgctgatgtggcaactgctgatgctcatggtccccatggcatgggggcctcagggcagcctgcct

SEQ ID NO: 18957 - DNA, 567 bp, Homo sapiens
  source 1..567: mol_type = unassigned DNA
gtggtttggtagggtgagctggtgtgtggtgtggttggacctggcatggaacttaactggagtttatgtggaatgaaccttgagggccttttgtttaaactttgtgtggcctttttgtagtctttgtgtagcttttgtttttaagtggatcttcgctgaggactcatcaaaaacaccttgtgtaatgaaaaacccagatctataacctctccctatatattctgcatgcattgaagtaggctcaaaccctcagggacctggtatagacgcagaatctgtttcacacaacaactgctatttgaaggaaaaaaaaaaaaagaagcaaatgataccaagacaagctcataacagagatccaatcagcagatgtgtacggatgaaaatacagtgagatgagtcagaaaccggccaaggagggtcccagactctccaaaaaccagaagtactccgaacacttcagcatacactgctgcccgccgttcaccttcctcaattccaagaaggagatagtggatcggaaatacagcatctgtaagagcggctgcttctaccagaagaaagaggagg

SEQ ID NO: 18958 - DNA, 1029 bp, Homo sapiens
  source 1..1029: mol_type = unassigned DNA
gtactagctgtcagctgctggagaccttgctttctgtttcactgggaaacagaagcaatcagaaggaaacttcctcagactccacctctcccttcactcccgcctgtatccgtgcctgttacctggacgccttgtggaacttgaattctacgccctccactgggacactgcccttcatcctctctcacctcctccaggacaacactctctctgtggggctttcacccccatcgctccactgaaactgctcttgtcaaggtcatcgatgacctcccgctgacaaactcaactgtcccatctctacaccccaaactgacccatcaggaatagcatgagctccaccttccaaagcttccgcaatctcaccgtctccaccgttactacctgtgtccgaggcaccactgtttcttgcctggagttgtagacgggatttcaccgtgttagccaggatggtctcgatctcctgacctcgtgatccgcctgtctcgacctcccaaagtgctgggattacagaatgttgtagtcctcatcatcagcagagactttgtgccatcctctgctatattatcctgaagagtgcctggctcatgctccaggctgcggattttattgagagaacggagactgctggtgaactctcaagagggttaattggagttttatcaagccagatttcatggtgtctgcttaatgttaatctctccaagcttcccaccagactgcaaaggctgagctgcagtgttctgaatagcagtccagctatgaggggaggtgcccgtggcaggcctcagctgaccctggagaggccattaagacctggctgtcgcctccacagctgctcggaggcagagaaaggtggctttgtaagaagaaaagagatcattctttttccaccatgtgaggacccagcaagagggtggctgtctgcaaacccagggagagagccctcaccaggaatctgctggcaccttaatcttggacttcccagcctccacaactgtgaggaataaatgtatgttgtttaagcca

SEQ ID NO: 18959 - DNA, 1110 bp, Homo sapiens
  source 1..1110: mol_type = unassigned DNA
atgtttggcctcaaaagaaacgcggtaatcggactcaacctctactgtgggggggccggcttgggggccggcagcggcggcgccacccgcccgggagggcgacttttggctacggagaaggaggcctcggcccggcgagagatagggggaggggaggccggcgcggtgattggcggaagcgccggcgcaagccccccgtccaccctcacgccagactcccggagggtcgcgcggccgccgcccattggcgccgaggtccccgacgtcaccgcgacccccgcgaggctgcttttcttcgcgcccacccgccgcgcggcgccgcttgaggagatggaagccccggccgctgacgccatcatgtcgcccgaagaggagctggacgggtacgagccggagcctctcgggaagcggccggctgtcctgccgctgctggagttggtcggggaatctggtaataacaccagtacggacgggtcactaccctcgacgccgccgccagcagaggaggaggaggacgagttgtaccggcagtcgctggagattatctctcggtaccttcgggagcaggccaccggcgccaaggacacaaagccaatgggcaggtctggggccaccagcaggaaggcgctggagaccttacgacgggttggggatggcgtgcagcgcaaccacgagacggccttccaaggatgggtttgtggagttcttccatgtagaggacctagaaggtggcatcaggaatgtgctgctggcttttgcaggtgttgctggagtaggagctggtttggcatatctaataagatagccttactgtaagtgcaatagttgacttttaaccaaccaccaccaccaccaaaaccagtttatgcagttggactccaagctgtaacttcctagagttgcaccctagcaacctagccagaaaagcaagtggcaagaggattatggctaacaagaataaatacatgggaagagtgctccccattgattgaagagtcactgtctgaaagaagcaaagttcagtttcagcaacaaacaaactttgtttgggaagctatggaggaggacttttagatttagtgaagatggtagggtggaaagacttaattt

SEQ ID NO: 18960 - DNA, 3932 bp, Homo sapiens
  source 1..3932: mol_type = unassigned DNA
tccagtaaggagtcggggtcttccccagttttctcagccaggcggcggcggcgactggcaatgtttggcctcaaaagaaacgcggtaatcggactcaacctctactgtgggggggccggcttgggggccggcagcggcggcgccacccgcccgggagggcgacttttggctacggagaaggaggcctcggcccggcgagagatagggggaggggaggccggcgcggtgattggcggaagcgccggcgcaagccccccgtccaccctcacgccagactcccggagggtcgcgcggccgccgcccattggcgccgaggtccccgacgtcaccgcgacccccgcgaggctgcttttcttcgcgcccacccgccgcgcggcgccgcttgaggagatggaagccccggccgctgacgccatcatgtcgcccgaagaggagctggacgggtacgagccggagcctctcgggaagcggccggctgtcctgccgctgctggagttggtcggggaatctggtaataacaccagtacggacgggtcactaccctcgacgccgccgccagcagaggaggaggaggacgagttgtaccggcagtcgctggagattatctctcggtaccttcgggagcaggccaccggcgccaaggacacaaagccaatgggcaggtctggggccaccagcaggaaggcgctggagaccttacgacgggttggggatggcgtgcagcgcaaccacgagacggccttccaaggcatgcttcggaaactggacatcaaaaacgaagacgatgtgaaatcgttgtctcgagtgatgatccatgttttcagcgacggcgtaacaaactggggcaggattgtgactctcatttcttttggtgcctttgtggctaaacacttgaagaccataaaccaagaaagctgcatcgaaccattagcagaaagtatcacagacgttctcgtaaggacaaaacgggactggctagttaaacaaagaggctgggatgggtttgtggagttcttccatgtagaggacctagaaggtggcatcaggaatgtgctgctggcttttgcaggtgttgctggagtaggagctggtttggcatatctaataagatagccttactgtaagtgcaatagttgacttttaaccaaccaccaccaccaccaaaaccagtttatgcagttggactccaagctgtaacttcctagagttgcaccctagcaacctagccagaaaagcaagtggcaagaggattatggctaacaagaataaatacatgggaagagtgctccccattgattgaagagtcactgtctgaaagaagcaaagttcagtttcagcaacaaacaaactttgtttgggaagctatggaggaggacttttagatttagtgaagatggtagggtggaaagacttaatttccttgttgagaacaggaaagtggccagtagccaggcaagtcatagaattgattacccgccgaattcattaatttactgtagtgttaagagaagcactaagaatgccagtgacctgtgtaaaagttacaagtaatagaactatgactgtaagcctcagtactgtacaagggaagcttttcctctctctaattagctttcccagtatacttcttagaaagtccaagtgttcaggacttttatacctgttatactttggcttggtttccatgattcttactttattagcctagtttatcaccaataatacttgacggaaggctcagtaattagttatgaatatggatatcctcaattcttaagacagcttgtaaatgtatttgtaaaaattgtatatatttttacagaaagtctatttctttgaaacgaaggaagtatcgaatttacattagtttttttcatacccttttgaactttgcaacttccgtaattaggaacctgtttcttacagcttttctatgctaaactttgttctgttcagttctagagtgtatacagaacgaattgatgtgtaactgtatgcagactggttgtagtggaacaaatctgataactatgcaggtttaaattttcttatctgattttggtaagtattccttaggtttttctttgaaaacctgggattgagaggttgatgaatggaaattctttcacttcattatatgcaagttttcaataattaggtctaagtggagttttaaggttactgatgacttacaaataatgggctctgattgggcaatactcatttgagttccttccatttgacctaatttaactggtgaaatttaaagtgaattcatgggctcatctttaaagcttttactaaaagattttcagctgaatggaactcattagctgtgtgcatataaaaagatcacatcaggtggatggagagacatttgatcccttgtttgcttaataaattataaaatgatggcttggaaaagcaggctagtctaaccatggtgctattattaggcttgcttgttacacacacaggtctaagcctagtatgtcaataaagcaaatacttactgttttgtttctattaatgattcccaaaccttgttgcaagtttttgcattggcatctttggatttcagtcttgatgtttgttctatcagacttaaccttttatttcctgtccttccttgaaattgctgattgttctgctccctctacagatatttatatcaattcctacagctttcccctgccatccctgaactctttctagcccttttagattttggcactgtgaaacccctgctggaaacctgagtgaccctccctccccaccaagagtccacagacctttcatctttcacgaacttgatcctgttagcaggtggtaataccatgggtgctgtgacactaacagtcattgagaggtgggaggaagtcccttttccttggactggtatcttttcaactattgttttatcctgtctttgggggcaatgtgtcaaaagtcccctcaggaattttcagaggaaagaacattttatgaggctttctctaaagtttcctttgtataggagtatgctcacttaaatttacagaaagaggtgagctgtgttaaacctcagagtttaaaagctactgataaactgaagaaagtgtctatattggaactagggtcatttgaaagcttcagtctcggaacatgacctttagtctgtggactccatttaaaaataggtatgaataagatgactaagaatgtaatggggaagaactgccctgcctgcccatctcagagccataaggtcatctttgctagagctatttttacctatgtatttatcgttcttgatcataagccgcttatttatatcatgtatctctaaggacctaaaagcactttatgtagtttttaattaatcttaagatctggttacggtaactaaaaaagcctgtctgccaaatccagtggaaacaagtgcatagatgtgaattggtttttaggggccccacttcccaattcattaggtatgactgtggaaatacagacaaggatcttagttgatattttgggcttggggcagtgagggcttaggacaccccaagtggtttgggaaaggaggaggggagtggtgggtttatagggggaggaggaggcaggtggtctaagtgctgactggctacgtagttcgggcaaatcctccaaaagggaaagggaggatttgcttagaaggatggcgctcccagtgactactttttgacttctgtttgtcttacgcttctctcagggaaaaacatgcagtcctctagtgtttcatgtacattctgtggggggtgaacaccttggttctggttaaacagctgtacttttgatagctgtgccaggaagggttaggaccaactacaaattaatgttggttgtcaaatgtagtgtgtttccctaactttctgtttttcctgagaaaaaaaaataaatcttttattcaaata

SEQ ID NO: 18961 - DNA, 1193 bp, Homo sapiens
  source 1..1193: mol_type = unassigned DNA
gcttccttccagtaaggagtcggggtcttccccagttttctcagccaggcggcggcggcgactggcaatgtttggcctcaaaagaaacgcggtaatcggactcaacctctactgtgggggggccggcttgggggccggcagcggcggcgccacccgcccgggagggcgacttttggctacggagatggaagccccggccgctgacgccatcatgtcgcccgaagaggagctggacgggtacgagccggagcctctcgggaagcggccggctgtcctgccgctgctggagttggtcggggaatctggtaataacaccagtacggacgggtcactaccctcgacgccgccgccagcagaggaggaggaggacgagttgtaccggcagtcgctggagattatctctcggtaccttcgggagcaggccaccggcgccaaggacacaaagccaatgggcaggtctggggccaccagcaggaaggcgctggagaccttacgacgggttggggatggcgtgcagcgcaaccacgagacggccttccaaggcatgcttcggaaactggacatcaaaaacgaagacgatgtgaaatcgttgtctcgagtgatgatccatgttttcagcgacggcgtaacaaactggggcaggattgtgactctcatttcttttggtgcctttgtggctaaacacttgaagaccataaaccaagaaagctgcatcgaaccattagcagaaagtatcacagacgttctcgtaaggacaaaacgggactggctagttaaacaaagaggctgggatgggtttgtggagttcttccatgtagaggacctagaaggtggcatcaggaatgtgctgctggcttttgcaggtgttgctggagtaggagctggtttggcatatctaataagatagccttactgtaagtgcaatagttgacttttaaccaaccaccaccaccaccaaaaccagtttatgcagttggactccaagctgtaacttcctagagttgcaccctagcaacctagccagaaaagcaagtggcaagaggattatggctaacaagaataaatacatgggaagagtgctccccattgattgaagagtcactgtctgaaagaagcaaagttcagtttcagcaacaaacaaactttgtttgggaagctatggaggaggacttttagatttagtgaagatggta

SEQ ID NO: 18962 - DNA, 1752 bp, Homo sapiens
  source 1..1752: mol_type = unassigned DNA
attacataacttctttctagttaggaattaggacagtgtaagaaggccatctacaatcaagattgagagtggctctaacaagtgccatttttccttgttagctttcatttctcagccctttacaagattaaaatagtctgcagtttaatctctccaaagctttacggacagtgattctgtcctaaacaagacagtgactccaggatttctgaagactattgtggaagaagcatccattaaggccaagctataacatcagaaatggtgaatgaatacaagaaaattcttttgctgaaaggatttgagctcatggatgattatcattttacatcaattaagtccttactggcctatgatttaggactaactacaaaaatgcaagaggaatacaacagaattaagattacagatttgatggaaaaaaagttccaaggcgttgcctgtctagacaaactaatagaacttgccaaagatatgccatcacttaaaaaccttgttaacaatcttcgaaaagagaagtcaaaagttgctaagaaaattaaaacacaagaaaaagctccagtgaaaaaaataaaccaggaagaagtgggtcttgcggcacctgcacccaccgcaagaaacaaactgacatcggaagcaagagggaggattcctgtagctcagaaaagaaaaactccaaacaaagaaaagactgaagccaaaaggaataaggtgtcccaagagcagagtaagcccccaggtccctcaggagccagcacatctgcagctgtggatcatcccccactaccccagacctcatcatcaactccatccaacacttcgtttactccgaatcaggaaacccaggcccaacggcaggtggatgcaagaagaaatgttccccaaaacgacccagtgacagtggtggtactgaaagcaacagcgccatttaaatacgagtccccagaaaatgggaaaagcacaatgtttcatgctacagtggccagtaagactcaatatttccatgtgaaagtcttcgacatcaacttgaaagagaaatttgtaaggaagaaggtcattaccatatctgattactctgaatgtaaaggagtaatggaaataaaggaagcatcatctgtgtctgactttaatcaaaattttgaggtcccaaacagaattatcgaaatagcaaataaaactcccaagatcagtcaactttacaagcaagcatctggaacaatggtgtatgggttgtttatgttacaaaagaaaagcgtacacaagaagaacacaatttatgaaatacaggataatacaggatccatggatgtagtggggagtggaaaatggcacaatatcaagtgtgagaaaggagataaacttcgactcttctgccttcaactgagaacagttgaccgcaagctgaaactggtgtgtggaagtcacagcttcatcaaggtcatcaaggccaagaaaaacaaggaaggaccaatgaatgttaattgaaatatgaaagctgaaatgcaacaaacaacttccgcttaaaacaattaagttgttaataactgtgattttgtaaatttcagtaattcatttaaatgatgtttcagtagatatattctagcatattaagagcttttataactgagttatagattagtttgctttctggaataaaattttcttcttatactcttccttttttttagatattacattttgcttttatgacattcacgaggcaaaaaataaaatatctttttttgaaggaca

SEQ ID NO: 18963 - DNA, 582 bp, Homo sapiens
  source 1..582: mol_type = unassigned DNA
cccaaacagaattatcgaaatagcaaataaaactcccaagatcagtcaactttacaagcaagcatctggaacaatggtgtatgggttgtttatgttacaaaagaaaagcgtacacaagaagaacacaatttatgaaatacaggataatacaggatccatggatgtagtggggagtggaaaatggcacaatatcaagtgtgagaaaggagataaacttcgactcttctgccttcaactgagaacagttgaccgcaagctgaaactggtcatcaaggccaagaaaaacaaggaaggaccaatgaatgttaattgaaatatgaaagctgaaatgcaacaaacaacttccgcttaaaacaattaagttgttaataactgtgattttgtaaatttcagtaattcatttaaatgatgtttcagtagatatattctagcatattaagagcttttataactgagttatagattagtttgctttctggaataaaattttcttcttatactcttccttttttttagatattacattttgcttttatgacattcacgaggcaaaaaataaaatatctttttttgaaggacatt

SEQ ID NO: 18964 - DNA, 1279 bp, Homo sapiens
  source 1..1279: mol_type = unassigned DNA
gcacttttgctcggggctccagattgtagggcagggcggcgcttctcggaaagcgaaagccggcggggcggggcgggtgccgcaggagaaagaggaagcgctggcagacaatgcgacccgaccgcgctgaggctccaggaccgcccgccatggctgcaggaggtcccggcgcggggtctgcggccccggtctcctccacatcctcccttcccctggctgctctcaacatgcgagtgcggcgccgcctgtctctgttcttgaacgtgcggacacaggtggcggccgactggaccgcgctggcggaggagatggactttgagtacttggagatccggcaactggagacacaagcggaccccactggcaggctgctggacgcctggcagggacgccctggcgcctctgtaggccgactgctcgagctgcttaccaagctgggccgcgacgacgtgctgctggagctgggacccagcattgggcatatgcctgagcgtttcgatgccttcatctgctattgccccagcgacatccagtttgtgcaggagatgatccggcaactggaacagacaaactatcgactgaagttgtgtgtgtctgaccgcgatgtcctgcctggcacctgtgtctggtctattgctagtgagctcatcgaaaagaggtgccgccggatggtggtggttgtctctgatgattacctgcagagcaaggaatgtgacttccagaccaaatttgcactcagcctctctccaggtgcccatcagaagcgactgatccccatcaagtacaaggcaatgaagaaagagttccccagcatcctgaggttcatcactgtctgcgactacaccaacccctgcaccaaatcttggttctggactcgccttgccaaggccttgtccctgccctgaagactgttctgaggccctgggtgtgtgtgtatctgtctgcctgtccatgtacttctgccctgcctcctcctttcgttgtaggaggaatctgtgctctacttacctctcaattcctggagatgccaacttcacagacacgtctgcagcagctggacatcacatttcatgtcctgcatggaaccagtggctgtgagtggcatgtccacttgctggattatcagccaggacactatagaacaggaccagctgagactaagaaggaccagcagagccagctcagctctgagccattcacacatcttcaccctcagtttcctcacttgaggagtgggatggggagaacagagagtagctgtgtttgaatccctgtagga

SEQ ID NO: 18965 - DNA, 914 bp, Homo sapiens
  source 1..914: mol_type = unassigned DNA
aatgcgacccgaccgcgctgaggctccaggaccgcccgccatggctgcaggaggtcccggcgcggggtctgcggccccggtctcctccacatcctcccttcccctggctgctctcaacatgcgagtgcggcgccgcctgtctctgttcttgaacgtgcggacacaggtggcggccgactggaccgcgctggcggaggagatggactttgagtacttggagatccggcaactggagacacaagcggaccccactggcaggctgctggacgcctggcagggacgccctggcgcctctgtaggccgactgctcgagctgcttaccaagctgggccgcgacgacgtgctgctggagctgggacccagcattgaggaggattgccaaaagtatatcttgaagcagcagcaggaggaggctgagaagcctttacaggtggccgctgtagacagcagtgtcccacggacagcagagctggcgggcatcaccacacttgatgaccccctgggtgccgccggatggtggtggttgtctctgatgattacctgcagagcaaggaatgtgacttccagaccaaatttgcactcagcctctctccaggtgcccatcagaagcgactgatccccatcaagtacaaggcaatgaagaaagagttccccagcatcctgaggttcatcactgtctgcgactacaccaacccctgcaccaaatcttggttctggactcgccttgccaaggccttgtccctgccctgaagactgttctgaggccctgggtgtgtgtgtatctgtctgcctgtccatgtacttctgccctgcctcctcctttcgttgtaggaggaatctgtgctctacttacctctcaattcctggagatgccaacttcacagacacgtctgcagcagctggacatcacattt

SEQ ID NO: 18966 - DNA, 976 bp, Homo sapiens
  source 1..976: mol_type = unassigned DNA
agacaatgcgacccgaccgcgctgaggctccaggaccgcccgccatggctgcaggaggtcccggcgcggggtctgcggccccggtctcctccacatcctcccttcccctggctgctctcaacatgcgagtgcggcgccgcctgtctctgttcttgaacgtgcggacacaggtggcggccgactggaccgcgctggcggaggagatggactttgagtacttggagatccggcaactggagacacaagcggaccccactggcaggctgctggacgcctggcagggacgccctggcgcctctgtaggccgactgctcgagctgcttaccaagctgggccgcgacgacgtgctgctggagctgggacccagcattggtgccgccggatggtggtggttgtctctgatgattacctgcagagcaaggaatgtgacttccagaccaaatttgcactcagcctctctccaggtgcccatcagaagcgactgatccccatcaagtacaaggcaatgaagaaagagttccccagcatcctgaggttcatcactgtctgcgactacaccaacccctgcaccaaatcttggttctggactcgccttgccaaggccttgtccctgccctgaagactgttctgaggccctgggtgtgtgtgtatctgtctgcctgtccatgtacttctgccctgcctcctcctttcgttgtaggaggaatctgtgctctacttacctctcaattcctggagatgccaacttcacagacacgtctgcagcagctggacatcacatttcatgtcctgcatggaaccagtggctgtgagtggcatgtccacttgctggattatcagccaggacactatagaacaggaccagctgagactaagaaggaccagcagagccagctcagctctgagccattcacacatcttcaccctcagtttcctcacttgaggagtgggatggggagaacagagagtagctgtg

SEQ ID NO: 18967 - DNA, 2203 bp, Homo sapiens
  source 1..2203: mol_type = unassigned DNA
ctatcccggcgggcaccgcctgcgccgcggcgagtgaggcgtcgtccgtactggaggctagctcttgtcgcggccgcggcgagttaacatcgtttttccaatctgtccgcggctgccgccacccaagacagagccagaatgttcaggatgctgaacagcagttttgaggatgaccccttcttctctgagtccattcttgcacaccgagaaaatatgcgacagatgataagaagtttttctgaaccctttggaagagacttgctcagtatctctgatggtagagggagagctcataatcgtagaggacataatgatggtgaagattctttgactcatacagatgtcagctctttccagacaatggaccaaatggtgtcaaatatgagaaactatatgcagaaattagaaagaaacttcggtcaactttcagtggatccaaatggacattcattttgttcttcctcagttatgacttattccaaaataggagatgaaccgccaaaggtttttcaggcctcaactcaaactcgtcgagctccaggaggaataaaggaaaccaggaaagcaatgagagattctgacagtggactagaaaaaatggctattggtcatcatatccatgaccgagctcatgtcattaaaaagtcaaagaacaagaagactggagatgaagaggtcaaccaggagttcatcaatatgaatgaaagtgatgctcatgcttttgatgaggagtggcaaagtgaggttttgaagtacaaaccaggacgacacaatctaggaaacactagaatgagaagtgttggccatgagaatcctggctcccgagaacttaaaagaagggagaaacctcaacaaagtccagccattgaacatggaaggagatcaaatgttttgggggacaaactccacatcaaaggctcatctgtgaaaagcaacaaaaaataaatagccatgcatttgatttgtttagttttgattgttttaacagttagtaatggtgctgggtaataagcataagaccaatctcttgctgttaaatcagttctgtccttggcaactttcttctgatatctgaatgttcatgaaggtcctagctttatattgtccctcttttaggaataaaattttgattttcaacaatgtgagtaaattgagtctatttaatgtaaaactctttaaaacatactaattttttaaagcttatatgcttatttcgcttccccagttgtttttgtgttggctaaatattcttttatatttatcaagattgattgcagagcagttctatcacttataattagttataagaaattataatgttaaaaaagtctcagtttttactaacactgtactagggtgatattaataaaggtttaaataatttatctctaattttataatgtgttgtaaagccaactagcttaaaactttaaaaataataaagcaaaactacactagtactcttttatgagaaaatagttactattttgataaagggcaaggataatcaaatagttcattttcagagaaaaatattttaaattgctaatgtacatgattgttttggttataatttatttatagaatgtatcttttctatattacattcttaatattcaccagatattatattgaccattctctttaacttcttaatgtggcatatttctactctcctttcccacaaacagcttcatctgtctccaaggttaacattctgaagctggagagtccttggagaaactctgctcagcttttttgtgacatttagaaaaatgcatttggtattctccaaaccagaatgatacattgtctcaaaatctgttagacagctgatgggtgtttttgagcaacgtcttaataattcagttgtttctgttttaattataccattaaaaatcagctttagctttttaattctagaatttaagcatcagtctgttcttataaaagttaggtttgaagtttataagaatataaaatcttaactcacatttgttgtttaatatttctgtcaaggaaaaaagcccccaaaaattgctatcactctataatcctaagtatttttcttttcaattttgtaagtaaaattatatgactatgttcatacttctctaattttttatataatatttttgttaattttactagtttgtgttttatgcctttagtcattaaaataaaatgcaaatgtgttaattca

SEQ ID NO: 18968 - DNA, 2222 bp, Homo sapiens
  source 1..2222: mol_type = unassigned DNA
gcgccgcggcgagtgaggcgtcgtccgtactggaggctagctcttgtcgcggccgcggcgagttaacatcgtttttccaatctgtccgcggctgccgccacccaagacagagccagaatgttcaggatgctgaacagcagttttgaggatgaccccttcttctcgtgagttacgggagccaggagtccggggtcgcgcgggaattaagtgagtccattcttgcacaccgagaaaatatgcgacagatgataagaagtttttctgaaccctttggaagagacttgctcagtatctctgatggtagagggagagctcataatcgtagaggacataatgatggtgaagattctttgactcatacagatgtcagctctttccagacaatggaccaaatggtgtcaaatatgagaaactatatgcagaaattagaaagaaacttcggtcaactttcagtggatccaaatggacattcattttgttcttcctcagttatgacttattccaaaataggagatgaaccgccaaaggtttttcaggcctcaactcaaactcgtcgagctccaggaggaataaaggaaaccaggaaagcaatgagagattctgacagtggactagaaaaaatggctattggtcatcatatccatgaccgagctcatgtcattaaaaagtcaaagaacaagaagactggagatgaagaggtcaaccaggagttcatcaatatgaatgaaagtgatgctcatgcttttgatgaggagtggcaaagtgaggttttgaagtacaaaccaggacgacacaatctaggaaacactagaatgagaagtgttggccatgagaatcctggctcccgagaacttaaaagaagggagaaacctcaacaaagtccagccattgaacatggaaggagatcaaatgttttgggggacaaactccacatcaaaggctcatctgtgaaaagcaacaaaaaataaatagccatgcatttgatttgtttagttttgattgttttaacagttagtaatggtgctgggtaataagcataagaccaatctcttgctgttaaatcagttctgtccttggcaactttcttctgatatctgaatgttcatgaaggtcctagctttatattgtccctcttttaggaataaaattttgattttcaacaatgtgagtaaattgagtctatttaatgtaaaactctttaaaacatactaattttttaaagcttatatgcttatttcgcttccccagttgtttttgtgttggctaaatattcttttatatttatcaagattgattgcagagcagttctatcacttataattagttataagaaattataatgttaaaaaagtctcagtttttactaacactgtactagggtgatattaataaaggtttaaataatttatctctaattttataatgtgttgtaaagccaactagcttaaaactttaaaaataataaagcaaaactacactagtactcttttatgagaaaatagttactattttgataaagggcaaggataatcaaatagttcattttcagagaaaaatattttaaattgctaatgtacatgattgttttggttataatttatttatagaatgtatcttttctatattacattcttaatattcaccagatattatattgaccattctctttaacttcttaatgtggcatatttctactctcctttcccacaaacagcttcatctgtctccaaggttaacattctgaagctggagagtccttggagaaactctgctcagcttttttgtgacatttagaaaaatgcatttggtattctccaaaccagaatgatacattgtctcaaaatctgttagacagctgatgggtgtttttgagcaacgtcttaataattcagttgtttctgttttaattataccattaaaaatcagctttagctttttaattctagaatttaagcatcagtctgttcttataaaagttaggtttgaagtttataagaatataaaatcttaactcacatttgttgtttaatatttctgtcaaggaaaaaagcccccaaaaattgctatcactctataatcctaagtatttttcttttcaattttgtaagtaaaattatatgactatgttcatacttctctaattttttatataatatttttgttaattttactagtttgtgttttatgcctttagtcattaaaataaaatgcaaatgtgttaa

SEQ ID NO: 18969 - DNA, 1366 bp, Homo sapiens
  source 1..1366: mol_type = unassigned DNA
ccaatctgtccgcggctgccgccacccaagacagagccagaatgttcaggatgctgaacagcagttttgaggatgaccccttcttctcagaccatgcaagcaagaagagaatggcatgaaatatataaagtgttgagaggaaaaaaacccactgacctagaattctgtatcctgcaaaattatcctttaaaagtcaagaagaaatagactgtctcagacaaacaaaaatttggtgaatttgttgacagtagacctgccttgcaagaaatgttaaaagaagttcttcagagagaaggaaaatcatacaagtcagaaactctgatgtacattaaaaaagcaagagcatcagagaataagttaagtgagtccattcttgcacaccgagaaaatatgcgacagatgataagaagtttttctgaaccctttggaagagacttgctcagtatctctgatggtagagggagagctcataatcgtagaggacataatgatggtgaagattctttgactgcaacgagttgttctcttgtgccttttggcgattttggtggtatgcatacagatgtcagctctttccagacaatggaccaaatggtgtcaaatatgagaaactatatgcagaaattagaaagaaacttcggtcaactttcagtggatccaaatggacattcattttgttcttcctcagttatgacttattccaaaataggagatgaaccgccaaaggtttttcaggcctcaactcaaactcgtcgagctccaggaggaataaaggaaaccaggaaagcaatgagagattctgacagtggactagaaaaaatggctattggtcatcatatccatgaccgagctcatgtcattaaaaagtcaaagaacaagaagactggagatgaagaggtcaaccaggagttcatcaatatgaatgaaagtgatgctcatgcttttgatgaggagtggcaaagtgaggttttgaagtacaaaccaggacgacacaatctaggaaacactagaatgagaagtgttggccatgagaatcctggctcccgagaacttaaaagaagggagaaacctcaacaaagtccagccattgaacatggaaggagatcaaatgttttgggggacaaactccacatcaaaggctcatctgtgaaaagcaacaaaaaataaatagccatgcatttgatttgtttagttttgattgttttaacagttagtaatggtgctgggtaataagcataagaccaatctcttgctgttaaatcagttctgtccttggcaactttcttctgatatctgaatgttcatgaaggtcctagctttatattgtccctcttttaggaataaaattttgattttcaacaatgtg

SEQ ID NO: 18970 - DNA, 1266 bp, Homo sapiens
  source 1..1266: mol_type = unassigned DNA
gagtgaggcgtcgtccgtactggaggctagctcttgtcgcggccgcggcgagttaacatcgtttttccaatctgtccgcggctgccgccacccaagacagagccagaatgttcaggatgctgaacagcagttttgaggatgaccccttcttctcgtgagttacgggagccaggagtccggggtcgcgcgggaattaagacatacaggtggtcttactctgcagcagctgaaactgaagcacaagaagcccttggaactatcatcaggacattgagtccattcttgcacaccgagaaaatatgcgacagatgataagaagtttttctgaaccctttggaagagacttgctcagtatctctgatggtagagggagagctcataatcgtagaggacataatgatggtgaagattctttgactgcaacgagttgttctcttgtgccttttggcgattttggtggtatgcatacagatgtcagctctttccagacaatggaccaaatggtgtcaaatatgagaaactatatgcagaaattagaaagaaacttcggtcaactttcagtggatccaaatggacattcattttgttcttcctcagttatgacttattccaaaataggagatgaaccgccaaaggtttttcaggcctcaactcaaactcgtcgagctccaggaggaataaaggaaaccaggaaagcaatgagagattctgacagtggactagaaaaaatggctattggtcatcatatccatgaccgagctcatgtcattaaaaagtcaaagaacaagaagactggagatgaagaggtcaaccaggagttcatcaatatgaatgaaagtgatgctcatgcttttgatgaggagtggcaaagtgaggttttgaagtacaaaccaggacgacacaatctaggaaacactagaatgagaagtgttggccatgagaatcctggctcccgagaacttaaaagaagggagaaacctcaacaaagtccagccattgaacatggaaggagatcaaatgttttgggggacaaactccacatcaaaggctcatctgtgaaaagcaacaaaaaataaatagccatgcatttgatttgtttagttttgattgttttaacagttagtaatggtgctgggtaataagcataagaccaatctcttgctgttaaatcagttctgtccttggcaactttcttctgatatctgaatgttcatgaaggtcctagctttatattgtccctcttttaggaataaaattttgattttc

SEQ ID NO: 18971 - DNA, 1372 bp, Homo sapiens
  source 1..1372: mol_type = unassigned DNA
gtttttccaatctgtccgcggctgccgccacccaagacagagccagaatgttcaggatgctgaacagcagttttgaggatgaccccttcttctcagaccatgcaagcaagaagagaatggcatgaaatatataaagtgttgagaggaaaaaaacccactgacctagaattctgtatcctgcaaaattatcctttaaaagtcaagaagaaatagactgtctcagacaaacaaaaatttggtgaatttgttgacagtagacctgccttgcaagaaatgttaaaagaagttcttcagagagaaggaaaatcatacaagtcagaaactctgatgtacattaaaaaagcaagagcatcagagaataagttaagtgagtccattcttgcacaccgagaaaatatgcgacagatgataagaagtttttctgaaccctttggaagagacttgctcagtatctctgatggtagagggagagctcataatcgtagaggacataatgatggtgaagattctttgactgcaacgagttgttctcttgtgccttttggcgattttggtggtatgcatacagatgtcagctctttccagacaatggaccaaatggtgtcaaatatgagaaactatatgcagaaattagaaagaaacttcggtcaactttcagtggatccaaatggacattcattttgttcttcctcagttatgacttattccaaaataggagatgaaccgccaaaggtttttcaggcctcaactcaaactcgtcgagctccaggaggaataaaggaaaccaggaaagcaatgagagattctgacagtggactagaaaaaatggctattggtcatcatatccatgaccgagctcatgtcattaaaaagtcaaagaacaagaagactggagatgaagaggtcaaccaggagttcatcaatatgaatgaaagtgatgctcatgcttttgatgaggagtggcaaagtgaggttttgaagtacaaaccaggacgacacaatctaggaaacactagaatgagaagtgttggccatgagaatcctggctcccgagaacttaaaagaagggagaaacctcaacaaagtccagccattgaacatggaaggagatcaaatgttttgggggacaaactccacatcaaaggctcatctgtgaaaagcaacaaaaaataaatagccatgcatttgatttgtttagttttgattgttttaacagttagtaatggtgctgggtaataagcataagaccaatctcttgctgttaaatcagttctgtccttggcaactttcttctgatatctgaatgttcatgaaggtcctagctttatattgtccctcttttaggaataaaattttgattttcaacaatgtg

SEQ ID NO: 18972 - DNA, 1050 bp, Homo sapiens
  source 1..1050: mol_type = unassigned DNA
gtactggaggctagctcttgtcgcggccgcggcgagttaacatcgtttttccaatctgtccgcggctgccgccacccaagacagagccagaatgttcaggatgctgaacagcagttttgaggatgaccccttcttctcagctaaccttgtttgtgaagggactccgctttctgtcaaaactagaaataggacagggaagctgatggggcggggcggggggaggggggcgggaggagggcggcgggggggggggggtgtgtatttaacacctcagtgagtccattcttgcacaccgagaaaatatgcgacagatgataagaagtttttctgaaccctttggaagagacttgctcagtatctctgatggtagagggagagctcataatcgtagaggacataatgatggtgaagattctttgactcatacagatgtcagctctttccagacaatggaccaaatggtgtcaaatatgagaaactatatgcagaaattagaaagaaacttcggtcaactttcagtggatccaaatggacattcattttgttcttcctcagttatgacttattccaaaataggagatgaaccgccaaaggtttttcaggcctcaactcaaactcgtcgagctccaggaggaataaaggaaaccaggaaagcaatgagagattctgacagtggactagaaaaaatggctattggtcatcatatccatgaccgagctcatgtcattaaaaagtcaaagaacaagaagactggagatgaagaggtcaaccaggagttcatcaatatgaatgaaagtgatgctcatgcttttgatgaggagtggcaaagtgaggttttgaagtacaaaccaggacgacacaatctaggaaacactagaatgagaagtgttggccatgagaatcctggctcccgagaacttaaaagaagggagaaacctcaacaaagtccagccattgaacatggaaggagatcaaatgttttgggggacaaactccacatcaaaggctcatctgtgaaaagcaacaaaaaataaatagccatgcatttga

SEQ ID NO: 18973 - DNA, 1247 bp, Homo sapiens
  source 1..1247: mol_type = unassigned DNA
gggcaccgcctgcgccgcggcgagtgaggcgtcgtccgtactggaggctagctcttgtcgcggccgcggcgagttaacatcgtttttccaatctgtccgcggctgccgccacccaagacagagccagaatgttcaggatgctgaacagcagttttgaggatgaccccttcttctcgtgagttacgggagccaggagtccggggtcgcgcgggaattaagacatacaggtggtcttactctgcagcagctgaaactgaagcacaagaagcccttggaactatcatcaggacattgagtccattcttgcacaccgagaaaatatgcgacagatgataagaagtttttctgaaccctttggaagagacttgctcagtatctctgatggtagagggagagctcataatcgtagaggacataatgatggtgaagattctttgactcatacagatgtcagctctttccagacaatggaccaaatggtgtcaaatatgagaaactatatgcagaaattagaaagaaacttcggtcaactttcagtggatccaaatggacattcattttgttcttcctcagttatgacttattccaaaataggagatgaaccgccaaaggtttttcaggcctcaactcaaactcgtcgagctccaggaggaataaaggaaaccaggaaagcaatgagagattctgacagtggactagaaaaaatggctattggtcatcatatccatgaccgagctcatgtcattaaaaagtcaaagaacaagaagactggagatgaagaggtcaaccaggagttcatcaatatgaatgaaagtgatgctcatgcttttgatgaggagtggcaaagtgaggttttgaagtacaaaccaggacgacacaatctaggaaacactagaatgagaagtgttggccatgagaatcctggctcccgagaacttaaaagaagggagaaacctcaacaaagtccagccattgaacatggaaggagatcaaatgttttgggggacaaactccacatcaaaggctcatctgtgaaaagcaacaaaaaataaatagccatgcatttgatttgtttagttttgattgttttaacagttagtaatggtgctgggtaataagcataagaccaatctcttgctgttaaatcagttctgtccttggcaactttcttctgatatctgaatgttcatgaaggtcctagctttatattgtccctcttttaggaataaaattttgattttcaacaa

SEQ ID NO: 18974 - DNA, 1098 bp, Homo sapiens
  source 1..1098: mol_type = unassigned DNA
agtgaggcgtcgtccgtactggaggctagctcttgtcgcggccgcggcgagttaacatcgtttttccaatctgtccgcggctgccgccacccaagacagagccagaatgttcaggatgctgaacagcagttttgaggatgaccccttcttctcgtgagttacgggagccaggagtccggggtcgcgcgggaattaagacatacaggtggtcttactctgcagcagctgaaactgaagcacaagaagcccttggaactatcatcaggacattgagtccattcttgcacaccgagaaaatatgcgacagatgataagaagtttttctgaaccctttggaagagacttgctcagtatctctgatggtagagggagagctcataatcgtagaggacataatgatggtgaagattctttgactcatacagatgtcagctctttccagacaatggaccaaatggtgtcaaatatgagaaactatatgcagaaattagaaagaaacttcataaaggaaaccaggaaagcaatgagagattctgacagtggactagaaaaaatggctattggtcatcatatccatgaccgagctcatgtcattaaaaagtcaaagaacaagaagactggagatgaagaggtcaaccaggagttcatcaatatgaatgaaagtgatgctcatgcttttgatgaggagtggcaaagtgaggttttgaagtacaaaccaggacgacacaatctaggaaacactagaatgagaagtgttggccatgagaatcctggctcccgagaacttaaaagaagggagaaacctcaacaaagtccagccattgaacatggaaggagatcaaatgttttgggggacaaactccacatcaaaggctcatctgtgaaaagcaacaaaaaataaatagccatgcatttgatttgtttagttttgattgttttaacagttagtaatggtgctgggtaataagcataagaccaatctcttgctgttaaatcagttctgtccttggcaactttcttctgatatctgaatgttcatgaaggtcctagctttatattgtccctcttttaggaataaaattttgattttcaacaatg

SEQ ID NO: 18975 - DNA, 1958 bp, Homo sapiens
  source 1..1958: mol_type = unassigned DNA
aaagctccccccagggatccgccccgcctcgtcgcccacagagcgcccgcctctccccaaggggcatctgcccctcgtcctccagtttccccttgaggagggagagagaacgtgctgcactgcgcccccaggttcaacctccaacccggtccctcccgaagaatggattcctcttctccttctcctcccctgccttatgggagcctcttccagtccacagaacccaaatcgaggttactaatgagctccccttcttcgtgcccaggggacccctctcggcctcaggctctgctcccctgagcttggcccatggccccggcgcccctgggactcggccccagccatctcaccacccgcgccagggggcggggctcccacggcccggccccgggtgggcgggtctatcgtgacgtcacttccgcccgggcctggccgaggttcgggctccgttggccgagggggccgtacggaggtggcagctgtgggaggaggcggcgtggaaggccgaggagctcaagcccggaccaatccccacgttccgggccgcgaccctgaccctgcagcgtaccgggaagcgaaaccggccggatgggccgctgagcccgaatcgggcactgtgtggagccccctggagctgagatcaggatgttccgcttcatgagggacgtggagcctgaggatcccatgttcctgatggatccctttgctattcaccgtcagcatatgagccgtatgttgtcaggtggctttggatatagccccttcctcagcatcacagatggcaacatgccagggaccaggcctgccagccgccggatgcagcaggctggagctgtctccccctttgggatgctgggaatgtcgggtggtttcatggacatgtttgggatgatgaatgacatgattggaaacatggaacacatgacagctggaggcaattgccagaccttctcatcttccactgtcatctcctactccaatacgggtgatggtgcccccaaggtctaccaagagacatcagagatgcgctcggcaccaggcgggatccgggagacacggaggactgttcgggattcagacagtggactggagcagatgtccattgggcatcacatccgggacagggctcacatcctccagcgctcccgaaaccatcgcacgggggaccaggaggagcggcaggactatatcaacctggatgagagtgaggccgcagcgtttgatgacgagtggcggcgggagacctcccgattccggcagcagcgtcccctggagtttcggcggcttgagtcctcaggggctgggggacgaagggcggaggggcctccccgcctggccatccagggacctgaggactccccttcccgacagtcccgccgctatgactggtgagggccccgggccctcagcctctcttgtacaggctgagaggctgagaaatcatcccctgaataactttttcctctcgattcccatccccaatttaatattaaattaacaggcaagccggcccccacctctccctgggggtctcagggagaacctttcacggcaccctttccctaccttttccttctttaatctcctggtttaccattgatgacttcgcctctgcatctactgacttgatttttcattctgccactccatcttcaaaccccctcacctttcccatcctactcctgccatgcattgaagggtcaatgcattttggggtgagctctgggtttaggggccccctccatccctcagctaccctggatctttgcccacctcttcctcagagcccccactgaggggccgtagccctatctagggctgtggaaggagcagactggttcctaactctctccctcctcctgcccacacacatcaaaagaatcttccctacacccttctctgcctttattttttgatttgtgcaacttgtaactaggtgtttatggaataaaggagaa

SEQ ID NO: 18976 - DNA, 1379 bp, Homo sapiens
  source 1..1379: mol_type = unassigned DNA
agccccggacgggagcgggcccacggggctgcaggtgtggagccccctggagctgagatcaggatgttccgcttcatgagggacgtggagcctgaggatcccatgttcctgatggatccctttgctattcaccgtcagcatatgagccgtatgttgtcaggtggctttggatatagccccttcctcagcatcacagatggcaacatgccagggaccaggcctgccagccgccggatgcagcaggctggagctgtctccccctttgggatgctgggaatgtcgggtggtttcatggacatgtttgggatgatgaatgacatgattggaaacatggaacacatgacagctggaggcaattgccagaccttctcatcttccactgtcatctcctactccaatacgggtgatggtgcccccaaggtctaccaagagacatcagagatgcgctcggcaccaggcgggatccgggagacacggaggactgttcgggattcagacagtggactggagcagatgtccattgggcatcacatccgggacagggctcacatcctccagcgctcccgaaaccatcgcacgggggaccaggaggagcggcaggactatatcaacctggatgagagtgaggccgcagcgtttgatgacgagtggcggcgggagacctcccgattccggcagcagcgtcccctggagtttcggcggcttgagtcctcaggggctgggggacgaagggcggaggggcctccccgcctggccatccagggacctgaggactccccttcccgacagtcccgccgctatgactggtgagggccccgggccctcagcctctcttgtacaggctgagaggctgagaaatcatcccctgaataactttttcctctcgattcccatccccaatttaatattaaattaacaggcaagccggcccccacctctccctgggggtctcagggagaacctttcacggcaccctttccctaccttttccttctttaatctcctggtttaccattgatgacttcgcctctgcatctactgacttgatttttcattctgccactccatcttcaaaccccctcacctttcccatcctactcctgccatgcattgaagggtcaatgcattttggggtgagctctgggtttaggggccccctccatccctcagctaccctggatctttgcccacctcttcctcagagcccccactgaggggccgtagccctatctagggctgtggaaggagcagactggttcctaactctctccctcctcctgcccacacacatcaaaagaatcttccctacacccttctctgcctttattttttgatttgtgcaacttgtaactaggtgtttatggaataaaggagaatgg

SEQ ID NO: 18977 - DNA, 1110 bp, Homo sapiens
  source 1..1110: mol_type = unassigned DNA
gcgaacggatggggccggggaagggagctgatgagggcgaggacagctcgacgcaatgccatgcaatgcccagcctcggctttttcgaaggctagtcctgccccgcttctaatttttaggaattcgagattctttcagtgtgtatgcgggaaggggacgatgaagagaaaagaaagctgaaagccagctgaggggagggaacgagaaaacagaggcggccgccgtccggggagagaagcgagcgacggtcgggccgcggggaggggcccggaggagcagcctccagggagagtcctgtttacacttgaggatctcaaaccgcttagcgaggaaagtgtggagccccctggagctgagatcaggatgttccgcttcatgagggacgtggagcctgaggatcccatgttcctgatggatccctttgctattcaccgtcagcatatgagccgtatgttgtcaggtggctttggatatagccccttcctcagcatcacagatggcaacatgccagggaccaggcctgccagccgccggatgcagcaggctggagctgtctccccctttgggatgctgggaatgtcgggtggtttcatggacatgtttgggatgatgaatgacatgattggaaacatggaacacatgacagctggaggcaattgccagaccttctcatcttccactgtcatctcctactccaatacgggtgatggtgcccccaaggtctaccaagagacatcagagatgcgctcggcaccaggcgggatccgggagacacggaggactgttcgggattcagacagtggactggagcagatgtccattgggcatcacatccgggacagggctcacatcctccagcgctcccgaaaccatcgcacgggggaccaggaggagcggcaggactatatcaacctggatgagagtgaggccgcagcgtttgatgacgagtggcggcgggagacctcccgattccggcagcagcgtcccctggagtttcggcggcttgagtcctcaggggctgggggacgaagggcggaggggcctccccgcctggccatccagggacctgaggactccccttcccgacagtcccgccgctatgactggtga

SEQ ID NO: 18978 - DNA, 838 bp, Homo sapiens
  source 1..838: mol_type = unassigned DNA
agccccggacgggagcgggcccacggggctgcaggtgtggagccccctggagctgagatcaggatgttccgcttcatgagggacgtggagcctgaggatcccatgttcctgatggatccctttgctattcaccgtcagcatatgagccgtatgttgtcaggtggctttggatatagccccttcctcagcatcacagatggcaacatgccagggaccaggcctgccagccgccggatgcagcaggctggagctgtctccccctttgggatgctgggaatgtcgggtggtttcatggacatgtttgggatgatgaatgacatgattggaaacatggaacacatgacagctggaggcaattgccagaccttctcatcttccactgtcatctcctactccaatacgggtgatggtgcccccaaggtctaccaagagacatcagagatgcgctcggcaccaggcgggatccgggagacacggaggactgttcgggattcagacagtggactggagcagatgtccattgggcatcacatccgggacagggctcacatcctccagcgctcccgaaaccatcgcacgggggaccaggaggagcggcaggactatatcaacctggatgagagtgaggccgcagcgtttgatgacgagtggcggcgggagacctcccgattccggcagcagcgtcccctggagtttcggcggcttgagtcctcaggggctgggggacgaagggcggaggggcctccccgcctggccatccagggacctgaggactccccttcccgacagtcccgccgctatgactggtgagggccccgggccctcagcctctcttgta

SEQ ID NO: 18979 - DNA, 2920 bp, Homo sapiens
  source 1..2920: mol_type = unassigned DNA
gcgcacgtacacacgaagggcctgctgactacatctgccggaaagcatcgggccaagcctttctccattttgcggtctaggaagtagcagaggccccttcctgtagggagttgccatggagacgcggtggggcaccgacggagttctaatgacggccgtgattggtgcaggatcctgctaatctcaggaaggcccgtagagaagtgaggaaaacgtggtggggggcatgcgcgatctggtaggcggtgctgccgtctgttgtacctgagaggcttgcgcatgccgacgcacggattcgaggcggggagcatgggaagaagcggccaggagtatgacctgatcattgcgaccaccgctaggggaagggaggagagggtgtagaaacggggacgagggtgggggaagggcaaggaggcgctcgagctggtgcgcggagcatcctgggagacgtagtccagcgggagggggaagtcgaagactgcgcgtgctcaggagcgcggagcggcccgctgagcgcagaggggcagacactggcctcagatacctgacctggtaccctctatgaggcctgcggtgctgggctccccagaccgagcacccccagaagatgaggggcctgtcatggtgaagctagaggactctgaggaggagggtgaggctgccttatgggacccaggccctgaagctgcacgcctgcgtttccggtgcttccgctatgaggaggccacagggccccaagaggccctggcccagctccgagagctgtgtcgccagtggctgcgtccagaggtacgctccaaggagcagatgctggagctgttggtgctggagcagttcctgggcgcactgccccctgagatccaggcccgtgtgcaggggcagcggccaggcagccccgaggaggctgctgccctagtagatgggctgcgccgggagccgggcggaccccggagatgggtcacagtccaggtgcagggccaggaggtcctatcagagaagatggagccctccagtttccagcccctacctgaaactgagcctccaactccagagcctgggcccaagacacctcctaggactatgcaggaatcaccactgggcctgcaggtgaaagaggagtcagaggttacagaggactcagatttcctggagtctgggcctctagctgccacccaggagtctgtacccaccctcctgcctgaggaggcccagagatgtgggaccgtgctggaccagatctttccccacagcaagactgggcctgagggtccctcatggagggagcaccccagggccctgtggcatgaggaagctgggggcatcttctccccagggttcgcgctgcagctaggcagcatctccgcaggtccaggtagtgtaagccctcacctccacgtcccctgggacctcggcatggctggcctttctggccagatccaatcaccctcccgcgaaggtggctttgcgcatgcgcttctgctccccagcgatctgaggagtgaacaggaccccacggacgaggatccctgccggggtgtgggccctgctctgatcaccacccgctggcgctcccccaggggccggagccggggccgccccagcactgggggcggggtggttaggggcggccgttgcgatgtatgtggcaaggtgttcagccaacgcagcaacctgctgaggcaccagaagatccacacgggtgagcgaccattcgtgtgcagcgagtgcggccgcagcttcagccgcagctcgcacctgctgcgccaccagcttacgcacaccgaggagcggccgttcgtgtgcggcgactgtggccagggcttcgtgcgcagcgcgcgcctggaagagcatcggagagtgcacacgggcgaacagcctttccgttgcgctgagtgcggccagagcttccggcagcgctccaatctgctgcagcaccagcgcatccacggcgatcccccgggccctggcgctaagcccccggcccctcctggtgcgcccgagcctcccggcccctttccgtgcagcgagtgccgcgagagcttcgcgcggcgcgccgtgctgctggagcaccaggcggtacacacgggcgacaagtcctttggctgcgtcgagtgcggcgagcgcttcggccgccgctcagtgctgctgcagcaccggcgcgtgcacagtggcgagcggcccttcgcctgtgccgagtgcggccagagcttccggcagcgctccaacctgacgcagcaccggcgcatccacaccggggagcggcccttcgcctgcgccgagtgtggcaaggccttccgccagcggcctacgctcacgcagcatctccgcgtacacacgggcgagaaaccctttgcctgccccgagtgtggccagcgcttcagccagcgcctcaagctcacgcgtcatcagaggacacacaccggcgaaaagccctaccactgcggtgagtgcggcctgggcttcacgcaggtctcgcggctcaccgagcaccagcgcatccacacgggcgaacggcccttcgcctgccccgagtgcggccagagctttcggcagcacgccaacctcacccagcaccggcgcatccacacgggtgaacggccctacgcatgccctgagtgtggcaaggccttccgccagcggcccacgctcacgcagcatctgcgcacccaccgacgagagaagcccttcgcctgccaggactgtggccgccgcttccaccagagcaccaagctcattcagcaccagcgcgtccacagcgccgagtagctccagccgggacgcactgtgtccgccatggtcagaacacctacctcccctggttattgtgaggctggcgattacataagtataagcaggtccgcccagggcttggctactgtaggtgtccaataaacagtagatggaaactgggtctccaccc

SEQ ID NO: 18980 - DNA, 2385 bp, Homo sapiens
  source 1..2385: mol_type = unassigned DNA
gcatgccgacgcacggattcgaggcggggagcatgggaagaagcggccaggagtatgacctgatcattgcgaccaccgctaggggaagggaggagagggtgtagaaacggggacgagggtgggggaagggcaaggaggcgctcgagctggtgcgcggagcatcctgggagacgtagtccagcgggagggggaagtcgaagactgcgcgtgctcaggagcgcggagcggcccgctgagcgcagaggggcagacactggcctcagatacctgacctggtaccctctatgaggcctgcggtgctgggctccccagaccgagcacccccagaagatgaggggcctgtcatggtgaagctagaggactctgaggaggagggtgaggctgccttatgggacccaggccctgaagctgcacgcctgcgtttccggtgcttccgctatgaggaggccacagggccccaagaggccctggcccagctccgagagctgtgtcgccagtggctgcgtccagaggtacgctccaaggagcagatgctggagctgttggtgctggagcagttcctgggcgcactgccccctgagatccaggcccgtgtgcaggggcagcggccaggcagccccgaggaggctgctgccctagtagatgggctgcgccgggagccgggcggaccccggagatgggtcacagtccaggtgcagggccaggaggtcctatcagagaagatggagccctccagtttccagcccctacctgaaactgagcctccaactccagagcctgggcccaagacacctcctaggactatgcaggaatcaccactgggcctgcaggtgaaagaggagtcagaggttacagaggactcagatttcctggagtctgggcctctagctgccacccaggagtctgtacccaccctcctgcctgaggaggcccagagatgtgggaccgtgctggaccagatctttccccacagcaagactgggcctgagggtccctcatggagggagcaccccagggccctgtggcatgaggaagctgggggcatcttctccccaggggccggagccggggccgccccagcactgggggcggggtggttaggggcggccgttgcgatgtatgtggcaaggtgttcagccaacgcagcaacctgctgaggcaccagaagatccacacgggtgagcgaccattcgtgtgcagcgagtgcggccgcagcttcagccgcagctcgcacctgctgcgccaccagcttacgcacaccgaggagcggccgttcgtgtgcggcgactgtggccagggcttcgtgcgcagcgcgcgcctggaagagcatcggagagtgcacacgggcgaacagcctttccgttgcgctgagtgcggccagagcttccggcagcgctccaatctgctgcagcaccagcgcatccacggcgatcccccgggccctggcgctaagcccccggcccctcctggtgcgcccgagcctcccggcccctttccgtgcagcgagtgccgcgagagcttcgcgcggcgcgccgtgctgctggagcaccaggcggtacacacgggcgacaagtcctttggctgcgtcgagtgcggcgagcgcttcggccgccgctcagtgctgctgcagcaccggcgcgtgcacagtggcgagcggcccttcgcctgtgccgagtgcggccagagcttccggcagcgctccaacctgacgcagcaccggcgcatccacaccggggagcggcccttcgcctgcgccgagtgtggcaaggccttccgccagcggcctacgctcacgcagcatctccgcgtacacacgggcgagaaaccctttgcctgccccgagtgtggccagcgcttcagccagcgcctcaagctcacgcgtcatcagaggacacacaccggcgaaaagccctaccactgcggtgagtgcggcctgggcttcacgcaggtctcgcggctcaccgagcaccagcgcatccacacgggcgaacggcccttcgcctgccccgagtgcggccagagctttcggcagcacgccaacctcacccagcaccggcgcatccacacgggtgaacggccctacgcatgccctgagtgtggcaaggccttccgccagcggcccacgctcacgcagcatctgcgcacccaccgacgagagaagcccttcgcctgccaggactgtggccgccgcttccaccagagcaccaagctcattcagcaccagcgcgtccacagcgccgagtagctccagccgggacgcactgtgtccgccatggtcagaacacctacctcccctggttattgtgaggctggcgattacataagtataagcaggtccgcccagggcttggctactgtaggtgtccaataaacagtagatggaaa

SEQ ID NO: 18981 - DNA, 2587 bp, Homo sapiens
  source 1..2587: mol_type = unassigned DNA
gcgcacgtacacacgaagggcctgctgactacatctgccggaaagcatcgggccaagcctttctccattttgcggtctaggaagtagcagaggccccttcctgtagggagttgccatggagacgcggtggggcaccgacggagttctaatgacggccgtgattggtgcaggatcctgctaatctcaggaaggcccgtagagaagggcagacactggcctcagatacctgacctggtaccctctatgaggcctgcggtgctgggctccccagaccgagcacccccagaagatgaggggcctgtcatggtgaagctagaggactctgaggaggagggtgaggctgccttatgggacccaggccctgaagctgcacgcctgcgtttccggtgcttccgctatgaggaggccacagggccccaagaggccctggcccagctccgagagctgtgtcgccagtggctgcgtccagaggtacgctccaaggagcagatgctggagctgttggtgctggagcagttcctgggcgcactgccccctgagatccaggcccgtgtgcaggggcagcggccaggcagccccgaggaggctgctgccctagtagatgggctgcgccgggagccgggcggaccccggagatgggtcacagtccaggtgcagggccaggaggtcctatcagagaagatggagccctccagtttccagcccctacctgaaactgagcctccaactccagagcctgggcccaagacacctcctaggactatgcaggaatcaccactgggcctgcaggtgaaagaggagtcagaggttacagaggactcagatttcctggagtctgggcctctagctgccacccaggagtctgtacccaccctcctgcctgaggaggcccagagatgtgggaccgtgctggaccagatctttccccacagcaagactgggcctgagggtccctcatggagggagcaccccagggccctgtggcatgaggaagctgggggcatcttctccccagggttcgcgctgcagctaggcagcatctccgcaggtccaggtagtgtaagccctcacctccacgtcccctgggacctcggcatggctggcctttctggccagatccaatcaccctcccgcgaaggtggctttgcgcatgcgcttctgctccccagcgatctgaggagtgaacaggaccccacggacgaggatccctgccggggtgtgggccctgctctgatcaccacccgctggcgctcccccaggggccggagccggggccgccccagcactgggggcggggtggttaggggcggccgttgcgatgtatgtggcaaggtgttcagccaacgcagcaacctgctgaggcaccagaagatccacacgggtgagcgaccattcgtgtgcagcgagtgcggccgcagcttcagccgcagctcgcacctgctgcgccaccagcttacgcacaccgaggagcggccgttcgtgtgcggcgactgtggccagggcttcgtgcgcagcgcgcgcctggaagagcatcggagagtgcacacgggcgaacagcctttccgttgcgctgagtgcggccagagcttccggcagcgctccaatctgctgcagcaccagcgcatccacggcgatcccccgggccctggcgctaagcccccggcccctcctggtgcgcccgagcctcccggcccctttccgtgcagcgagtgccgcgagagcttcgcgcggcgcgccgtgctgctggagcaccaggcggtacacacgggcgacaagtcctttggctgcgtcgagtgcggcgagcgcttcggccgccgctcagtgctgctgcagcaccggcgcgtgcacagtggcgagcggcccttcgcctgtgccgagtgcggccagagcttccggcagcgctccaacctgacgcagcaccggcgcatccacaccggggagcggcccttcgcctgcgccgagtgtggcaaggccttccgccagcggcctacgctcacgcagcatctccgcgtacacacgggcgagaaaccctttgcctgccccgagtgtggccagcgcttcagccagcgcctcaagctcacgcgtcatcagaggacacacaccggcgaaaagccctaccactgcggtgagtgcggcctgggcttcacgcaggtctcgcggctcaccgagcaccagcgcatccacacgggcgaacggcccttcgcctgccccgagtgcggccagagctttcggcagcacgccaacctcacccagcaccggcgcatccacacgggtgaacggccctacgcatgccctgagtgtggcaaggccttccgccagcggcccacgctcacgcagcatctgcgcacccaccgacgagagaagcccttcgcctgccaggactgtggccgccgcttccaccagagcaccaagctcattcagcaccagcgcgtccacagcgccgagtagctccagccgggacgcactgtgtccgccatggtcagaacacctacctcccctggttattgtgaggctggcgattacataagtataagcaggtccgcccagggcttggctactgtaggtgtccaataaacagtagatggaa

SEQ ID NO: 18982 - DNA, 14542 bp, Homo sapiens
  source 1..14542: mol_type = unassigned DNA
atggcgcacagctgtcggtggcgcttccccgcccgacccgggaccaccgggggcggcggcggcggggggcgccggggcctagggggcgccccgcggcaacgcgtcccggccctgctgcttccccccgggcccccggtcggcggtggcggccccggggcgcccccctcccccccggctgtggcggccgcggcggcggcggcgggaagcagcggggctggggttccagggggagcggccgccgcctcagcagcctcctcgtcgtccgcctcgtcttcgtcttcgtcatcgtcctcagcctcttcagggccggccctgctccgggtgggcccgggcttcgacgcggcgctgcaggtctcggccgccatcggcaccaacctgcgccggttccgggccgtgtttggggagagcggcgggggaggcggcagcggagagctaacaacacagatcccatgtagttggagaaccaaaggccacatacatgacaaaaagactgaaccgttcaggttacttgcatggagttggtgcttaaatgatgagcaattcttaggttttggctcagatgaagaagtcagagtgcgaagtcccacaaggtctccttcagttaaaactagtcctcgaaaacctcgtgggagacctagaagtggctctgaccgaaattcagctatcctctcagatccatctgtgttttcccctctaaataaatcagagaccaaatctggagataagatcaagaagaaagattctaaaagtatagaaaagaagagaggaagacctcccaccttccctggagtaaaaatcaaaataacacatggaaaggacatttcagagttaccaaagggaaacaaagaagatagcctgaaaaaaattaaaaggacaccttctgctacgtttcagcaagccacaaagattaaaaaattaagagcaggtaaactctctcctctcaagtctaagtttaagacagggaagcttcaaataggaaggaagggggtacaaattgtacgacggagaggaaggcctccatcaacagaaaggataaagaccccttcgggtctcctcattaattctgaactggaaaagccccagaaagtccggaaagacaaggaaggaacacctccacttacaaaagaagataagacagttgtcagacaaagccctcgaaggattaagccagttaggattattccttcttcaaaaaggacagatgcaaccattgctaagcaactcttacagagggcaaaaaagggggctcaaaagaaaattgaaaaagaagcagctcagctgcagggaagaaaggtgaagacacaggtcaaaaatattcgacagttcatcatgcctgttgtcagtgctatctcctcgcggatcattaagacccctcggcggtttatagaggatgaggattatgaccctccaattaaaattgcccgattagagtctacaccgaatagtagattcagtgccccgtcctgtggatcttctgaaaaatcaagtgcagcttctcagcactcctctcaaatgtcttcagactcctctcgatctagtagccccagtgttgatacctccacagactctcaggcttctgaggagattcaggtacttcctgaggagcggagcgatacccctgaagttcatcctccactgcccatttcccagtccccagaaaatgagagtaatgataggagaagcagaaggtattcagtgtcggagagaagttttggatctagaacgacgaaaaaattatcaactctacaaagtgccccccagcagcagacctcctcgtctccacctccacctctgctgactccaccgccaccactgcagccagcctccagtatctctgaccacacaccttggcttatgcctccaacaatccccttagcatcaccatttttgcctgcttccactgctcctatgcaagggaagcgaaaatctattttgcgagaaccgacatttaggtggacttctttaaagcattctaggtcagagccacaatacttttcctcagcaaagtatgccaaagaaggtcttattcgcaaaccaatatttgataatttccgaccccctccactaactcccgaggacgttggctttgcatctggtttttctgcatctggtaccgctgcttcagcccgattgttttcgccactccattctggaacaaggtttgatatgcacaaaaggagccctcttctgagagctccaagatttactccaagtgaggctcactctagaatatttgagtctgtaaccttgcctagtaatcgaacttctgctggaacatcttcttcaggagtatccaatagaaaaaggaaaagaaaagtgtttagtcctattcgatctgaaccaagatctccttctcactccatgaggacaagaagtggaaggcttagtagttctgagctctcacctctcacccccccgtcttctgtctcttcctcgttaagcatttctgttagtcctcttgccactagtgccttaaacccaacttttacttttccttctcattccctgactcagtctggggaatctgcagagaaaaatcagagaccaaggaagcagactagtgctccggcagagccattttcatcaagtagtcctactcctctcttcccttggtttaccccaggctctcagactgaaagagggagaaataaagacaaggcccccgaggagctgtccaaagatcgagatgctgacaagagcgtggagaaggacaagagtagagagagagaccgggagagagaaaaggagaataagcgggagtcaaggaaagagaaaaggaaaaagggatcagaaattcagagtagttctgctttgtatcctgtgggtagggtttccaaagagaaggttgttggtgaagatgttgccacttcatcttctgccaaaaaagcaacagggcggaagaagtcttcatcacatgattctgggactgatattacttctgtgactcttggggatacaacagctgtcaaaaccaaaatacttataaagaaagggagaggaaatctggaaaaaaccaacttggacctcggcccaactgccccatccctggagaaggagaaaaccctctgcctttccactccttcatctagcactgttaaacattccacttcctccataggctccatgttggctcaggcagacaagcttccaatgactgacaagagggttgccagcctcctaaaaaaggccaaagctcagctctgcaagattgagaagagtaagagtcttaaacaaaccgaccagcccaaagcacagggtcaagaaagtgactcatcagagacctctgtgcgaggaccccggattaaacatgtctgcagaagagcagctgttgcccttggccgaaaacgagctgtgtttcctgatgacatgcccaccctgagtgccttaccatgggaagaacgagaaaagattttgtcttccatggggaatgatgacaagtcatcaattgctggctcagaagatgctgaacctcttgctccacccatcaaaccaattaaacctgtcactagaaacaaggcaccccaggaacctccagtaaagaaaggacgtcgatcgaggcggtgtgggcagtgtcccggctgccaggtgcctgaggactgtggtgtttgtactaattgcttagataagcccaagtttggtggtcgcaatataaagaagcagtgctgcaagatgagaaaatgtcagaatctacaatggatgccttccaaagcctacctgcagaagcaagctaaagctgtgaaaaagaaagagaaaaagtctaagaccagtgaaaagaaagacagcaaagagagcagtgttgtgaagaacgtggtggactctagtcagaaacctaccccatcagcaagagaggatcctgccccaaagaaaagcagtagtgagcctcctccacgaaagcccgtcgaggaaaagagtgaagaagggaatgtctcggcccctgggcctgaatccaaacaggccaccactccagcttccaggaagtcaagcaagcaggtctcccagccagcactggtcatcccgcctcagccacctactacaggaccgccaagaaaagaagttcccaaaaccactcctagtgagcccaagaaaaagcagcctccaccaccagaatcaggtccagagcagagcaaacagaaaaaagtggctccccgcccaagtatccctgtaaaacaaaaaccaaaagaaaaggaaaaaccacctccggtcaataagcaggagaatgcaggcactttgaacatcctcagcactctctccaatggcaatagttctaagcaaaaaattccagcagatggagtccacaggatcagagtggactttaaggaggattgtgaagcagaaaatgtgtgggagatgggaggcttaggaatcttgacttctgttcctataacacccagggtggtttgctttctctgtgccagtagtgggcatgtagagtttgtgtattgccaagtctgttgtgagcccttccacaagttttgtttagaggagaacgagcgccctctggaggaccagctggaaaattggtgttgtcgtcgttgcaaattctgtcacgtttgtggaaggcaacatcaggctacaaagcagctgctggagtgtaataagtgccgaaacagctatcaccctgagtgcctgggaccaaactaccccaccaaacccacaaagaagaagaaagtctggatctgtaccaagtgtgttcgctgtaagagctgtggatccacaactccaggcaaagggtgggatgcacagtggtctcatgatttctcactgtgtcatgattgcgccaagctctttgctaaaggaaacttctgccctctctgtgacaaatgttatgatgatgatgactatgagagtaagatgatgcaatgtggaaagtgtgatcgctgggtccattccaaatgtgagaatctttcaggtacagaagatgagatgtatgagattctatctaatctgccagaaagtgtggcctacacttgtgtgaactgtactgagcggcaccctgcagagtggcgactggcccttgaaaaagagctgcagatttctctgaagcaagttctgacagctttgttgaattctcggactaccagccatttgctacgctaccggcaggctgccaagcctccagacttaaatcccgagacagaggagagtataccttcccgcagctcccccgaaggacctgatccaccagttcttactgaggtcagcaaacaggatgatcagcagcctttagatctagaaggagtcaagaggaagatggaccaagggaattacacatctgtgttggagttcagtgatgatattgtgaagatcattcaagcagccattaattcagatggaggacagccagaaattaaaaaagccaacagcatggtcaagtccttcttcattcggcaaatggaacgtgtttttccatggttcagtgtcaaaaagtccaggttttgggagccaaataaagtatcaagcaacagtgggatgttaccaaacgcagtgcttccaccttcacttgaccataattatgctcagtggcaggagcgagaggaaaacagccacactgagcagcctcctttaatgaagaaaatcattccagctcccaaacccaaaggtcctggagaaccagactcaccaactcctctgcatcctcctacaccaccaattttgagtactgataggagtcgagaagacagtccagagctgaacccacccccaggcatagaagacaatagacagtgtgcgttatgtttgacttatggtgatgacagtgctaatgatgctggtcgtttactatatattggccaaaatgagtggacacatgtaaattgtgctttgtggtcagcggaagtgtttgaagatgatgacggatcactaaagaatgtgcatatggctgtgatcaggggcaagcagctgagatgtgaattctgccaaaagccaggagccaccgtgggttgctgtctcacatcctgcaccagcaactatcacttcatgtgttcccgagccaagaactgtgtctttctggatgataaaaaagtatattgccaacgacatcgggatttgatcaaaggcgaagtggttcctgagaatggatttgaagttttcagaagagtgtttgtggactttgaaggaatcagcttgagaaggaagtttctcaatggcttggaaccagaaaatatccacatgatgattgggtctatgacaatcgactgcttaggaattctaaatgatctctccgactgtgaagataagctctttcctattggatatcagtgttccagggtatactggagcaccacagatgctcgcaagcgctgtgtatatacatgcaagatagtggagtgccgtcctccagtcgtagagccggatatcaacagcactgttgaacatgatgaaaacaggaccattgcccatagtccaacatcttttacagaaagttcatcaaaagagagtcaaaacacagctgaaattataagtcctccatcaccagaccgacctcctcattcacaaacctctggctcctgttattatcatgtcatctcaaaggtccccaggattcgaacacccagttattctccaacacagagatcccctggctgtcgaccgttgccttctgcaggaagtcctaccccaaccactcatgaaatagtcacagtaggtgatcctttactctcctctggacttcgaagcattggctccaggcgtcacagtacctcttccttatcaccccagcggtccaaactccggataatgtctccaatgagaactgggaatacttactctaggaataatgtttcctcagtctccaccaccgggaccgctactgatcttgaatcaagtgccaaagtagttgatcatgtcttagggccactgaattcaagtactagtttagggcaaaacacttccacctcttcaaatttgcaaaggacagtggttactgtaggcaataaaaacagtcacttggatggatcttcatcttcagaaatgaagcagtccagtgcttcagacttggtgtccaagagctcctctttaaagggagagaagaccaaagtgctgagttccaagagctcagagggatctgcacataatgtggcttaccctggaattcctaaactggccccacaggttcataacacaacatctagagaactgaatgttagtaaaatcggctcctttgctgaaccctcttcagtgtcgttttcttctaaagaggccctctccttcccacacctccatttgagagggcaaaggaatgatcgagaccaacacacagattctacccaatcagcaaactcctctccagatgaagatactgaagtcaaaaccttgaagctatctggaatgagcaacagatcatccattatcaacgaacatatgggatctagttccagagataggagacagaaagggaaaaaatcctgtaaagaaactttcaaagaaaagcattccagtaaatcttttttggaacctggtcaggtgacaactggtgaggaaggaaacttgaagccagagtttatggatgaggttttgactcctgagtatatgggccaacgaccatgtaacaatgtttcttctgataagattggtgataaaggcctttctatgccaggagtccccaaagctccacccatgcaagtagaaggatctgccaaggaattacaggcaccacggaaacgcacagtcaaagtgacactgacacctctaaaaatggaaaatgagagtcaatccaaaaatgccctgaaagaaagtagtcctgcttcccctttgcaaatagagtcaacatctcccacagaaccaatttcagcctctgaaaatccaggagatggtccagtggcccaaccaagccccaataatacctcatgccaggattctcaaagtaacaactatcagaatcttccagtacaggacagaaacctaatgcttccagatggccccaaacctcaggaggatggctcttttaaaaggaggtatccccgtcgcagtgcccgtgcacgttctaacatgttttttgggcttaccccactctatggagtaagatcctatggtgaagaagacattccattctacagcagctcaactgggaagaagcgaggcaagagatcagctgaaggacaggtggatggggccgatgacttaagcacttcagatgaagacgacttatactattacaacttcactagaacagtgatttcttcaggtggagaggaacgactggcatcccataatttatttcgggaggaggaacagtgtgatcttccaaaaatctcacagttggatggtgttgatgatgggacagagagtgatactagtgtcacagccacaacaaggaaaagcagccagattccaaaaagaaatggtaaagaaaatggaacagagaacttaaagattgatagacctgaagatgctggggagaaagaacatgtcactaagagttctgttggccacaaaaatgagccaaagatggataactgccattctgtaagcagagttaaaacacagggacaagattccttggaagctcagctcagctcattggagtcaagccgcagagtccacacaagtaccccctccgacaaaaatttactggacacctataatactgagctcctgaaatcagattcagacaataacaacagtgatgactgtgggaatatcctgccttcagacattatggactttgtactaaagaatactccatccatgcaggctttgggtgagagcccagagtcatcttcatcagaactcctgaatcttggtgaaggattgggtcttgacagtaatcgtgaaaaagacatgggtctttttgaagtattttctcagcagctgcctacaacagaacctgtggatagtagtgtctcttcctctatctcagcagaggaacagtttgagttgcctctagagctaccatctgatctgtctgtcttgaccacccggagtcccactgtccccagccagaatcccagtagactagctgttatctcagactcaggggagaagagagtaaccatcacagaaaaatctgtagcctcctctgaaagtgacccagcactgctgagcccaggagtagatccaactcctgaaggccacatgactcctgatcattttatccaaggacacatggatgcagaccacatctctagccctccttgtggttcagtagagcaaggtcatggcaacaatcaggatttaactaggaacagtagcacccctggccttcaggtacctgtttccccaactgttcccatccagaaccagaagtatgtgcccaattctactgatagtcctggcccgtctcagatttccaatgcagctgtccagaccactccaccccacctgaagccagccactgagaaactcatagttgttaaccagaacatgcagccactttatgttctccaaactcttccaaatggagtgacccaaaaaatccaattgacctcttctgttagttctacacccagtgtgatggagacaaatacttcagtattgggacccatgggaggtggtctcacccttaccacaggactaaatccaagcttgccaacttctcaatctttgttcccttctgctagcaaaggattgctacccatgtctcatcaccagcacttacattccttccctgcagctactcaaagtagtttcccaccaaacatcagcaatcctccttcaggcctgcttattggggttcagcctcctccggatccccaacttttggtttcagaatccagccagaggacagacctcagtaccacagtagccactccatcctctggactcaagaaaagacccatatctcgtctacagacccgaaagaataaaaaacttgctccctctagtaccccttcaaacattgccccttctgatgtggtttctaatatgacattgattaacttcacaccctcccagcttcctaatcatccaagtctgttagatttggggtcacttaatacttcatctcaccgaactgtccccaacatcataaaaagatctaaatctagcatcatgtattttgaaccggcacccctgttaccacagagtgtgggaggaactgctgccacagcggcaggcacatcaacaataagccaggatactagccacctcacatcagggtctgtgtctggcttggcatccagttcctctgtcttgaatgttgtatccatgcaaactaccacaacccctacaagtagtgcgtcagttccaggacacgtcaccttaaccaacccaaggttgcttggtaccccagatattggctcaataagcaatcttttaatcaaagctagccagcagagcctggggattcaggaccagcctgtggctttaccgccaagttcaggaatgtttccacaactggggacatcacagaccccctctactgctgcaataacagcggcatctagcatctgtgtgctcccctccactcagactacgggcataacagccgcttcaccttctggggaagcagacgaacactatcagcttcagcatgtgaaccagctccttgccagcaaaactgggattcattcttcccagcgtgatcttgattctgcttcagggccccaggtatccaactttacccagacggtagacgctcctaatagcatgggactggagcagaacaaggctttatcctcagctgtgcaagccagccccacctctcctgggggttctccatcctctccatcttctggacagcggtcagcaagcccttcagtgccgggtcccactaaacccaaaccaaaaaccaaacggtttcagctgcctctagacaaagggaatggcaagaagcacaaagtttcccatttgcggaccagttcttctgaagcacacattccagaccaagaaacgacatccctgacctcaggcacagggactccaggagcagaggctgagcagcaggatacagctagcgtggagcagtcctcccagaaggagtgtgggcaacctgcagggcaagtcgctgttcttccggaagttcaggtgacccaaaatccagcaaatgaacaagaaagtgcagaacctaaaacagtggaagaagaggaaagtaatttcagctccccactgatgctttggcttcagcaagaacaaaagcggaaggaaagcattactgagaaaaaacccaagaaaggacttgtttttgaaatttccagtgatgatggctttcagatctgtgcagaaagtattgaagatgcctggaagtcattgacagataaagtccaggaagctcgatcaaatgcccgcctaaagcagctctcatttgcaggtgttaacggtttgaggatgctggggattctccatgatgcagttgtgttcctcattgagcagctgtctggtgccaagcactgtcgaaattacaaattccgtttccacaagccagaggaggccaatgaaccccccttgaaccctcacggctcagccagggctgaagtccacctcaggaagtcagcatttgacatgtttaacttcctggcttctaaacatcgtcagcctcctgaatacaaccccaatgatgaagaagaggaggaggtacagctgaagtcagctcggagggcaactagcatggatctgccaatgcccatgcgcttccggcacttaaaaaagacttctaaggaggcagttggtgtctacaggtctcccatccatggccggggtcttttctgtaagagaaacattgatgcaggtgagatggtgattgagtatgccggcaacgtcatccgctccatccagactgacaagcgggaaaagtattacgacagcaagggcattggttgctatatgttccgaattgatgactcagaggtagtggatgccaccatgcatggaaatgctgcacgcttcatcaatcactcgtgtgagcctaactgctattctcgggtcatcaatattgatgggcagaagcacattgtcatctttgccatgcgtaagatctaccgaggagaggaactcacttacgactataagttccccattgaggatgccagcaacaagctgccctgcaactgtggcgccaagaaatgccggaagttcctaaactaaagctgctcttctcccccagtgttggagtgcaaggaggcggggccatccaaagcaacgctgaaggccttttccagcagctgggagctcccggattgcgtggcacagctgaggggcctctgtgatggctgagctctcttatgtcctatactcacatcagacatgtgatcatagtcccagagacagagttgaggtctcgaagaaaagatccatgatcggctttctcctggggcccctccaattgtttactgttagaaagtgggaatggggtccctagcagacttgcctggaaggagcctattatagagggttggttatgttgggagattgggcctgaatttctccacagaaataagttgccatcctcaggttggccctttcccaagcactgtaagtgagtgggtcaggcaaagccccaaatggagggttggttagattcctgacagtttgccagccaggccccacctacagcgtctgtcgaacaaacagaggtctggtggttttccctactatcctcccactcgagagttcacttctggttgggagacaggattcctagcacctccggtgtcaaaaggctgtcatggggttgtgccaattaattaccaaacattgagcctgcaggctttgagtgggagtgttgcccccaggagccttatctcagccaattacctttcttgacagtaggagcggcttccctctcccattccctcttcactcccttttcttcctttcccctgtcttcatgccactgctttcccatgcttctttcgggttgtaggggagactgactgcctgctcaaggacactccctgctgggcataggatgtgcctgcaaaaagttccctgagcctgtaagcactccaggtggggaagtggacaggagccattggtcataaccagacagaatttggaaacattttcataaagctccatggagagttttaaagaaacatatgtagcatgattttgtaggagaggaaaaagattatttaaataggatttaaatcatgcaacaacgagagtatcacagccaggatgacccttgggtcccattcctaagacatggttactttattttccccttgttaagacataggaagacttaatttttaaacggtcagtgtccagttgaaggcagaacactaatcagatttcaaggcccacaacttggggactagaccaccttatgttgagggaactctgccacctgcgtgcaacccacagctaaagtaaattcaatgacactactgccctgattactccttaggatgtggtcaaaacagcatcaaatgtttcttctcttcctttccccaagacagagtcctgaacctgttaaattaagtcattggattttactctgttctgtttacagtttactatttaaggttttataaatgtaaatatattttgtatatttttctatgagaagcacttcatagggagaagcacttatgacaaggctattttttaaaccgcggtattatcctaatttaaaagaagatcggtttttaataattttttattttcataggatgaagttagagaaaatattcagctgtacacacaaagtctggtttttcctgcccaacttccccctggaaggtgtactttttgttgtttaatgtgtagcttgtttgtgccctgttgacataaatgtttcctgggtttgctctttgacaataaatggagaaggaaggtcacccaactccattgggccactcccctccttcccctattgaagctcctcaaaaggctacagtaatatcttgatacaacagattctcttctttcccgcctctctcctttccggcgcaacttccagagtggtgggagacggcaatctttacatttccctcatctttcttacttcagagttagcaaacaacaagttgaatggcaacttgacatttttgcatcaccatctgcctcataggccactctttcctttccctctgcccaccaagtcctcatatctgcagagaacccattgatcaccttgtgccctcttttggggcagcctgttgaaactgaagcacagtctgaccactcacgataaagcagatttttctctgcctctgccacaaggtttcagagtagtgtagtccaagtagagggtggggcacccttttctcgccgcaagaagcccattcctatggaagtctagcaaagcaatacgactcagcccagcactctctgccccaggactcatggctctgctgtgccttccatcctgggctcccttctctcctgtgaccttaagaactttgtctggtggctttgctggaacattgtcactgttttcactgtcatgcagggagcccagcactgtggccaggatggcagagacttccttgtcatcatggagaagtgccagcaggggactgggaaaagcactctacccagacctcacctcccttcctccttttgcccatgaacaagatgcagtggccctaggggttccactagtgtctgctttcctttattattgcactgtgtgaggtttttttgtaaatccttgtattcc

SEQ ID NO: 18983 - DNA, 14320 bp, Homo sapiens
  source 1..14320: mol_type = unassigned DNA
atggcgcacagctgtcggtggcgcttccccgcccgacccgggaccaccgggggcggcggcggcggggggcgccggggcctagggggcgccccgcggcaacgcgtcccggccctgctgcttccccccgggcccccggtcggcggtggcggccccggggcgcccccctcccccccggctgtggcggccgcggcggcggcggcgggaagcagcggggctggggttccagggggagcggccgccgcctcagcagcctcctcgtcgtccgcctcgtcttcgtcttcgtcatcgtcctcagcctcttcagggccggccctgctccgggtgggcccgggcttcgacgcggcgctgcaggtctcggccgccatcggcaccaacctgcgccggttccgggccgtgtttggggagagcggcgggggaggcggcagcggagaggatgagcaattcttaggttttggctcagatgaagaagtcagagtgcgaagtcccacaaggtctccttcagttaaaactagtcctcgaaaacctcgtgggagacctagaagtggctctgaccgaaattcagctatcctctcagatccatctgtgttttcccctctaaataaatcagagaccaaatctggagataagatcaagaagaaagattctaaaagtatagaaaagaagagaggaagacctcccaccttccctggagtaaaaatcaaaataacacatggaaaggacatttcagagttaccaaagggaaacaaagaagatagcctgaaaaaaattaaaaggacaccttctgctacgtttcagcaagccacaaagattaaaaaattaagagcaggtaaactctctcctctcaagtctaagtttaagacagggaagcttcaaataggaaggaagggggtacaaattgtacgacggagaggaaggcctccatcaacagaaaggataaagaccccttcgggtctcctcattaattctgaactggaaaagccccagaaagtccggaaagacaaggaaggaacacctccacttacaaaagaagataagacagttgtcagacaaagccctcgaaggattaagccagttaggattattccttcttcaaaaaggacagatgcaaccattgctaagcaactcttacagagggcaaaaaagggggctcaaaagaaaattgaaaaagaagcagctcagctgcagggaagaaaggtgaagacacaggtcaaaaatattcgacagttcatcatgcctgttgtcagtgctatctcctcgcggatcattaagacccctcggcggtttatagaggatgaggattatgaccctccaattaaaattgcccgattagagtctacaccgaatagtagattcagtgccccgtcctgtggatcttctgaaaaatcaagtgcagcttctcagcactcctctcaaatgtcttcagactcctctcgatctagtagccccagtgttgatacctccacagactctcaggcttctgaggagattcaggtacttcctgaggagcggagcgatacccctgaagttcatcctccactgcccatttcccagtccccagaaaatgagagtaatgataggagaagcagaaggtattcagtgtcggagagaagttttggatctagaacgacgaaaaaattatcaactctacaaagtgccccccagcagcagacctcctcgtctccacctccacctctgctgactccaccgccaccactgcagccagcctccagtatctctgaccacacaccttggcttatgcctccaacaatccccttagcatcaccatttttgcctgcttccactgctcctatgcaagggaagcgaaaatctattttgcgagaaccgacatttaggtggacttctttaaagcattctaggtcagagccacaatacttttcctcagcaaagtatgccaaagaaggtcttattcgcaaaccaatatttgataatttccgaccccctccactaactcccgaggacgttggctttgcatctggtttttctgcatctggtaccgctgcttcagcccgattgttttcgccactccattctggaacaaggtttgatatgcacaaaaggagccctcttctgagagctccaagatttactccaagtgaggctcactctagaatatttgagtctgtaaccttgcctagtaatcgaacttctgctggaacatcttcttcaggagtatccaatagaaaaaggaaaagaaaagtgtttagtcctattcgatctgaaccaagatctccttctcactccatgaggacaagaagtggaaggcttagtagttctgagctctcacctctcacccccccgtcttctgtctcttcctcgttaagcatttctgttagtcctcttgccactagtgccttaaacccaacttttacttttccttctcattccctgactcagtctggggaatctgcagagaaaaatcagagaccaaggaagcagactagtgctccggcagagccattttcatcaagtagtcctactcctctcttcccttggtttaccccaggctctcagactgaaagagggagaaataaagacaaggcccccgaggagctgtccaaagatcgagatgctgacaagagcgtggagaaggacaagagtagagagagagaccgggagagagaaaaggagaataagcgggagtcaaggaaagagaaaaggaaaaagggatcagaaattcagagtagttctgctttgtatcctgtgggtagggtttccaaagagaaggttgttggtgaagatgttgccacttcatcttctgccaaaaaagcaacagggcggaagaagtcttcatcacatgattctgggactgatattacttctgtgactcttggggatacaacagctgtcaaaaccaaaatacttataaagaaagggagaggaaatctggaaaaaaccaacttggacctcggcccaactgccccatccctggagaaggagaaaaccctctgcctttccactccttcatctagcactgttaaacattccacttcctccataggctccatgttggctcaggcagacaagcttccaatgactgacaagagggttgccagcctcctaaaaaaggccaaagctcagctctgcaagattgagaagagtaagagtcttaaacaaaccgaccagcccaaagcacagggtcaagaaagtgactcatcagagacctctgtgcgaggaccccggattaaacatgtctgcagaagagcagctgttgcccttggccgaaaacgagctgtgtttcctgatgacatgcccaccctgagtgccttaccatgggaagaacgagaaaagattttgtcttccatggggaatgatgacaagtcatcaattgctggctcagaagatgctgaacctcttgctccacccatcaaaccaattaaacctgtcactagaaacaaggcaccccaggaacctccagtaaagaaaggacgtcgatcgaggcggtgtgggcagtgtcccggctgccaggtgcctgaggactgtggtgtttgtactaattgcttagataagcccaagtttggtggtcgcaatataaagaagcagtgctgcaagatgagaaaatgtcagaatctacaatggatgccttccaaagcctacctgcagaagcaagctaaagctgtgaaaaagaaagagaaaaagtctaagaccagtgaaaagaaagacagcaaagagagcagtgttgtgaagaacgtggtggactctagtcagaaacctaccccatcagcaagagaggatcctgccccaaagaaaagcagtagtgagcctcctccacgaaagcccgtcgaggaaaagagtgaagaagggaatgtctcggcccctgggcctgaatccaaacaggccaccactccagcttccaggaagtcaagcaagcaggtctcccagccagcactggtcatcccgcctcagccacctactacaggaccgccaagaaaagaagttcccaaaaccactcctagtgagcccaagaaaaagcagcctccaccaccagaatcaggtccagagcagagcaaacagaaaaaagtggctccccgcccaagtatccctgtaaaacaaaaaccaaaagaaaaggaaaaaccacctccggtcaataagcaggagaatgcaggcactttgaacatcctcagcactctctccaatggcaatagttctaagcaaaaaattccagcagatggagtccacaggatcagagtggactttaagtttgtgtattgccaagtctgttgtgagcccttccacaagttttgtttagaggagaacgagcgccctctggaggaccagctggaaaattggtgttgtcgtcgttgcaaattctgtcacgtttgtggaaggcaacatcaggctacaaagcagctgctggagtgtaataagtgccgaaacagctatcaccctgagtgcctgggaccaaactaccccaccaaacccacaaagaagaagaaagtctggatctgtaccaagtgtgttcgctgtaagagctgtggatccacaactccaggcaaagggtgggatgcacagtggtctcatgatttctcactgtgtcatgattgcgccaagctctttgctaaaggaaacttctgccctctctgtgacaaatgttatgatgatgatgactatgagagtaagatgatgcaatgtggaaagtgtgatcgctgggtccattccaaatgtgagaatctttcagatgagatgtatgagattctatctaatctgccagaaagtgtggcctacacttgtgtgaactgtactgagcggcaccctgcagagtggcgactggcccttgaaaaagagctgcagatttctctgaagcaagttctgacagctttgttgaattctcggactaccagccatttgctacgctaccggcaggctgccaagcctccagacttaaatcccgagacagaggagagtataccttcccgcagctcccccgaaggacctgatccaccagttcttactgaggtcagcaaacaggatgatcagcagcctttagatctagaaggagtcaagaggaagatggaccaagggaattacacatctgtgttggagttcagtgatgatattgtgaagatcattcaagcagccattaattcagatggaggacagccagaaattaaaaaagccaacagcatggtcaagtccttcttcattcggcaaatggaacgtgtttttccatggttcagtgtcaaaaagtccaggttttgggagccaaataaagtatcaagcaacagtgggatgttaccaaacgcagtgcttccaccttcacttgaccataattatgctcagtggcaggagcgagaggaaaacagccacactgagcagcctcctttaatgaagaaaatcattccagctcccaaacccaaaggtcctggagaaccagactcaccaactcctctgcatcctcctacaccaccaattttgagtactgataggagtcgagaagacagtccagagctgaacccacccccaggcatagaagacaatagacagtgtgcgttatgtttgacttatggtgatgacagtgctaatgatgctggtcgtttactatatattggccaaaatgagtggacacatgtaaattgtgctttgtggtcagcggaagtgtttgaagatgatgacggatcactaaagaatgtgcatatggctgtgatcaggggcaagcagctgagatgtgaattctgccaaaagccaggagccaccgtgggttgctgtctcacatcctgcaccagcaactatcacttcatgtgttcccgagccaagaactgtgtctttctggatgataaaaaagtatattgccaacgacatcgggatttgatcaaaggcgaagtggttcctgagaatggatttgaagttttcagaagagtgtttgtggactttgaaggaatcagcttgagaaggaagtttctcaatggcttggaaccagaaaatatccacatgatgattgggtctatgacaatcgactgcttaggaattctaaatgatctctccgactgtgaagataagctctttcctattggatatcagtgttccagggtatactggagcaccacagatgctcgcaagcgctgtgtatatacatgcaagatagtggagtgccgtcctccagtcgtagagccggatatcaacagcactgttgaacatgatgaaaacaggaccattgcccatagtccaacatcttttacagaaagttcatcaaaagagagtcaaaacacagctgaaattataagtcctccatcaccagaccgacctcctcattcacaaacctctggctcctgttattatcatgtcatctcaaaggtccccaggattcgaacacccagttattctccaacacagagatcccctggctgtcgaccgttgccttctgcaggaagtcctaccccaaccactcatgaaatagtcacagtaggtgatcctttactctcctctggacttcgaagcattggctccaggcgtcacagtacctcttccttatcaccccagcggtccaaactccggataatgtctccaatgagaactgggaatacttactctaggaataatgtttcctcagtctccaccaccgggaccgctactgatcttgaatcaagtgccaaagtagttgatcatgtcttagggccactgaattcaagtactagtttagggcaaaacacttccacctcttcaaatttgcaaaggacagtggttactgtaggcaataaaaacagtcacttggatggatcttcatcttcagaaatgaagcagtccagtgcttcagacttggtgtccaagagctcctctttaaagggagagaagaccaaagtgctgagttccaagagctcagagggatctgcacataatgtggcttaccctggaattcctaaactggccccacaggttcataacacaacatctagagaactgaatgttagtaaaatcggctcctttgctgaaccctcttcagtgtcgttttcttctaaagaggccctctccttcccacacctccatttgagagggcaaaggaatgatcgagaccaacacacagattctacccaatcagcaaactcctctccagatgaagatactgaagtcaaaaccttgaagctatctggaatgagcaacagatcatccattatcaacgaacatatgggatctagttccagagataggagacagaaagggaaaaaatcctgtaaagaaactttcaaagaaaagcattccagtaaatcttttttggaacctggtcaggtgacaactggtgaggaaggaaacttgaagccagagtttatggatgaggttttgactcctgagtatatgggccaacgaccatgtaacaatgtttcttctgataagattggtgataaaggcctttctatgccaggagtccccaaagctccacccatgcaagtagaaggatctgccaaggaattacaggcaccacggaaacgcacagtcaaagtgacactgacacctctaaaaatggaaaatgagagtcaatccaaaaatgccctgaaagaaagtagtcctgcttcccctttgcaaatagagtcaacatctcccacagaaccaatttcagcctctgaaaatccaggagatggtccagtggcccaaccaagccccaataatacctcatgccaggattctcaaagtaacaactatcagaatcttccagtacaggacagaaacctaatgcttccagatggccccaaacctcaggaggatggctcttttaaaaggaggtatccccgtcgcagtgcccgtgcacgttctaacatgttttttgggcttaccccactctatggagtaagatcctatggtgaagaagacattccattctacagcagctcaactgggaagaagcgaggcaagagatcagctgaaggacaggtggatggggccgatgacttaagcacttcagatgaagacgacttatactattacaacttcactagaacagtgatttcttcaggtggagaggaacgactggcatcccataatttatttcgggaggaggaacagtgtgatcttccaaaaatctcacagttggatggtgttgatgatgggacagagagtgatactagtgtcacagccacaacaaggaaaagcagccagattccaaaaagaaatggtaaagaaaatggaacagagaacttaaagattgatagacctgaagatgctggggagaaagaacatgtcactaagagttctgttggccacaaaaatgagccaaagatggataactgccattctgtaagcagagttaaaacacagggacaagattccttggaagctcagctcagctcattggagtcaagccgcagagtccacacaagtaccccctccgacaaaaatttactggacacctataatactgagctcctgaaatcagattcagacaataacaacagtgatgactgtgggaatatcctgccttcagacattatggactttgtactaaagaatactccatccatgcaggctttgggtgagagcccagagtcatcttcatcagaactcctgaatcttggtgaaggattgggtcttgacagtaatcgtgaaaaagacatgggtctttttgaagtattttctcagcagctgcctacaacagaacctgtggatagtagtgtctcttcctctatctcagcagaggaacagtttgagttgcctctagagctaccatctgatctgtctgtcttgaccacccggagtcccactgtccccagccagaatcccagtagactagctgttatctcagactcaggggagaagagagtaaccatcacagaaaaatctgtagcctcctctgaaagtgacccagcactgctgagcccaggagtagatccaactcctgaaggccacatgactcctgatcattttatccaaggacacatggatgcagaccacatctctagccctccttgtggttcagtagagcaaggtcatggcaacaatcaggatttaactaggaacagtagcacccctggccttcaggtacctgtttccccaactgttcccatccagaaccagaagtatgtgcccaattctactgatagtcctggcccgtctcagatttccaatgcagctgtccagaccactccaccccacctgaagccagccactgagaaactcatagttgttaaccagaacatgcagccactttatgttctccaaactcttccaaatggagtgacccaaaaaatccaattgacctcttctgttagttctacacccagtgtgatggagacaaatacttcagtattgggacccatgggaggtggtctcacccttaccacaggactaaatccaagcttgccaacttctcaatctttgttcccttctgctagcaaaggattgctacccatgtctcatcaccagcacttacattccttccctgcagctactcaaagtagtttcccaccaaacatcagcaatcctccttcaggcctgcttattggggttcagcctcctccggatccccaacttttggtttcagaatccagccagaggacagacctcagtaccacagtagccactccatcctctggactcaagaaaagacccatatctcgtctacagacccgaaagaataaaaaacttgctccctctagtaccccttcaaacattgccccttctgatgtggtttctaatatgacattgattaacttcacaccctcccagcttcctaatcatccaagtctgttagatttggggtcacttaatacttcatctcaccgaactgtccccaacatcataaaaagatctaaatctagcatcatgtattttgaaccggcacccctgttaccacagagtgtgggaggaactgctgccacagcggcaggcacatcaacaataagccaggatactagccacctcacatcagggtctgtgtctggcttggcatccagttcctctgtcttgaatgttgtatccatgcaaactaccacaacccctacaagtagtgcgtcagttccaggacacgtcaccttaaccaacccaaggttgcttggtaccccagatattggctcaataagcaatcttttaatcaaagctagccagcagagcctggggattcaggaccagcctgtggctttaccgccaagttcaggaatgtttccacaactggggacatcacagaccccctctactgctgcaataacagcggcatctagcatctgtgtgctcccctccactcagactacgggcataacagccgcttcaccttctggggaagcagacgaacactatcagcttcagcatgtgaaccagctccttgccagcaaaactgggattcattcttcccagcgtgatcttgattctgcttcagggccccaggtatccaactttacccagacggtagacgctcctaatagcatgggactggagcagaacaaggctttatcctcagctgtgcaagccagccccacctctcctgggggttctccatcctctccatcttctggacagcggtcagcaagcccttcagtgccgggtcccactaaacccaaaccaaaaaccaaacggtttcagctgcctctagacaaagggaatggcaagaagcacaaagtttcccatttgcggaccagttcttctgaagcacacattccagaccaagaaacgacatccctgacctcaggcacagggactccaggagcagaggctgagcagcaggatacagctagcgtggagcagtcctcccagaaggagtgtgggcaacctgcagggcaagtcgctgttcttccggaagttcaggtgacccaaaatccagcaaatgaacaagaaagtgcagaacctaaaacagtggaagaagaggaaagtaatttcagctccccactgatgctttggcttcagcaagaacaaaagcggaaggaaagcattactgagaaaaaacccaagaaaggacttgtttttgaaatttccagtgatgatggctttcagatctgtgcagaaagtattgaagatgcctggaagtcattgacagataaagtccaggaagctcgatcaaatgcccgcctaaagcagctctcatttgcaggtgttaacggtttgaggatgctggggattctccatgatgcagttgtgttcctcattgagcagctgtctggtgccaagcactgtcgaaattacaaattccgtttccacaagccagaggaggccaatgaaccccccttgaaccctcacggctcagccagggctgaagtccacctcaggaagtcagcatttgacatgtttaacttcctggcttctaaacatcgtcagcctcctgaatacaaccccaatgatgaagaagaggaggaggtacagctgaagtcagctcggagggcaactagcatggatctgccaatgcccatgcgcttccggcacttaaaaaagacttctaaggaggcagttggtgtctacaggtctcccatccatggccggggtcttttctgtaagagaaacattgatgcaggtgagatggtgattgagtatgccggcaacgtcatccgctccatccagactgacaagcgggaaaagtattacgacagcaagggcattggttgctatatgttccgaattgatgactcagaggtagtggatgccaccatgcatggaaatgctgcacgcttcatcaatcactcgtgtgagcctaactgctattctcgggtcatcaatattgatgggcagaagcacattgtcatctttgccatgcgtaagatctaccgaggagaggaactcacttacgactataagttccccattgaggatgccagcaacaagctgccctgcaactgtggcgccaagaaatgccggaagttcctaaactaaagctgctcttctcccccagtgttggagtgcaaggaggcggggccatccaaagcaacgctgaaggccttttccagcagctgggagctcccggattgcgtggcacagctgaggggcctctgtgatggctgagctctcttatgtcctatactcacatcagacatgtgatcatagtcccagagacagagttgaggtctcgaagaaaagatccatgatcggctttctcctggggcccctccaattgtttactgttagaaagtgggaatggggtccctagcagacttgcctggaaggagcctattatagagggttggttatgttgggagattgggcctgaatttctccacagaaataagttgccatcctcaggttggccctttcccaagcactgtaagtgagtgggtcaggcaaagccccaaatggagggttggttagattcctgacagtttgccagccaggccccacctacagcgtctgtcgaacaaacagaggtctggtggttttccctactatcctcccactcgagagttcacttctggttgggagacaggattcctagcacctccggtgtcaaaaggctgtcatggggttgtgccaattaattaccaaacattgagcctgcaggctttgagtgggagtgttgcccccaggagccttatctcagccaattacctttcttgacagtaggagcggcttccctctcccattccctcttcactcccttttcttcctttcccctgtcttcatgccactgctttcccatgcttctttcgggttgtaggggagactgactgcctgctcaaggacactccctgctgggcataggatgtgcctgcaaaaagttccctgagcctgtaagcactccaggtggggaagtggacaggagccattggtcataaccagacagaatttggaaacattttcataaagctccatggagagttttaaagaaacatatgtagcatgattttgtaggagaggaaaaagattatttaaataggatttaaatcatgcaacaacgagagtatcacagccaggatgacccttgggtcccattcctaagacatggttactttattttccccttgttaagacataggaagacttaatttttaaacggtcagtgtccagttgaaggcagaacactaatcagatttcaaggcccacaacttggggactagaccaccttatgttgagggaactctgccacctgcgtgcaacccacagctaaagtaaattcaatgacactactgccctgattactccttaggatgtggtcaaaacagcatcaaatgtttcttctcttcctttccccaagacagagtcctgaacctgttaaattaagtcattggattttactctgttctgtttacagtttactatttaaggttttataaatgtaaatatattttgtatatttttctatgagaagcacttcatagggagaagcacttatgacaaggctattttttaaaccgcggtattatcctaatttaaaagaagatcggtttttaataattttttattttcataggatgaagttagagaaaatattcagctgtacacacaaagtctggtttttcctgcccaacttccccctggaaggtgtactttttgttgtttaatgtgtagcttgtttgtgccctgttgacataaatgtttcctgggtttgctctttgacaataaatggagaaggaaggtcacccaactccattgggccactcccctccttcccctattgaagctcctcaaaaggctacagtaatatcttgatacaacagattctcttctttcccgcctctctcctttccggcgcaacttccagagtggtgggagacggcaatctttacatttccctcatctttcttacttcagagttagcaaacaacaagttgaatggcaacttgacatttttgcatcaccatctgcctcataggccactctttcctttccctctgcccaccaagtcctcatatctgcagagaacccattgatcaccttgtgccctcttttggggcagcctgttgaaactgaagcacagtctgaccactcacgataaagcagatttttctctgcctctgccacaaggtttcagagtagtgtagtccaagtagagggtggggcacccttttctcgccgcaagaagcccattcctatggaagtctagcaaagcaatacgactcagcccagcactctctgccccaggactcatggctctgctgtgccttccatcctgggctcccttctctcctgtgaccttaagaactttgtctggtggctttgctggaacattgtcactgttttcactgtcatgcagggagcccagcactgtggccaggatggcagagacttccttgtcatcatggagaagtgccagcaggggactgggaaaagcactctacccagacctcacctcccttcctccttttgcccatgaacaagatgcagtggccctaggggttccactagtgtctgctttcctttattattgcactgtgtgaggtttttttgtaaatccttgtattcc

SEQ ID NO: 18984 - DNA, 14244 bp, Homo sapiens
  source 1..14244: mol_type = unassigned DNA
gcggcggcggcggcgggaagcagcggggctggggttccagggggagcggccgccgcctcagcagcctcctcgtcgtccgcctcgtcttcgtcttcgtcatcgtcctcagcctcttcagggccggccctgctccgggtgggcccgggcttcgacgcggcgctgcaggtctcggccgccatcggcaccaacctgcgccggttccgggccgtgtttggggagagcggcgggggaggcggcagcggagaggatgagcaattcttaggttttggctcagatgaagaagtcagagtgcgaagtcccacaaggtctccttcagttaaaactagtcctcgaaaacctcgtgggagacctagaagtggctctgaccgaaattcagctatcctctcagatccatctgtgttttcccctctaaataaatcagagaccaaatctggagataagatcaagaagaaagattctaaaagtatagaaaagaagagaggaagacctcccaccttccctggagtaaaaatcaaaataacacatggaaaggacatttcagagttaccaaagggaaacaaagaagatagcctgaaaaaaattaaaaggacaccttctgctacgtttcagcaagccacaaagattaaaaaattaagagcaggtaaactctctcctctcaagtctaagtttaagacagggaagcttcaaataggaaggaagggggtacaaattgtacgacggagaggaaggcctccatcaacagaaaggataaagaccccttcgggtctcctcattaattctgaactggaaaagccccagaaagtccggaaagacaaggaaggaacacctccacttacaaaagaagataagacagttgtcagacaaagccctcgaaggattaagccagttaggattattccttcttcaaaaaggacagatgcaaccattgctaagcaactcttacagagggcaaaaaagggggctcaaaagaaaattgaaaaagaagcagctcagctgcagggaagaaaggtgaagacacaggtcaaaaatattcgacagttcatcatgcctgttgtcagtgctatctcctcgcggatcattaagacccctcggcggtttatagaggatgaggattatgaccctccaattaaaattgcccgattagagtctacaccgaatagtagattcagtgccccgtcctgtggatcttctgaaaaatcaagtgcagcttctcagcactcctctcaaatgtcttcagactcctctcgatctagtagccccagtgttgatacctccacagactctcaggcttctgaggagattcaggtacttcctgaggagcggagcgatacccctgaagttcatcctccactgcccatttcccagtccccagaaaatgagagtaatgataggagaagcagaaggtattcagtgtcggagagaagttttggatctagaacgacgaaaaaattatcaactctacaaagtgccccccagcagcagacctcctcgtctccacctccacctctgctgactccaccgccaccactgcagccagcctccagtatctctgaccacacaccttggcttatgcctccaacaatccccttagcatcaccatttttgcctgcttccactgctcctatgcaagggaagcgaaaatctattttgcgagaaccgacatttaggtggacttctttaaagcattctaggtcagagccacaatacttttcctcagcaaagtatgccaaagaaggtcttattcgcaaaccaatatttgataatttccgaccccctccactaactcccgaggacgttggctttgcatctggtttttctgcatctggtaccgctgcttcagcccgattgttttcgccactccattctggaacaaggtttgatatgcacaaaaggagccctcttctgagagctccaagatttactccaagtgaggctcactctagaatatttgagtctgtaaccttgcctagtaatcgaacttctgctggaacatcttcttcaggagtatccaatagaaaaaggaaaagaaaagtgtttagtcctattcgatctgaaccaagatctccttctcactccatgaggacaagaagtggaaggcttagtagttctgagctctcacctctcacccccccgtcttctgtctcttcctcgttaagcatttctgttagtcctcttgccactagtgccttaaacccaacttttacttttccttctcattccctgactcagtctggggaatctgcagagaaaaatcagagaccaaggaagcagactagtgctccggcagagccattttcatcaagtagtcctactcctctcttcccttggtttaccccaggctctcagactgaaagagggagaaataaagacaaggcccccgaggagctgtccaaagatcgagatgctgacaagagcgtggagaaggacaagagtagagagagagaccgggagagagaaaaggagaataagcgggagtcaaggaaagagaaaaggaaaaagggatcagaaattcagagtagttctgctttgtatcctgtgggtagggtttccaaagagaaggttgttggtgaagatgttgccacttcatcttctgccaaaaaagcaacagggcggaagaagtcttcatcacatgattctgggactgatattacttctgtgactcttggggatacaacagctgtcaaaaccaaaatacttataaagaaagggagaggaaatctggaaaaaaccaacttggacctcggcccaactgccccatccctggagaaggagaaaaccctctgcctttccactccttcatctagcactgttaaacattccacttcctccataggctccatgttggctcaggcagacaagcttccaatgactgacaagagggttgccagcctcctaaaaaaggccaaagctcagctctgcaagattgagaagagtaagagtcttaaacaaaccgaccagcccaaagcacagggtcaagaaagtgactcatcagagacctctgtgcgaggaccccggattaaacatgtctgcagaagagcagctgttgcccttggccgaaaacgagctgtgtttcctgatgacatgcccaccctgagtgccttaccatggaacgagaaaagattttgtcttccatggggaatgatgacaagtcatcaattgctggctcagaagatgctgaacctcttgctccacccatcaaaccaattaaacctgtcactagaaacaaggcaccccaggaacctccagtaaagaaaggacgtcgatcgaggcggtgtgggcagtgtcccggctgccaggtgcctgaggactgtggtgtttgtactaattgcttagataagcccaagtttggtggtcgcaatataaagaagcagtgctgcaagatgagaaaatgtcagaatctacaatggatgccttccaaagcctacctgcagaagcaagctaaagctgtgaaaaagaaagagaaaaagtctaagaccagtgaaaagaaagacagcaaagagagcagtgttgtgaagaacgtggtggactctagtcagaaacctaccccatcagcaagagaggatcctgccccaaagaaaagcagtagtgagcctcctccacgaaagcccgtcgaggaaaagagtgaagaagggaatgtctcggcccctgggcctgaatccaaacaggccaccactccagcttccaggaagtcaagcaagcaggtctcccagccagcactggtcatcccgcctcagccacctactacaggaccgccaagaaaagaagttcccaaaaccactcctagtgagcccaagaaaaagcagcctccaccaccagaatcaggtccagagcagagcaaacagaaaaaagtggctccccgcccaagtatccctgtaaaacaaaaaccaaaagaaaaggaaaaaccacctccggtcaataagcaggagaatgcaggcactttgaacatcctcagcactctctccaatggcaatagttctaagcaaaaaattccagcagatggagtccacaggatcagagtggactttaaggaggattgtgaagcagaaaatgtgtgggagatgggaggcttaggaatcttgacttctgttcctataacacccagggtggtttgctttctctgtgccagtagtgggcatgtagagtttgtgtattgccaagtctgttgtgagcccttccacaagttttgtttagaggagaacgagcgccctctggaggaccagctggaaaattggtgttgtcgtcgttgcaaattctgtcacgtttgtggaaggcaacatcaggctacaaagcagctgctggagtgtaataagtgccgaaacagctatcaccctgagtgcctgggaccaaactaccccaccaaacccacaaagaagaagaaagtctggatctgtaccaagtgtgttcgctgtaagagctgtggatccacaactccaggcaaagggtgggatgcacagtggtctcatgatttctcactgtgtcatgattgcgccaagctctttgctaaaggaaacttctgccctctctgtgacaaatgttatgatgatgatgactatgagagtaagatgatgcaatgtggaaagtgtgatcgctgggtccattccaaatgtgagaatctttcagatgagatgtatgagattctatctaatctgccagaaagtgtggcctacacttgtgtgaactgtactgagcggcaccctgcagagtggcgactggcccttgaaaaagagctgcagatttctctgaagcaagttctgacagctttgttgaattctcggactaccagccatttgctacgctaccggcaggctgccaagcctccagacttaaatcccgagacagaggagagtataccttcccgcagctcccccgaaggacctgatccaccagttcttactgaggtcagcaaacaggatgatcagcagcctttagatctagaaggagtcaagaggaagatggaccaagggaattacacatctgtgttggagttcagtgatgatattgtgaagatcattcaagcagccattaattcagatggaggacagccagaaattaaaaaagccaacagcatggtcaagtccttcttcattcggcaaatggaacgtgtttttccatggttcagtgtcaaaaagtccaggttttgggagccaaataaagtatcaagcaacagtgggatgttaccaaacgcagtgcttccaccttcacttgaccataattatgctcagtggcaggagcgagaggaaaacagccacactgagcagcctcctttaatgaagaaaatcattccagctcccaaacccaaaggtcctggagaaccagactcaccaactcctctgcatcctcctacaccaccaattttgagtactgataggagtcgagaagacagtccagagctgaacccacccccaggcatagaagacaatagacagtgtgcgttatgtttgacttatggtgatgacagtgctaatgatgctggtcgtttactatatattggccaaaatgagtggacacatgtaaattgtgctttgtggtcagcggaagtgtttgaagatgatgacggatcactaaagaatgtgcatatggctgtgatcaggggcaagcagctgagatgtgaattctgccaaaagccaggagccaccgtgggttgctgtctcacatcctgcaccagcaactatcacttcatgtgttcccgagccaagaactgtgtctttctggatgataaaaaagtatattgccaacgacatcgggatttgatcaaaggcgaagtggttcctgagaatggatttgaagttttcagaagagtgtttgtggactttgaaggaatcagcttgagaaggaagtttctcaatggcttggaaccagaaaatatccacatgatgattgggtctatgacaatcgactgcttaggaattctaaatgatctctccgactgtgaagataagctctttcctattggatatcagtgttccagggtatactggagcaccacagatgctcgcaagcgctgtgtatatacatgcaagatagtggagtgccgtcctccagtcgtagagccggatatcaacagcactgttgaacatgatgaaaacaggaccattgcccatagtccaacatcttttacagaaagttcatcaaaagagagtcaaaacacagctgaaattataagtcctccatcaccagaccgacctcctcattcacaaacctctggctcctgttattatcatgtcatctcaaaggtccccaggattcgaacacccagttattctccaacacagagatcccctggctgtcgaccgttgccttctgcaggaagtcctaccccaaccactcatgaaatagtcacagtaggtgatcctttactctcctctggacttcgaagcattggctccaggcgtcacagtacctcttccttatcaccccagcggtccaaactccggataatgtctccaatgagaactgggaatacttactctaggaataatgtttcctcagtctccaccaccgggaccgctactgatcttgaatcaagtgccaaagtagttgatcatgtcttagggccactgaattcaagtactagtttagggcaaaacacttccacctcttcaaatttgcaaaggacagtggttactgtaggcaataaaaacagtcacttggatggatcttcatcttcagaaatgaagcagtccagtgcttcagacttggtgtccaagagctcctctttaaagggagagaagaccaaagtgctgagttccaagagctcagagggatctgcacataatgtggcttaccctggaattcctaaactggccccacaggttcataacacaacatctagagaactgaatgttagtaaaatcggctcctttgctgaaccctcttcagtgtcgttttcttctaaagaggccctctccttcccacacctccatttgagagggcaaaggaatgatcgagaccaacacacagattctacccaatcagcaaactcctctccagatgaagatactgaagtcaaaaccttgaagctatctggaatgagcaacagatcatccattatcaacgaacatatgggatctagttccagagataggagacagaaagggaaaaaatcctgtaaagaaactttcaaagaaaagcattccagtaaatcttttttggaacctggtcaggtgacaactggtgaggaaggaaacttgaagccagagtttatggatgaggttttgactcctgagtatatgggccaacgaccatgtaacaatgtttcttctgataagattggtgataaaggcctttctatgccaggagtccccaaagctccacccatgcaagtagaaggatctgccaaggaattacaggcaccacggaaacgcacagtcaaagtgacactgacacctctaaaaatggaaaatgagagtcaatccaaaaatgccctgaaagaaagtagtcctgcttcccctttgcaaatagagtcaacatctcccacagaaccaatttcagcctctgaaaatccaggagatggtccagtggcccaaccaagccccaataatacctcatgccaggattctcaaagtaacaactatcagaatcttccagtacaggacagaaacctaatgcttccagatggccccaaacctcaggaggatggctcttttaaaaggaggtatccccgtcgcagtgcccgtgcacgttctaacatgttttttgggcttaccccactctatggagtaagatcctatggtgaagaagacattccattctacagcagctcaactgggaagaagcgaggcaagagatcagctgaaggacaggtggatggggccgatgacttaagcacttcagatgaagacgacttatactattacaacttcactagaacagtgatttcttcaggtggagaggaacgactggcatcccataatttatttcgggaggaggaacagtgtgatcttccaaaaatctcacagttggatggtgttgatgatgggacagagagtgatactagtgtcacagccacaacaaggaaaagcagccagattccaaaaagaaatggtaaagaaaatggaacagagaacttaaagattgatagacctgaagatgctggggagaaagaacatgtcactaagagttctgttggccacaaaaatgagccaaagatggataactgccattctgtaagcagagttaaaacacagggacaagattccttggaagctcagctcagctcattggagtcaagccgcagagtccacacaagtaccccctccgacaaaaatttactggacacctataatactgagctcctgaaatcagattcagacaataacaacagtgatgactgtgggaatatcctgccttcagacattatggactttgtactaaagaatactccatccatgcaggctttgggtgagagcccagagtcatcttcatcagaactcctgaatcttggtgaaggattgggtcttgacagtaatcgtgaaaaagacatgggtctttttgaagtattttctcagcagctgcctacaacagaacctgtggatagtagtgtctcttcctctatctcagcagaggaacagtttgagttgcctctagagctaccatctgatctgtctgtcttgaccacccggagtcccactgtccccagccagaatcccagtagactagctgttatctcagactcaggggagaagagagtaaccatcacagaaaaatctgtagcctcctctgaaagtgacccagcactgctgagcccaggagtagatccaactcctgaaggccacatgactcctgatcattttatccaaggacacatggatgcagaccacatctctagccctccttgtggttcagtagagcaaggtcatggcaacaatcaggatttaactaggaacagtagcacccctggccttcaggtacctgtttccccaactgttcccatccagaaccagaagtatgtgcccaattctactgatagtcctggcccgtctcagatttccaatgcagctgtccagaccactccaccccacctgaagccagccactgagaaactcatagttgttaaccagaacatgcagccactttatgttctccaaactcttccaaatggagtgacccaaaaaatccaattgacctcttctgttagttctacacccagtgtgatggagacaaatacttcagtattgggacccatgggaggtggtctcacccttaccacaggactaaatccaagcttgccaacttctcaatctttgttcccttctgctagcaaaggattgctacccatgtctcatcaccagcacttacattccttccctgcagctactcaaagtagtttcccaccaaacatcagcaatcctccttcaggcctgcttattggggttcagcctcctccggatccccaacttttggtttcagaatccagccagaggacagacctcagtaccacagtagccactccatcctctggactcaagaaaagacccatatctcgtctacagacccgaaagaataaaaaacttgctccctctagtaccccttcaaacattgccccttctgatgtggtttctaatatgacattgattaacttcacaccctcccagcttcctaatcatccaagtctgttagatttggggtcacttaatacttcatctcaccgaactgtccccaacatcataaaaagatctaaatctagcatcatgtattttgaaccggcacccctgttaccacagagtgtgggaggaactgctgccacagcggcaggcacatcaacaataagccaggatactagccacctcacatcagggtctgtgtctggcttggcatccagttcctctgtcttgaatgttgtatccatgcaaactaccacaacccctacaagtagtgcgtcagttccaggacacgtcaccttaaccaacccaaggttgcttggtaccccagatattggctcaataagcaatcttttaatcaaagctagccagcagagcctggggattcaggaccagcctgtggctttaccgccaagttcaggaatgtttccacaactggggacatcacagaccccctctactgctgcaataacagcggcatctagcatctgtgtgctcccctccactcagactacgggcataacagccgcttcaccttctggggaagcagacgaacactatcagcttcagcatgtgaaccagctccttgccagcaaaactgggattcattcttcccagcgtgatcttgattctgcttcagggccccaggtatccaactttacccagacggtagacgctcctaatagcatgggactggagcagaacaaggctttatcctcagctgtgcaagccagccccacctctcctgggggttctccatcctctccatcttctggacagcggtcagcaagcccttcagtgccgggtcccactaaacccaaaccaaaaaccaaacggtttcagctgcctctagacaaagggaatggcaagaagcacaaagtttcccatttgcggaccagttcttctgaagcacacattccagaccaagaaacgacatccctgacctcaggcacagggactccaggagcagaggctgagcagcaggatacagctagcgtggagcagtcctcccagaaggagtgtgggcaacctgcagggcaagtcgctgttcttccggaagttcaggtgacccaaaatccagcaaatgaacaagaaagtgcagaacctaaaacagtggaagaagaggaaagtaatttcagctccccactgatgctttggcttcagcaagaacaaaagcggaaggaaagcattactgagaaaaaacccaagaaaggacttgtttttgaaatttccagtgatgatggctttcagatctgtgcagaaagtattgaagatgcctggaagtcattgacagataaagtccaggaagctcgatcaaatgcccgcctaaagcagctctcatttgcaggtgttaacggtttgaggatgctggggattctccatgatgcagttgtgttcctcattgagcagctgtctggtgccaagcactgtcgaaattacaaattccgtttccacaagccagaggaggccaatgaaccccccttgaaccctcacggctcagccagggctgaagtccacctcaggaagtcagcatttgacatgtttaacttcctggcttctaaacatcgtcagcctcctgaatacaaccccaatgatgaagaagaggaggaggtacagctgaagtcagctcggagggcaactagcatggatctgccaatgcccatgcgcttccggcacttaaaaaagacttctaaggaggcagttggtgtctacaggtctcccatccatggccggggtcttttctgtaagagaaacattgatgcaggtgagatggtgattgagtatgccggcaacgtcatccgctccatccagactgacaagcgggaaaagtattacgacagcaagggcattggttgctatatgttccgaattgatgactcagaggtagtggatgccaccatgcatggaaatgctgcacgcttcatcaatcactcgtgtgagcctaactgctattctcgggtcatcaatattgatgggcagaagcacattgtcatctttgccatgcgtaagatctaccgaggagaggaactcacttacgactataagttccccattgaggatgccagcaacaagctgccctgcaactgtggcgccaagaaatgccggaagttcctaaactaaagctgctcttctcccccagtgttggagtgcaaggaggcggggccatccaaagcaacgctgaaggccttttccagcagctgggagctcccggattgcgtggcacagctgaggggcctctgtgatggctgagctctcttatgtcctatactcacatcagacatgtgatcatagtcccagagacagagttgaggtctcgaagaaaagatccatgatcggctttctcctggggcccctccaattgtttactgttagaaagtgggaatggggtccctagcagacttgcctggaaggagcctattatagagggttggttatgttgggagattgggcctgaatttctccacagaaataagttgccatcctcaggttggccctttcccaagcactgtaagtgagtgggtcaggcaaagccccaaatggagggttggttagattcctgacagtttgccagccaggccccacctacagcgtctgtcgaacaaacagaggtctggtggttttccctactatcctcccactcgagagttcacttctggttgggagacaggattcctagcacctccggtgtcaaaaggctgtcatggggttgtgccaattaattaccaaacattgagcctgcaggctttgagtgggagtgttgcccccaggagccttatctcagccaattacctttcttgacagtaggagcggcttccctctcccattccctcttcactcccttttcttcctttcccctgtcttcatgccactgctttcccatgcttctttcgggttgtaggggagactgactgcctgctcaaggacactccctgctgggcataggatgtgcctgcaaaaagttccctgagcctgtaagcactccaggtggggaagtggacaggagccattggtcataaccagacagaatttggaaacattttcataaagctccatggagagttttaaagaaacatatgtagcatgattttgtaggagaggaaaaagattatttaaataggatttaaatcatgcaacaacgagagtatcacagccaggatgacccttgggtcccattcctaagacatggttactttattttccccttgttaagacataggaagacttaatttttaaacggtcagtgtccagttgaaggcagaacactaatcagatttcaaggcccacaacttggggactagaccaccttatgttgagggaactctgccacctgcgtgcaacccacagctaaagtaaattcaatgacactactgccctgattactccttaggatgtggtcaaaacagcatcaaatgtttcttctcttcctttccccaagacagagtcctgaacctgttaaattaagtcattggattttactctgttctgtttacagtttactatttaaggttttataaatgtaaatatattttgtatatttttctatgagaagcacttcatagggagaagcacttatgacaaggctattttttaaaccgcggtattatcctaatttaaaagaagatcggtttttaataattttttattttcataggatgaagttagagaaaatattcagctgtacacacaaagtctggtttttcctgcccaacttccccctggaaggtgtactttttgttgtttaatgtgtagcttgtttgtgccctgttgacataaatgtttcctgggtttgctctttgacaataaatggagaaggaaggtcacccaactccattgggccactcccctccttcccctattgaagctcctcaaaaggctacagtaatatcttgatacaacagattctcttctttcccgcctctctcctttccggcgcaacttccagagtggtgggagacggcaatctttacatttccctcatctttcttacttcagagttagcaaacaacaagttgaatggcaacttgacatttttgcatcaccatctgcctcataggccactctttcctttccctctgcccaccaagtcctcatatctgcagagaacccattgatcaccttgtgccctcttttggggcagcctgttgaaactgaagcacagtctgaccactcacgataaagcagatttttctctgcctctgccacaaggtttcagagtagtgtagtccaagtagagggtggggcacccttttctcgccgcaagaagcccattcctatggaagtctagcaaagcaatacgactcagcccagcactctctgccccaggactcatggctctgctgtgccttccatcctgggctcccttctctcctgtgaccttaagaactttgtctggtggctttgctggaacattgtcactgttttcactgtcatgcagggagcccagcactgtggccaggatggcagagacttccttgtcatcatggagaagtgccagcaggggactgggaaaagcactctacccagacctcacctcccttcctccttttgcccatgaacaagatgcagtggccctaggggttccactagtgtctgctttcctttattattgcactgtgtgaggtttttttgtaaatccttgtattcc

SEQ ID NO: 18985 - DNA, 13655 bp, Homo sapiens
  source 1..13655: mol_type = unassigned DNA
atggcgcacagctgtcggtggcgcttccccgcccgacccgggaccaccgggggcggcggcggcggggggcgccggggcctagggggcgccccgcggcaacgcgtcccggccctgctgcttccccccgggcccccggtcggcggtggcggccccggggcgcccccctcccccccggctgtggcggccgcggcggcggcggcgggaagcagcggggctggggttccagggggagcggccgccgcctcagcagcctcctcgtcgtccgcctcgtcttcgtcttcgtcatcgtcctcagcctcttcagggccggccctgctccgggtgggcccgggcttcgacgcggcgctgcaggtctcggccgccatcggcaccaacctgcgccggttccgggccgtgtttggggagagcggcgggggaggcggcagcggagaggatgagcaattcttaggttttggctcagatgaagaagtcagagtgcgaagtcccacaaggtctccttcagttaaaactagtcctcgaaaacctcgtgggagacctagaagtggctctgaccgaaattcagctatcctctcagatccatctgtgttttcccctctaaataaatcagagaccaaatctggagataagatcaagaagaaagattctaaaagtatagaaaagaagagaggaagacctcccaccttccctggagtaaaaatcaaaataacacatggaaaggacatttcagagttaccaaagggaaacaaagaagatagcctgaaaaaaattaaaaggacaccttctgctacgtttcagcaagccacaaagattaaaaaattaagagcaggtaaactctctcctctcaagtctaagtttaagacagggaagcttcaaataggaaggaagggggtacaaattgtacgacggagaggaaggcctccatcaacagaaaggataaagaccccttcgggtctcctcattaattctgaactggaaaagccccagaaagtccggaaagacaaggaaggaacacctccacttacaaaagaagataagacagttgtcagacaaagccctcgaaggattaagccagttaggattattccttcttcaaaaaggacagatgcaaccattgctaagcaactcttacagagggcaaaaaagggggctcaaaagaaaattgaaaaagaagcagctcagctgcagggaagaaaggtgaagacacaggtcaaaaatattcgacagttcatcatgcctgttgtcagtgctatctcctcgcggatcattaagacccctcggcggtttatagaggatgaggattatgaccctccaattaaaattgcccgattagagtctacaccgaatagtagattcagtgccccgtcctgtggatcttctgaaaaatcaagtgcagcttctcagcactcctctcaaatgtcttcagactcctctcgatctagtagccccagtgttgatacctccacagactctcaggcttctgaggagattcaggtacttcctgaggagcggagcgatacccctgaagttcatcctccactgcccatttcccagtccccagaaaatgagagtaatgataggagaagcagaaggtattcagtgtcggagagaagttttggatctagaacgacgaaaaaattatcaactctacaaagtgccccccagcagcagacctcctcgtctccacctccacctctgctgactccaccgccaccactgcagccagcctccagtatctctgaccacacaccttggcttatgcctccaacaatccccttagcatcaccatttttgcctgcttccactgctcctatgcaagggaagcgaaaatctattttgcgagaaccgacatttaggtggacttctttaaagcattctaggtcagagccacaatacttttcctcagcaaagtatgccaaagaaggtcttattcgcaaaccaatatttgataatttccgaccccctccactaactcccgaggacgttggctttgcatctggtttttctgcatctggtaccgctgcttcagcccgattgttttcgccactccattctggaacaaggtttgatatgcacaaaaggagccctcttctgagagctccaagatttactccaagtgaggctcactctagaatatttgagtctgtaaccttgcctagtaatcgaacttctgctggaacatcttcttcaggagtatccaatagaaaaaggaaaagaaaagtgtttagtcctattcgatctgaaccaagatctccttctcactccatgaggacaagaagtggaaggcttagtagttctgagctctcacctctcacccccccgtcttctgtctcttcctcgttaagcatttctgttagtcctcttgccactagtgccttaaacccaacttttacttttccttctcattccctgactcagtctggggaatctgcagagaaaaatcagagaccaaggaagcagactagtgctccggcagagccattttcatcaagtagtcctactcctctcttcccttggtttaccccaggctctcagactgaaagagggagaaataaagacaaggcccccgaggagctgtccaaagatcgagatgctgacaagagcgtggagaaggacaagagtagagagagagaccgggagagagaaaaggagaataagcgggagtcaaggaaagagaaaaggaaaaagggatcagaaattcagagtagttctgctttgtatcctgtgggtagggtttccaaagagaaggttgttggtgaagatgttgccacttcatcttctgccaaaaaagcaacagggcggaagaagtcttcatcacatgattctgggactgatattacttctgtgactcttggggatacaacagctgtcaaaaccaaaatacttataaagaaagggagaggaaatctggaaaaaaccaacttggacctcggcccaactgccccatccctggagaaggagaaaaccctctgcctttccactccttcatctagcactgttaaacattccacttcctccataggctccatgttggctcaggcagacaagcttccaatgactgacaagagggttgccagcctcctaaaaaaggccaaagctcagctctgcaagattgagaagagtaagagtcttaaacaaaccgaccagcccaaagcacagggtcaagaaagtgactcatcagagacctctgtgcgaggaccccggattaaacatgtctgcagaagagcagctgttgcccttggccgaaaacgagctgtgtttcctgatgacatgcccaccctgagtgccttaccatgggaagaacgagaaaagattttgtcttccatggggaatgatgacaagtcatcaattgctggctcagaagatgctgaacctcttgctccacccatcaaaccaattaaacctgtcactagaaacaaggcaccccaggaacctccagtaaagaaaggacgtcgatcgaggcggtgtgggcagtgtcccggctgccaggtgcctgaggactgtggtgtttgtactaattgcttagataagcccaagtttggtggtcgcaatataaagaagcagtgctgcaagatgagaaaatgtcagaatctacaatggatgccttccaaagcctacctgcagaagcaagctaaagctgtgaaaaagaaagagaaaaagtctaagaccagtgaaaagaaagacagcaaagagagcagtgttgtgaagaacgtggtggactctagtcagaaacctaccccatcagcaagagaggatcctgccccaaagaaaagcagtagtgagcctcctccacgaaagcccgtcgaggaaaagagtgaagaagggaatgtctcggcccctgggcctgaatccaaacaggccaccactccagcttccaggaagtcaagcaagcaggtctcccagccagcactggtcatcccgcctcagccacctactacaggaccgccaagaaaagaagttcccaaaaccactcctagtgagcccaagaaaaagcagcctccaccaccagaatcaggtccagagcagagcaaacagaaaaaagtggctccccgcccaagtatccctgtaaaacaaaaaccaaaagaaaaggaaaaaccacctccggtcaataagcaggagaatgcaggcactttgaacatcctcagcactctctccaatggcaatagttctaagcaaaaaattccagcagatggagtccacaggatcagagtggactttaaggaggattgtgaagcagaaaatgtgtgggagatgggaggcttaggaatcttgacttctgttcctataacacccagggtggtttgctttctctgtgccagtagtgggcatgtagagtttgtgtattgccaagtctgttgtgagcccttccacaagttttgtttagaggagaacgagcgccctctggaggaccagctggaaaattggtgttgtcgtcgttgcaaattctgtcacgtttgtggaaggcaacatcaggctacaaagcagctgctggagtgtaataagtgccgaaacagctatcaccctgagtgcctgggaccaaactaccccaccaaacccacaaagaagaagaaagtctggatctgtaccaagtgtgttcgctgtaagagctgtggatccacaactccaggcaaagggtgggatgcacagtggtctcatgatttctcactgtgtcatgattgcgccaagctctttgctaaaggaaacttctgccctctctgtgacaaatgttatgatgatgatgactatgagagtaagatgatgcaatgtggaaagtgtgatcgctgggtccattccaaatgtgagaatctttcagatgagatgtatgagattctatctaatctgccagaaagtgtggcctacacttgtgtgaactgtactgagcggcaccctgcagagtggcgactggcccttgaaaaagagctgcagatttctctgaagcaagttctgacagctttgttgaattctcggactaccagccatttgctacgctaccggcaggctgccaagcctccagacttaaatcccgagacagaggagagtataccttcccgcagctcccccgaaggacctgatccaccagttcttactgaggtcagcaaacaggatgatcagcagcctttagatctagaaggagtcaagaggaagatggaccaagggaattacacatctgtgttggagttcagtgatgatattgtgaagatcattcaagcagccattaattcagatggaggacagccagaaattaaaaaagccaacagcatggtcaagtccttcttcattcggcaaatggaacgtgtttttccatggttcagtgtcaaaaagtccaggttttgggagccaaataaagtatcaagcaacagtgggatgttaccaaacgcagtgcttccaccttcacttgaccataattatgctcagtggcaggagcgagaggaaaacagccacactgagcagcctcctttaatgaagaaaatcattccagctcccaaacccaaaggtcctggagaaccagactcaccaactcctctgcatcctcctacaccaccaattttgagtactgataggagtcgagaagacagtccagagctgaacccacccccaggcatagaagacaatagacagtgtgcgttatgtttgacttatggtgatgacagtgctaatgatgctggtcgtttactatatattggccaaaatgagtggacacatgtaaattgtgctttgtggtcagcggaagtgtttgaagatgatgacggatcactaaagaatgtgcatatggctgtgatcaggggcaagcagctgagatgtgaattctgccaaaagccaggagccaccgtgggttgctgtctcacatcctgcaccagcaactatcacttcatgtgttcccgagccaagaactgtgtctttctggatgataaaaaagtatattgccaacgacatcgggatttgatcaaaggcgaagtggttcctgagaatggatttgaagttttcagaagagtgtttgtggactttgaaggaatcagcttgagaaggaagtttctcaatggcttggaaccagaaaatatccacatgatgattgggtctatgacaatcgactgcttaggaattctaaatgatctctccgactgtgaagataagctctttcctattggatatcagtgttccagggtatactggagcaccacagatgctcgcaagcgctgtgtatatacatgcaagatagtggagtgccgtcctccagtcgtagagccggatatcaacagcactgttgaacatgatgaaaacaggaccattgcccatagtccaacatcttttacagaaagttcatcaaaagagagtcaaaacacagctgaaattataagtcctccatcaccagaccgacctcctcattcacaaacctctggctcctgttattatcatgtcatctcaaaggtccccaggattcgaacacccagttattctccaacacagagatcccctggctgtcgaccgttgccttctgcaggaagtcctaccccaaccactcatgaaatagtcacagtaggtgatcctttactctcctctggacttcgaagcattggctccaggcgtcacagtacctcttccttatcaccccagcggtccaaactccggataatgtctccaatgagaactgggaatacttactctaggaataatgtttcctcagtctccaccaccgggaccgctactgatcttgaatcaagtgccaaagtagttgatcatgtcttagggccactgaattcaagtactagtttagggcaaaacacttccacctcttcaaatttgcaaaggacagtggttactgtaggcaataaaaacagtcacttggatggatcttcatcttcagaaatgaagcagtccagtgcttcagacttggtgtccaagagctcctctttaaagggagagaagaccaaagtgctgagttccaagagctcagagggatctgcacataatgtggcttaccctggaattcctaaactggccccacaggttcataacacaacatctagagaactgaatgttagtaaaatcggctcctttgctgaaccctcttcagtgtcgttttcttctaaagaggccctctccttcccacacctccatttgagagggcaaaggaatgatcgagaccaacacacagattctacccaatcagcaaactcctctccagatgaagatactgaagtcaaaaccttgaagctatctggaatgagcaacagatcatccattatcaacgaacatatgggatctagttccagagataggagacagaaagggaaaaaatcctgtaaagaaactttcaaagaaaagcattccagtaaatcttttttggaacctggtcaggtgacaactggtgaggaaggaaacttgaagccagagtttatggatgaggttttgactcctgagtatatgggccaacgaccatgtaacaatgtttcttctgataagattggtgataaaggcctttctatgccaggagtccccaaagctccacccatgcaagtagaaggatctgccaaggaattacaggcaccacggaaacgcacagtcaaagtgacactgacacctctaaaaatggaaaatgagagtcaatccaaaaatgccctgaaagaaagtagtcctgcttcccctttgcaaatagagtcaacatctcccacagaaccaatttcagcctctgaaaatccaggagatggtccagtggcccaaccaagccccaataatacctcatgccaggattctcaaagtaacaactatcagaatcttccagtacaggacagaaacctaatgcttccagatggccccaaacctcaggaggatggctcttttaaaaggaggtatccccgtcgcagtgcccgtgcacgttctaacatgttttttgggcttaccccactctatggagtaagatcctatggtgaagaagacattccattctacagcagctcaactgggaagaagcgaggcaagagatcagctgaaggacaggtggatggggccgatgacttaagcacttcagatgaagacgacttatactattacaacttcactagaacagtgatttcttcaggtggagaggaacgactggcatcccataatttatttcgggaggaggaacagtgtgatcttccaaaaatctcacagttggatggtgttgatgatgggacagagagtgatactagtgtcacagccacaacaaggaaaagcagccagattccaaaaagaaatggtaaagaaaatggaacagagaacttaaagattgatagacctgaagatgctggggagaaagaacatgtcactaagagttctgttggccacaaaaatgagccaaagatggataactgccattctgtaagcagagttaaaacacagggacaagattccttggaagctcagctcagctcattggagtcaagccgcagagtccacacaagtaccccctccgacaaaaatttactggacacctataatactgagctcctgaaatcagattcagacaataacaacagtgatgactgtgggaatatcctgccttcagacattatggactttgtactaaagaatactccatccatgcaggctttgggtgagagcccagagtcatcttcatcagaactcctgaatcttggtgaaggattgggtcttgacagtaatcgtgaaaaagacatgggtctttttgaagtattttctcagcagctgcctacaacagaacctgtggatagtagtgtctcttcctctatctcagcagaggaacagtttgagttgcctctagagctaccatctgatctgtctgtcttgaccacccggagtcccactgtccccagccagaatcccagtagactagctgttatctcagactcaggggagaagagagtaaccatcacagaaaaatctgtagcctcctctgaaagtgacccagcactgctgagcccaggagtagatccaactcctgaaggccacatgactcctgatcattttatccaaggacacatggatgcagaccacatctctagccctccttgtggttcagtagagcaaggtcatggcaacaatcaggatttaactaggaacagtagcacccctggccttcaggtacctgtttccccaactgttcccatccagaaccagaagtatgtgcccaattctactgatagtcctggcccgtctcagatttccaatgcagctgtccagaccactccaccccacctgaagccagccactgagaaactcatagttgttaaccagaacatgcagccactttatgttctccaaactcttccaaatggagtgacccaaaaaatccaattgacctcttctgttagttctacacccagtgtgatggagacaaatacttcagtattgggacccatgggaggtggtctcacccttaccacaggactaaatccaagcttgccaacttctcaatctttgttcccttctgctagcaaaggattgctacccatgtctcatcaccagcacttacattccttccctgcagctactcaaagtagtttcccaccaaacatcagcaatcctccttcaggcctgcttattggggttcagcctcctccggatccccaacttttggtttcagaatccagccagaggacagacctcagtaccacagtagccactccatcctctggactcaagaaaagacccatatctcgtctacagacccgaaagaataaaaaacttgctccctctagtaccccttcaaacattgccccttctgatgtggtttctaatatgacattgattaacttcacaccctcccagcttcctaatcatccaagtctgttagatttggggtcacttaatacttcatctcaccgaactgtccccaacatcataaaaagatctaaatctagcatcatgtattttgaaccggcacccctgttaccacagagtgtgggaggaactgctgccacagcggcaggcacatcaacaataagccaggatactagccacctcacatcagggtctgtgtctggcttggcatccagttcctctgtcttgaatgttgtatccatgcaaactaccacaacccctacaagtagtgcgtcagttccaggacacgtcaccttaaccaacccaaggttgcttggtaccccagatattggctcaataagcaatcttttaatcaaagctagccagcagagcctggggattcaggaccagcctgtggctttaccgccaagttcaggaatgtttccacaactggggacatcacagaccccctctactgctgcaataacagcggcatctagcatctgtgtgctcccctccactcagactacgggcataacagccgcttcaccttctggggaagcagacgaacactatcagcttcagcatgtgaaccagctccttgccagcaaaactgggattcattcttcccagcgtgatcttgattctgcttcagggccccaggtatccaactttacccagacggtagacgctcctaatagcatgggactggagcagaacaaggctttatcctcagctgtgcaagccagccccacctctcctgggggttctccatcctctccatcttctggacagcggtcagcaagcccttcagtgccgggtcccactaaacccaaaccaaaaaccaaacggtttcagctgcctctagacaaagggaatggcaagaagcacaaagtttcccatttgcggaccagttcttctgaagcacacattccagaccaagaaacgacatccctgacctcaggcacagggactccaggagcagaggctgagcagcaggatacagctagcgtggagcagtcctcccagaaggagtgtgggcaacctgcagggcaagtcgctgttcttccggaagttcaggtgacccaaaatccagcaaatgaacaagaaagtgcagaacctaaaacagtggaagaagaggaaagtaatttcagctccccactgatgctttggcttcagcaagaacaaaagcggaaggaaagcattactgagaaaaaacccaagaaaggacttgtttttgaaatttccagtgatgatggctttcagatctgtgcagaaagtattgaagatgcctggaagtcattgacagataaagtccaggaagctcgatcaaatgcccgcctaaagcagctctcatttgcaggtgttaacggtttgaggatgctggggattctccatgatgcagttgtgttcctcattgagcagctgtctggtgccaagcactgtcgaaattacaaattccgtttccacaagccagaggaggccaatgaaccccccttgaaccctcacggctcagccagggctgaagtccacctcaggaagtcagcatttgacatgtttaacttcctggcttctaaacatcgtcagcctcctgaatacaaccccaatgatgaagaagaggaggaggtacagctgaagtcagctcggagggcaactagcatggatctgccaatgcccatgcgcttccggcacttaaaaaagacttctaaggaggcagttggtgtctacaggtctcccatccatggccggggtcttttctgtaagagaaacattgatgcaggtgagatggtgattgagtatgccggcaacgtcatccgctccatccagactgacaagcgggaaaagtattacgacagcaagggcattggttgctatatgttccgaattgatgactcagaggtagtggatgccaccatgcatggaaatgctgcacgcttcatcaatcactcgtgtgagcctaactgctattctcgggtcatcaatattgatgggcagaagcacattgtcatctttgccatgcgtaagatctaccgaggagaggaactcacttacgactataagttccccattgaggatgccagcaacaagctgccctgcaactgtggcgccaagaaatgccggaagttcctaaactaaagctgctcttctcccccagtgttggagtgcaaggaggcggggccatccaaagcaacgctgaaggccttttccagcagctgggagctcccggattgcgtggcacagctgaggggcctctgtgatggctgagctctcttatgtcctatactcacatcagacatgtgatcatagtcccagagacagagttgaggtctcgaagaaaagatccatgatcggctttctcctggggcccctccaattgtttactgttagaaagtgggaatggggtccctagcagacttgcctggaaggagcctattatagagggttggttatgttgggagattgggcctgaatttctccacagaaataagttgccatcctcaggttggccctttcccaagcactgtaagtgagtgggtcaggcaaagccccaaatggagggttggttagattcctgacagtttgccagccaggccccacctacagcgtctgtcgaacaaacagaggtctggtggttttccctactatcctcccactcgagagttcacttctggttgggagacaggattcctagcacctccggtgtcaaaaggctgtcatggggttgtgccaattaattaccaaacattgagcctgcaggctttgagtgggagtgttgcccccaggagccttatctcagccaattacctttcttgacagtaggagcggcttccctctcccattccctcttcactcccttttcttcctttcccctgtcttcatgccactgctttcccatgcttctttcgggttgtaggggagactgactgcctgctcaaggacactccctgctgggcataggatgtgcctgcaaaaagttccctgagcctgtaagcactccaggtggggaagtggacaggagccattggtcataaccagacagaatttggaaacattttcataaagctccatggagagttttaaagaaacatatgtagcatgattttgtaggagaggaaaaagattatttaaataggatttaaatcatgcaacaacgagagtatcacagccaggatgacccttgggtcccattcctaagacatggttactttattttccccttgttaagacataggaagacttaatttttaaacggtcagtgtccagttgaaggcagaacactaatcagatttcaaggcccacaacttggggactagaccaccttatgttgagggaactctgccacctgcgtgcaacccacagctaaagtaaattcaatgacactactgccctgattactccttaggatgtggtcaaaacagcatcaaatgtttcttctcttcctttccccaagacagagtcctgaacctgttaaattaagtcattggattttactctgttctgtttacagtttactatttaaggttttataaatgtaaatatattttgtatatttttctatgagaagcacttcatagggagaagcacttatgacaaggctattttttaaaccgcggtattatcctaatttaaaagaagatcggtttttaataattttttattttcataggatgaagttagagaaaatattcagctgtacacacaaagtctggtttttcctgcccaacttccccctggaaggtgtactttttgttgtttaatgtgtagcttgtttgtgccctgttgacataaatgtttcctgggtttgctctttgacaataaatggagaaggaaggtcacccaactccattgggccactcccctccttcccctattgaagctcc

SEQ ID NO: 18986 - DNA, 684 bp, Homo sapiens
  source 1..684: mol_type = unassigned DNA
gattttaaagatgagcaattcttaggttttggctcagatgaagaagtcagagtgcgaagtcccacaaggtctccttcaggctccatgttggctcaggcagacaagcttccaatgactgacaagagggttgccagcctcctaaaaaaggccaaagctcagctctgcaagattgagaagagtaagagtcttaaacaaaccgaccagcccaaagcacagggtcaagaaagtgactcatcagagacctctgtgcgaggaccccggattaaacatgtctgcagaagagcagctgttgcccttggccgaaaacgagctgtgtttcctgatgacatgcccaccctgagtgccttaccatgggaagaacgagaaaagattttgtcttccatggggaatgatgacaagtcatcaattgctggctcagaagatgctgaacctcttgctccacccatcaaaccaattaaacctgtcactagaaacaaggcaccccaggaacctccagtaaagaaaggacgtcgatcgaggcggtgtgggcagtgtcccggctgccaggtgcctgaggactgtggtgtttgtactaattgcttagataagcccaagtttggtggtcgcaatataaagaagcagtgctgcaagatgagaaaatgtcagaatctacaatggatgccttccaaagcctacctgcagaag

SEQ ID NO: 18987 - DNA, 4320 bp, Homo sapiens
  source 1..4320: mol_type = unassigned DNA
aacatggcgcacagctgtcggtggcgcttccccgcccgacccgggaccaccgggggcggcggcggcggggggcgccggggcctagggggcgccccgcggcaacgcgtcccggccctgctgcttccccccgggcccccggtcggcggtggcggccccggggcgcccccctcccccccggctgtggcggccgcggcggcggcggcgggaagcagcggggctggggttccagggggagcggccgccgcctcagcagcctcctcgtcgtccgcctcgtcttcgtcttcgtcatcgtcctcagcctcttcagggccggccctgctccgggtgggcccgggcttcgacgcggcgctgcaggtctcggccgccatcggcaccaacctgcgccggttccgggccgtgtttggggagagcggcgggggaggcggcagcggagagctaacaacacagatcccatgtagttggagaaccaaaggccacatacatgacaaaaagactgaaccgttcaggttacttgcatggagttggtgcttaaatgatgagcaattcttaggttttggctcagatgaagaagtcagagtgcgaagtcccacaaggtctccttcagttaaaactagtcctcgaaaacctcgtgggagacctagaagtggctctgaccgaaattcagctatcctctcagatccatctgtgttttcccctctaaataaatcagagaccaaatctggagataagatcaagaagaaagattctaaaagtatagaaaagaagagaggaagacctcccaccttccctggagtaaaaatcaaaataacacatggaaaggacatttcagagttaccaaagggaaacaaagaagatagcctgaaaaaaattaaaaggacaccttctgctacgtttcagcaagccacaaagattaaaaaattaagagcaggtaaactctctcctctcaagtctaagtttaagacagggaagcttcaaataggaaggaagggggtacaaattgtacgacggagaggaaggcctccatcaacagaaaggataaagaccccttcgggtctcctcattaattctgaactggaaaagccccagaaagtccggaaagacaaggaaggaacacctccacttacaaaagaagataagacagttgtcagacaaagccctcgaaggattaagccagttaggattattccttcttcaaaaaggacagatgcaaccattgctaagcaactcttacagagggcaaaaaagggggctcaaaagaaaattgaaaaagaagcagctcagctgcagggaagaaaggtgaagacacaggtcaaaaatattcgacagttcatcatgcctgttgtcagtgctatctcctcgcggatcattaagacccctcggcggtttatagaggatgaggattatgaccctccaattaaaattgcccgattagagtctacaccgaatagtagattcagtgccccgtcctgtggatcttctgaaaaatcaagtgcagcttctcagcactcctctcaaatgtcttcagactcctctcgatctagtagccccagtgttgatacctccacagactctcaggcttctgaggagattcaggtacttcctgaggagcggagcgatacccctgaagttcatcctccactgcccatttcccagtccccagaaaatgagagtaatgataggagaagcagaaggtattcagtgtcggagagaagttttggatctagaacgacgaaaaaattatcaactctacaaagtgccccccagcagcagacctcctcgtctccacctccacctctgctgactccaccgccaccactgcagccagcctccagtatctctgaccacacaccttggcttatgcctccaacaatccccttagcatcaccatttttgcctgcttccactgctcctatgcaagggaagcgaaaatctattttgcgagaaccgacatttaggtggacttctttaaagcattctaggtcagagccacaatacttttcctcagcaaagtatgccaaagaaggtcttattcgcaaaccaatatttgataatttccgaccccctccactaactcccgaggacgttggctttgcatctggtttttctgcatctggtaccgctgcttcagcccgattgttttcgccactccattctggaacaaggtttgatatgcacaaaaggagccctcttctgagagctccaagatttactccaagtgaggctcactctagaatatttgagtctgtaaccttgcctagtaatcgaacttctgctggaacatcttcttcaggagtatccaatagaaaaaggaaaagaaaagtgtttagtcctattcgatctgaaccaagatctccttctcactccatgaggacaagaagtggaaggcttagtagttctgagctctcacctctcacccccccgtcttctgtctcttcctcgttaagcatttctgttagtcctcttgccactagtgccttaaacccaacttttacttttccttctcattccctgactcagtctggggaatctgcagagaaaaatcagagaccaaggaagcagactagtgctccggcagagccattttcatcaagtagtcctactcctctcttcccttggtttaccccaggctctcagactgaaagagggagaaataaagacaaggcccccgaggagctgtccaaagatcgagatgctgacaagagcgtggagaaggacaagagtagagagagagaccgggagagagaaaaggagaataagcgggagtcaaggaaagagaaaaggaaaaagggatcagaaattcagagtagttctgctttgtatcctgtgggtagggtttccaaagagaaggttgttggtgaagatgttgccacttcatcttctgccaaaaaagcaacagggcggaagaagtcttcatcacatgattctgggactgatattacttctgtgactcttggggatacaacagctgtcaaaaccaaaatacttataaagaaagggagaggaaatctggaaaaaaccaacttggacctcggcccaactgccccatccctggagaaggagaaaaccctctgcctttccactccttcatctagcactgttaaacattccacttcctccataggctccatgttggctcaggcagacaagcttccaatgactgacaagagggttgccagcctcctaaaaaaggccaaagctcagctctgcaagattgagaagagtaagagtcttaaacaaaccgaccagcccaaagcacagggtcaagaaagtgactcatcagagacctctgtgcgaggaccccggattaaacatgtctgcagaagagcagctgttgcccttggccgaaaacgagctgtgtttcctgatgacatgcccaccctgagtgccttaccatgggaagaacgagaaaagattttgtcttccatggggaatgatgacaagtcatcaattgctggctcagaagatgctgaacctcttgctccacccatcaaaccaattaaacctgtcactagaaacaaggcaccccaggaacctccagtaaagaaaggacgtcgatcgaggcggtgtgggcagtgtcccggctgccaggtgcctgaggactgtggtgtttgtactaattgcttagataagcccaagtttggtggtcgcaatataaagaagcagtgctgcaagatgagaaaatgtcagaatctacaatggatgccttccaaagcctacctgcagaagcaagctaaagctgtgaaaaagaaagagaaaaagtctaagaccagtgaaaagaaagacagcaaagagagcagtgttgtgaagaacgtggtggactctagtcagaaacctaccccatcagcaagagaggatcctgccccaaagaaaagcagtagtgagcctcctccacgaaagcccgtcgaggaaaagagtgaagaagggaatgtctcggcccctgggcctgaatccaaacaggccaccactccagcttccaggaagtcaagcaagcaggtctcccagccagcactggtcatcccgcctcagccacctactacaggaccgccaagaaaagaagttcccaaaaccactcctagtgagcccaagaaaaagcagcctccaccaccagaatcaggtccagagcagagcaaacagaaaaaagtggctccccgcccaagtatccctgtaaaacaaaaaccaaaagaaaaggaaaaaccacctccggtcaataagcaggagaatgcaggcactttgaacatcctcagcactctctccaatggcaatagttctaagcaaaaaattccagcagatggagtccacaggatcagagtggactttaag

SEQ ID NO: 18988 - DNA, 16594 bp, Homo sapiens
  source 1..16594: mol_type = unassigned DNA
ctgcttcacttcacggggcgaacatggcgcacagctgtcggtggcgcttccccgcccgacccgggaccaccgggggcggcggcggcggggggcgccggggcctagggggcgccccgcggcaacgcgtcccggccctgctgcttccccccgggcccccggtcggcggtggcggccccggggcgcccccctcccccccggctgtggcggccgcggcggcggcggcgggaagcagcggggctggggttccagggggagcggccgccgcctcagcagcctcctcgtcgtccgcctcgtcttcgtcttcgtcatcgtcctcagcctcttcagggccggccctgctccgggtgggcccgggcttcgacgcggcgctgcaggtctcggccgccatcggcaccaacctgcgccggttccgggccgtgtttggggagagcggcgggggaggcggcagcggagaggatgagcaattcttaggttttggctcagatgaagaagtcagagtgcgaagtcccacaaggtctccttcagttaaaactagtcctcgaaaacctcgtgggagacctagaagtggctctgaccgaaattcagctatcctctcagatccatctgtgttttcccctctaaataaatcagagaccaaatctggagataagatcaagaagaaagattctaaaagtatagaaaagaagagaggaagacctcccaccttccctggagtaaaaatcaaaataacacatggaaaggacatttcagagttaccaaagggaaacaaagaagatagcctgaaaaaaattaaaaggacaccttctgctacgtttcagcaagccacaaagattaaaaaattaagagcaggtaaactctctcctctcaagtctaagtttaagacagggaagcttcaaataggaaggaagggggtacaaattgtacgacggagaggaaggcctccatcaacagaaaggataaagaccccttcgggtctcctcattaattctgaactggaaaagccccagaaagtccggaaagacaaggaaggaacacctccacttacaaaagaagataagacagttgtcagacaaagccctcgaaggattaagccagttaggattattccttcttcaaaaaggacagatgcaaccattgctaagcaactcttacagagggcaaaaaagggggctcaaaagaaaattgaaaaagaagcagctcagctgcagggaagaaaggtgaagacacaggtcaaaaatattcgacagttcatcatgcctgttgtcagtgctatctcctcgcggatcattaagacccctcggcggtttatagaggatgaggattatgaccctccaattaaaattgcccgattagagtctacaccgaatagtagattcagtgccccgtcctgtggatcttctgaaaaatcaagtgcagcttctcagcactcctctcaaatgtcttcagactcctctcgatctagtagccccagtgttgatacctccacagactctcaggcttctgaggagattcaggtacttcctgaggagcggagcgatacccctgaagttcatcctccactgcccatttcccagtccccagaaaatgagagtaatgataggagaagcagaaggtattcagtgtcggagagaagttttggatctagaacgacgaaaaaattatcaactctacaaagtgccccccagcagcagacctcctcgtctccacctccacctctgctgactccaccgccaccactgcagccagcctccagtatctctgaccacacaccttggcttatgcctccaacaatccccttagcatcaccatttttgcctgcttccactgctcctatgcaagggaagcgaaaatctattttgcgagaaccgacatttaggtggacttctttaaagcattctaggtcagagccacaatacttttcctcagcaaagtatgccaaagaaggtcttattcgcaaaccaatatttgataatttccgaccccctccactaactcccgaggacgttggctttgcatctggtttttctgcatctggtaccgctgcttcagcccgattgttttcgccactccattctggaacaaggtttgatatgcacaaaaggagccctcttctgagagctccaagatttactccaagtgaggctcactctagaatatttgagtctgtaaccttgcctagtaatcgaacttctgctggaacatcttcttcaggagtatccaatagaaaaaggaaaagaaaagtgtttagtcctattcgatctgaaccaagatctccttctcactccatgaggacaagaagtggaaggcttagtagttctgagctctcacctctcacccccccgtcttctgtctcttcctcgttaagcatttctgttagtcctcttgccactagtgccttaaacccaacttttacttttccttctcattccctgactcagtctggggaatctgcagagaaaaatcagagaccaaggaagcagactagtgctccggcagagccattttcatcaagtagtcctactcctctcttcccttggtttaccccaggctctcagactgaaagagggagaaataaagacaaggcccccgaggagctgtccaaagatcgagatgctgacaagagcgtggagaaggacaagagtagagagagagaccgggagagagaaaaggagaataagcgggagtcaaggaaagagaaaaggaaaaagggatcagaaattcagagtagttctgctttgtatcctgtgggtagggtttccaaagagaaggttgttggtgaagatgttgccacttcatcttctgccaaaaaagcaacagggcggaagaagtcttcatcacatgattctgggactgatattacttctgtgactcttggggatacaacagctgtcaaaaccaaaatacttataaagaaagggagaggaaatctggaaaaaaccaacttggacctcggcccaactgccccatccctggagaaggagaaaaccctctgcctttccactccttcatctagcactgttaaacattccacttcctccataggctccatgttggctcaggcagacaagcttccaatgactgacaagagggttgccagcctcctaaaaaaggccaaagctcagctctgcaagattgagaagagtaagagtcttaaacaaaccgaccagcccaaagcacagggtcaagaaagtgactcatcagagacctctgtgcgaggaccccggattaaacatgtctgcagaagagcagctgttgcccttggccgaaaacgagctgtgtttcctgatgacatgcccaccctgagtgccttaccatgggaagaacgagaaaagattttgtcttccatggggaatgatgacaagtcatcaattgctggctcagaagatgctgaacctcttgctccacccatcaaaccaattaaacctgtcactagaaacaaggcaccccaggaacctccagtaaagaaaggacgtcgatcgaggcggtgtgggcagtgtcccggctgccaggtgcctgaggactgtggtgtttgtactaattgcttagataagcccaagtttggtggtcgcaatataaagaagcagtgctgcaagatgagaaaatgtcagaatctacaatggatgccttccaaagcctacctgcagaagcaagctaaagctgtgaaaaagaaagagaaaaagtctaagaccagtgaaaagaaagacagcaaagagagcagtgttgtgaagaacgtggtggactctagtcagaaacctaccccatcagcaagagaggatcctgccccaaagaaaagcagtagtgagcctcctccacgaaagcccgtcgaggaaaagagtgaagaagggaatgtctcggcccctgggcctgaatccaaacaggccaccactccagcttccaggaagtcaagcaagcaggtctcccagccagcactggtcatcccgcctcagccacctactacaggaccgccaagaaaagaagttcccaaaaccactcctagtgagcccaagaaaaagcagcctccaccaccagaatcaggtccagagcagagcaaacagaaaaaagtggctccccgcccaagtatccctgtaaaacaaaaaccaaaagaaaaggaaaaaccacctccggtcaataagcaggagaatgcaggcactttgaacatcctcagcactctctccaatggcaatagttctaagcaaaaaattccagcagatggagtccacaggatcagagtggactttaaggaggattgtgaagcagaaaatgtgtgggagatgggaggcttaggaatcttgacttctgttcctataacacccagggtggtttgctttctctgtgccagtagtgggcatgtagagtttgtgtattgccaagtctgttgtgagcccttccacaagttttgtttagaggagaacgagcgccctctggaggaccagctggaaaattggtgttgtcgtcgttgcaaattctgtcacgtttgtggaaggcaacatcaggctacaaagcagctgctggagtgtaataagtgccgaaacagctatcaccctgagtgcctgggaccaaactaccccaccaaacccacaaagaagaagaaagtctggatctgtaccaagtgtgttcgctgtaagagctgtggatccacaactccaggcaaagggtgggatgcacagtggtctcatgatttctcactgtgtcatgattgcgccaagctctttgctaaaggaaacttctgccctctctgtgacaaatgttatgatgatgatgactatgagagtaagatgatgcaatgtggaaagtgtgatcgctgggtccattccaaatgtgagaatctttcaggtacagaagatgagatgtatgagattctatctaatctgccagaaagtgtggcctacacttgtgtgaactgtactgagcggcaccctgcagagtggcgactggcccttgaaaaagagctgcagatttctctgaagcaagttctgacagctttgttgaattctcggactaccagccatttgctacgctaccggcaggctgccaagcctccagacttaaatcccgagacagaggagagtataccttcccgcagctcccccgaaggacctgatccaccagttcttactgaggtcagcaaacaggatgatcagcagcctttagatctagaaggagtcaagaggaagatggaccaagggaattacacatctgtgttggagttcagtgatgatattgtgaagatcattcaagcagccattaattcagatggaggacagccagaaattaaaaaagccaacagcatggtcaagtccttcttcattcggcaaatggaacgtgtttttccatggttcagtgtcaaaaagtccaggttttgggagccaaataaagtatcaagcaacagtgggatgttaccaaacgcagtgcttccaccttcacttgaccataattatgctcagtggcaggagcgagaggaaaacagccacactgagcagcctcctttaatgaagaaaatcattccagctcccaaacccaaaggtcctggagaaccagactcaccaactcctctgcatcctcctacaccaccaattttgagtactgataggagtcgagaagacagtccagagctgaacccacccccaggcatagaagacaatagacagtgtgcgttatgtttgacttatggtgatgacagtgctaatgatgctggtcgtttactatatattggccaaaatgagtggacacatgtaaattgtgctttgtggtcagcggaagtgtttgaagatgatgacggatcactaaagaatgtgcatatggctgtgatcaggggcaagcagctgagatgtgaattctgccaaaagccaggagccaccgtgggttgctgtctcacatcctgcaccagcaactatcacttcatgtgttcccgagccaagaactgtgtctttctggatgataaaaaagtatattgccaacgacatcgggatttgatcaaaggcgaagtggttcctgagaatggatttgaagttttcagaagagtgtttgtggactttgaaggaatcagcttgagaaggaagtttctcaatggcttggaaccagaaaatatccacatgatgattgggtctatgacaatcgactgcttaggaattctaaatgatctctccgactgtgaagataagctctttcctattggatatcagtgttccagggtatactggagcaccacagatgctcgcaagcgctgtgtatatacatgcaagatagtggagtgccgtcctccagtcgtagagccggatatcaacagcactgttgaacatgatgaaaacaggaccattgcccatagtccaacatcttttacagaaagttcatcaaaagagagtcaaaacacagctgaaattataagtcctccatcaccagaccgacctcctcattcacaaacctctggctcctgttattatcatgtcatctcaaaggtccccaggattcgaacacccagttattctccaacacagagatcccctggctgtcgaccgttgccttctgcaggaagtcctaccccaaccactcatgaaatagtcacagtaggtgatcctttactctcctctggacttcgaagcattggctccaggcgtcacagtacctcttccttatcaccccagcggtccaaactccggataatgtctccaatgagaactgggaatacttactctaggaataatgtttcctcagtctccaccaccgggaccgctactgatcttgaatcaagtgccaaagtagttgatcatgtcttagggccactgaattcaagtactagtttagggcaaaacacttccacctcttcaaatttgcaaaggacagtggttactgtaggcaataaaaacagtcacttggatggatcttcatcttcagaaatgaagcagtccagtgcttcagacttggtgtccaagagctcctctttaaagggagagaagaccaaagtgctgagttccaagagctcagagggatctgcacataatgtggcttaccctggaattcctaaactggccccacaggttcataacacaacatctagagaactgaatgttagtaaaatcggctcctttgctgaaccctcttcagtgtcgttttcttctaaagaggccctctccttcccacacctccatttgagagggcaaaggaatgatcgagaccaacacacagattctacccaatcagcaaactcctctccagatgaagatactgaagtcaaaaccttgaagctatctggaatgagcaacagatcatccattatcaacgaacatatgggatctagttccagagataggagacagaaagggaaaaaatcctgtaaagaaactttcaaagaaaagcattccagtaaatcttttttggaacctggtcaggtgacaactggtgaggaaggaaacttgaagccagagtttatggatgaggttttgactcctgagtatatgggccaacgaccatgtaacaatgtttcttctgataagattggtgataaaggcctttctatgccaggagtccccaaagctccacccatgcaagtagaaggatctgccaaggaattacaggcaccacggaaacgcacagtcaaagtgacactgacacctctaaaaatggaaaatgagagtcaatccaaaaatgccctgaaagaaagtagtcctgcttcccctttgcaaatagagtcaacatctcccacagaaccaatttcagcctctgaaaatccaggagatggtccagtggcccaaccaagccccaataatacctcatgccaggattctcaaagtaacaactatcagaatcttccagtacaggacagaaacctaatgcttccagatggccccaaacctcaggaggatggctcttttaaaaggaggtatccccgtcgcagtgcccgtgcacgttctaacatgttttttgggcttaccccactctatggagtaagatcctatggtgaagaagacattccattctacagcagctcaactgggaagaagcgaggcaagagatcagctgaaggacaggtggatggggccgatgacttaagcacttcagatgaagacgacttatactattacaacttcactagaacagtgatttcttcaggtggagaggaacgactggcatcccataatttatttcgggaggaggaacagtgtgatcttccaaaaatctcacagttggatggtgttgatgatgggacagagagtgatactagtgtcacagccacaacaaggaaaagcagccagattccaaaaagaaatggtaaagaaaatggaacagagaacttaaagattgatagacctgaagatgctggggagaaagaacatgtcactaagagttctgttggccacaaaaatgagccaaagatggataactgccattctgtaagcagagttaaaacacagggacaagattccttggaagctcagctcagctcattggagtcaagccgcagagtccacacaagtaccccctccgacaaaaatttactggacacctataatactgagctcctgaaatcagattcagacaataacaacagtgatgactgtgggaatatcctgccttcagacattatggactttgtactaaagaatactccatccatgcaggctttgggtgagagcccagagtcatcttcatcagaactcctgaatcttggtgaaggattgggtcttgacagtaatcgtgaaaaagacatgggtctttttgaagtattttctcagcagctgcctacaacagaacctgtggatagtagtgtctcttcctctatctcagcagaggaacagtttgagttgcctctagagctaccatctgatctgtctgtcttgaccacccggagtcccactgtccccagccagaatcccagtagactagctgttatctcagactcaggggagaagagagtaaccatcacagaaaaatctgtagcctcctctgaaagtgacccagcactgctgagcccaggagtagatccaactcctgaaggccacatgactcctgatcattttatccaaggacacatggatgcagaccacatctctagccctccttgtggttcagtagagcaaggtcatggcaacaatcaggatttaactaggaacagtagcacccctggccttcaggtacctgtttccccaactgttcccatccagaaccagaagtatgtgcccaattctactgatagtcctggcccgtctcagatttccaatgcagctgtccagaccactccaccccacctgaagccagccactgagaaactcatagttgttaaccagaacatgcagccactttatgttctccaaactcttccaaatggagtgacccaaaaaatccaattgacctcttctgttagttctacacccagtgtgatggagacaaatacttcagtattgggacccatgggaggtggtctcacccttaccacaggactaaatccaagcttgccaacttctcaatctttgttcccttctgctagcaaaggattgctacccatgtctcatcaccagcacttacattccttccctgcagctactcaaagtagtttcccaccaaacatcagcaatcctccttcaggcctgcttattggggttcagcctcctccggatccccaacttttggtttcagaatccagccagaggacagacctcagtaccacagtagccactccatcctctggactcaagaaaagacccatatctcgtctacagacccgaaagaataaaaaacttgctccctctagtaccccttcaaacattgccccttctgatgtggtttctaatatgacattgattaacttcacaccctcccagcttcctaatcatccaagtctgttagatttggggtcacttaatacttcatctcaccgaactgtccccaacatcataaaaagatctaaatctagcatcatgtattttgaaccggcacccctgttaccacagagtgtgggaggaactgctgccacagcggcaggcacatcaacaataagccaggatactagccacctcacatcagggtctgtgtctggcttggcatccagttcctctgtcttgaatgttgtatccatgcaaactaccacaacccctacaagtagtgcgtcagttccaggacacgtcaccttaaccaacccaaggttgcttggtaccccagatattggctcaataagcaatcttttaatcaaagctagccagcagagcctggggattcaggaccagcctgtggctttaccgccaagttcaggaatgtttccacaactggggacatcacagaccccctctactgctgcaataacagcggcatctagcatctgtgtgctcccctccactcagactacgggcataacagccgcttcaccttctggggaagcagacgaacactatcagcttcagcatgtgaaccagctccttgccagcaaaactgggattcattcttcccagcgtgatcttgattctgcttcagggccccaggtatccaactttacccagacggtagacgctcctaatagcatgggactggagcagaacaaggctttatcctcagctgtgcaagccagccccacctctcctgggggttctccatcctctccatcttctggacagcggtcagcaagcccttcagtgccgggtcccactaaacccaaaccaaaaaccaaacggtttcagctgcctctagacaaagggaatggcaagaagcacaaagtttcccatttgcggaccagttcttctgaagcacacattccagaccaagaaacgacatccctgacctcaggcacagggactccaggagcagaggctgagcagcaggatacagctagcgtggagcagtcctcccagaaggagtgtgggcaacctgcagggcaagtcgctgttcttccggaagttcaggtgacccaaaatccagcaaatgaacaagaaagtgcagaacctaaaacagtggaagaagaggaaagtaatttcagctccccactgatgctttggcttcagcaagaacaaaagcggaaggaaagcattactgagaaaaaacccaagaaaggacttgtttttgaaatttccagtgatgatggctttcagatctgtgcagaaagtattgaagatgcctggaagtcattgacagataaagtccaggaagctcgatcaaatgcccgcctaaagcagctctcatttgcaggtgttaacggtttgaggatgctggggattctccatgatgcagttgtgttcctcattgagcagctgtctggtgccaagcactgtcgaaattacaaattccgtttccacaagccagaggaggccaatgaaccccccttgaaccctcacggctcagccagggctgaagtccacctcaggaagtcagcatttgacatgtttaacttcctggcttctaaacatcgtcagcctcctgaatacaaccccaatgatgaagaagaggaggaggtacagctgaagtcagctcggagggcaactagcatggatctgccaatgcccatgcgcttccggcacttaaaaaagacttctaaggaggcagttggtgtctacaggtctcccatccatggccggggtcttttctgtaagagaaacattgatgcaggtgagatggtgattgagtatgccggcaacgtcatccgctccatccagactgacaagcgggaaaagtattacgacagcaagggcattggttgctatatgttccgaattgatgactcagaggtagtggatgccaccatgcatggaaatgctgcacgcttcatcaatcactcgtgtgagcctaactgctattctcgggtcatcaatattgatgggcagaagcacattgtcatctttgccatgcgtaagatctaccgaggagaggaactcacttacgactataagttccccattgaggatgccagcaacaagctgccctgcaactgtggcgccaagaaatgccggaagttcctaaactaaagctgctcttctcccccagtgttggagtgcaaggaggcggggccatccaaagcaacgctgaaggccttttccagcagctgggagctcccggattgcgtggcacagctgaggggcctctgtgatggctgagctctcttatgtcctatactcacatcagacatgtgatcatagtcccagagacagagttgaggtctcgaagaaaagatccatgatcggctttctcctggggcccctccaattgtttactgttagaaagtgggaatggggtccctagcagacttgcctggaaggagcctattatagagggttggttatgttgggagattgggcctgaatttctccacagaaataagttgccatcctcaggttggccctttcccaagcactgtaagtgagtgggtcaggcaaagccccaaatggagggttggttagattcctgacagtttgccagccaggccccacctacagcgtctgtcgaacaaacagaggtctggtggttttccctactatcctcccactcgagagttcacttctggttgggagacaggattcctagcacctccggtgtcaaaaggctgtcatggggttgtgccaattaattaccaaacattgagcctgcaggctttgagtgggagtgttgcccccaggagccttatctcagccaattacctttcttgacagtaggagcggcttccctctcccattccctcttcactcccttttcttcctttcccctgtcttcatgccactgctttcccatgcttctttcgggttgtaggggagactgactgcctgctcaaggacactccctgctgggcataggatgtgcctgcaaaaagttccctgagcctgtaagcactccaggtggggaagtggacaggagccattggtcataaccagacagaatttggaaacattttcataaagctccatggagagttttaaagaaacatatgtagcatgattttgtaggagaggaaaaagattatttaaataggatttaaatcatgcaacaacgagagtatcacagccaggatgacccttgggtcccattcctaagacatggttactttattttccccttgttaagacataggaagacttaatttttaaacggtcagtgtccagttgaaggcagaacactaatcagatttcaaggcccacaacttggggactagaccaccttatgttgagggaactctgccacctgcgtgcaacccacagctaaagtaaattcaatgacactactgccctgattactccttaggatgtggtcaaaacagcatcaaatgtttcttctcttcctttccccaagacagagtcctgaacctgttaaattaagtcattggattttactctgttctgtttacagtttactatttaaggttttataaatgtaaatatattttgtatatttttctatgagaagcacttcatagggagaagcacttatgacaaggctattttttaaaccgcggtattatcctaatttaaaagaagatcggtttttaataattttttattttcataggatgaagttagagaaaatattcagctgtacacacaaagtctggtttttcctgcccaacttccccctggaaggtgtactttttgttgtttaatgtgtagcttgtttgtgccctgttgacataaatgtttcctgggtttgctctttgacaataaatggagaaggaaggtcacccaactccattgggccactcccctccttcccctattgaagctcctcaaaaggctacagtaatatcttgatacaacagattctcttctttcccgcctctctcctttccggcgcaacttccagagtggtgggagacggcaatctttacatttccctcatctttcttacttcagagttagcaaacaacaagttgaatggcaacttgacatttttgcatcaccatctgcctcataggccactctttcctttccctctgcccaccaagtcctcatatctgcagagaacccattgatcaccttgtgccctcttttggggcagcctgttgaaactgaagcacagtctgaccactcacgataaagcagatttttctctgcctctgccacaaggtttcagagtagtgtagtccaagtagagggtggggcacccttttctcgccgcaagaagcccattcctatggaagtctagcaaagcaatacgactcagcccagcactctctgccccaggactcatggctctgctgtgccttccatcctgggctcccttctctcctgtgaccttaagaactttgtctggtggctttgctggaacattgtcactgttttcactgtcatgcagggagcccagcactgtggccaggatggcagagacttccttgtcatcatggagaagtgccagcaggggactgggaaaagcactctacccagacctcacctcccttcctccttttgcccatgaacaagatgcagtggccctaggggttccactagtgtctgctttcctttattattgcactgtgtgaggtttttttgtaaatccttgtattcctattttttttaaagaaaaaaaaaaaaccttaagctgcatttgttactgaaatgattaatgcactgatgggtcctgaattcaccttgagaaagacccaaaggccagtcagggggtggggggaactcagctaaatagacctagttactgccctgctaggccatgctgtactgtgagcccctcctcactctctaccaaccctaaaccctgaggacaggggaggaacccacagcttccttctcctgccagctgcagatggtttgccttgcctttccaccccctaattgtcaaccacaaaaatgagaaattcctcttctagctcagccttgagtccattgccaaattttcagcacacctgccagcaacttgggggaataagcgaaggtttccctacaagagggaaagaaggcaaaaacggcacagctatctccaaacacatctgagttcatttcaaaagtgaccaagggaatctccgcacaaaagtgcagattgaggaattgtgatgggtcattcccaagaatcccccaaggggcatcccaaatccctgaggagtaacagctgcaaacctggtcagttctcagtgagagccagctcacttatagctttgctgctagaacctgttgtggctgcatttcctggtggccagtgacaactgtgtaaccagaatagctgcatggcgctgaccctttggccggaacttggtctcttggctccctccttggccacccaccacctctcgcacagcccctctgtttttacaccaataacaagaattaagggggaagccctggcagctatacgttttcaaccagactcctttgccgggacccagcccgccaccctgctcgcctccgtcaaacccccggccaatgcagtgagcaccatgtagctcccttgatttaaaaaaaataaaaaataaaaaaaaaaggaaaaaaaaatacaacacacacacaaaaataaaaaaaatattctaatgaatgtatctttctaaaggactgacgttcaatcaaatatctgaaaatactaaaggtcaaaaccttgtcagatgttaacttctaagttcggtttgggattttttttttttaatagaaatcaagttgtttttgtttttaaggaaaagcgggtcattgcaaagggctgggtgtaattttatgtttcatttccttcattttaaagcaatacaaggttatggagcagatggttttgtgccgaatcatgaatactagtcaagtcacacactctggaaacttgcaactttttgtttgttttggttttcaaataaatataaatatgatatatataggaactaatatagtaatgcaccatgtaacaaagcctagttcagtccatggcttttaattctcttaacactatagataaggattgtgttacagttgctagtagcggcaggaagatgtcaggctcactttcctctgattcccgaaatggggggaacctctaaccataaaggaatggtagaacagtccattcctcggatcagagaaaaatgcagacatggtgtcacctggatttttttctgcccatgaatgttgccagtcagtacctgtcctccttgtttctctatttttggttatgaatgttggggttaccacctgcatttaggggaaaattgtgttctgtgctttcctggtatcttgttccgaggtactctagttctgtctttcaaccaagaaaatagaattgtggtgtttcttttattgaacttttaacagtctctttagtaaatacaggtagttgaataattgtttcaagagctcaacagatgacaagcttcttttctagaaataagacattttttgacaactttatcatgtataacagatctgttttttttccttgtgttcttccaagcttctggttagagaaaaagagaaaaaaaaaaaaggaaaatgtgtctaaagtccatcagtgttaactccctgtgacagggatgaaggaaaatactttaatagttcaaaaaataataatgctgaaagctctctacgaaagactgaatgtaaaagtaaaaagtgtacatagttgtaaaaaaaaggagtttttaaacatgtttattttctatgcacttttttttatttaagtgatagtttaattaataaacatgtcaagttta

SEQ ID NO: 18989 - DNA, 4504 bp, Homo sapiens
  source 1..4504: mol_type = unassigned DNA
ggttccgcggggctggcgggcgagcgggcggccgggatcggcggcggcggcggcggcggcggcgcttgacagacaatgagggcggcggggcggcgttgagcggcggcggcggcggcggcggcggcgagcgacgcggggcccgggggcggggcggggcgccagccatggacaatcagtgcaccgtccaggtgaggttagagctggggcatcgcgcccaactgcgcaagaagcccaccacggaggggttcactcacgactggatggtgtttgtccgcggccccgagcaatgtgacatccagcacttcgtggagaaggtggtcttctggctgcacgacagcttccccaagcccagacgcgtgtgcaaggagcccccctacaaagtagaggagtcggggtacgctggcttcatcatgcccatcgaggtgcacttcaaaaacaaggaggagccgaggaaggtctgcttcacctacgacctgttcctgaacctggaaggcaacccgcccgtgaaccacctgcgctgcgagaagctcaccttcaacaaccccaccacggagttccggtacaagctcctgcgggccggcggggtgatggtaatgcccgaaggagcagacacggtgtccaggcccagtcccgactaccccatgttacccacaattccactctctgccttctctgaccccaagaagaccaaaccatcccacggctccaaggacgccaacaaggagagcagcaagacctccaagccacacaaggtgaccaaggagcaccgggagcggccccgcaaagactccgagagcaagagctcctccaaggagctggagcgtgagcaggccaaaagctccaaggacacctcgcggaagctgggcgagggccggctgcccaaggaggagaaggcgccaccgcccaaggctgccttcaaggaacccaagatggccctgaaagagaccaagctggaaagcacgtcccccaagggtgggcccccacccccacccccacccccaccccgggcttccagcaagcggccggccaccgccgactcgccaaagcccagcgccaagaagcagaagaagagcagctcgaaggggtcccggagtgctccaggcacctcgccccgcacctcctcctcctcctccttctcggacaagaagccggccaaggacaagagcagcaccagaggggagaaggtgaaggccgagagtgagccccgggaggccaaaaaggccctggaggtggaggagtccaactcagaggacgaggcctccttcaagtccgagtctgcccagtcaagcccgtccaactccagctccagctcagactccagctcagactcagacttcgagccatcccagaaccacagccaaggacccctgcgctccatggtggaggacctgcagtccgaggagtccgacgaggacgactcttcgtcaggcgaggaggctgccggcaagaccaacccggggagggactccaggttgagcttcagcgacagcgagagtgacaacagcgccgactcctccctgcccagccgtgagcccccacccccccagaagccacccccgcccaacagcaaggtgtcaggccggaggagccccgagtcctgcagcaagcctgagaagatcctcaagaagggcacctacgacaaggcctacacggatgagctggtggagctacaccggaggctgatggcgctgcgggagcgcaacgtgctgcagcagattgtgaatctgatcgaggagactggccacttcaatgtcaccaacaccaccttcgacttcgacctcttctccctggacgagaccaccgtgcgcaaactgcagagctgcctggaggccgtggccacatgaccctgggccgcgtgccgggcccccaccgccggggtcctgggaggctgcagccaggcctcgcctgccctcctctcccgtctcgcctgcccgcagcactgccttagcgacagccctgtcctcgcccgcacagcccgctgcactttcctcggcggctccctgcccactctccccgctccatcgccaggagccctggggccgggctgggccacacgggagccgccccccgggctctctgggctcccctcagagagcggctggtgttgaaggcagctctgggcagagacagggccgggggcccctcgcccagccttgggaccagcccccactgctcggcgggctgtgcggcgtcgctgccccagcctttctgagcagcggatcgacggctggggggcatctccagcctcccgaatggttcagaacacaccctccgcccaccctggacctcagaaggccctgcctgtgtgtctgcgtcgtcctccgtgtagacctagcgccggctcctccccggctcgcgctgcgctggggtctgtgctgtatagttctctctattatatatgtgtgtgcactgtctggtcaagagcagtgtccatgtgcgtttctgtggcagcagtgcacgtggggtgggtggggggtgcgtacggtggggcttgtaggttaagatgtctctgcggtggtgtggggctggaggccgagccaggcacggcagctggccctctccaggcgcatggaggaattctccctttgccgttccaaggatgccgccgcctcctaccggggctcccgggggggtcagccaacactacaaagggcagcgagtcctcagggcgcccgggagccaccagtctgctctcgggctctactcagactagcgccaacagtctccgcggacagactcgcatcagccgccctggggctcggcctcctcccataggctcctcttcctctctttcattcaagtcttcaaactttgaaaaaaatatgagcttttgccaaataagacgggatagtttatggagttttctgaggcgcattgaactctggtcagcccctcgagcgtgggctcggccatcagcaggcccggtgggttggccgggctggccctcccaggctgcctttctctctggtcgcggcctggcccgccccggcctccaccgccgcaattcatgctggtgccgcgcccgcagccccactcctggtatgcctgagattctccaggggccaagccggtcctccttcccggcccactcttccagggccaggacgctcccgcggagccagcccatcgtggctgggggtcccaggggctggaggcctgcctggttagcctctgtttcccagacattgactcgaggcgcctccagtcctctcaaccccctgactttcaagtcctttcaagtccttgtgccctgaccaagttatgaggaaaagagggctgagggcctggaggtgggctcgcaccccctcgaacccacctagatgtctcctcctccccagcctatgagttcagacttggggggctccatctgtccctccctgaggtccctcatcttgtccctgctctgattctgtcagcagatcctgaacactccttggtggggacccatgcctccaaggctgcccccaatgccagctgtcctggggaaactccccagaactctcggggaaaggcccgagaaccttcggaggaagcctccgggactcctcgccacctgctctgtttctctcccggccccactgccttcaggtatcaggaagagggcaggcccctgtgccccctctccccttcccagggcggccaacaatactccaccatggggcgcttcctttcttctctggaaactaagacattggactgaaggaactggcctgaggggggctgaccgggggcccgtgctgctgggagctctacgcacaagaggccgccggggtcacggacaggaacctcagcccagggtgctggcctttctccttcgcaggagtcccccaaaatccacacagcgactcgagcagccttccactcagccagaggagggtcgggctcccccgcctgctctcggtggtggcgtctggcccttcctgccgtttccaaggcctccggaagcaccaacccagttctcagttacctcctctggccggaaggcctcacgttgtcctccagagctgctctgggcccagggctggctccgtgaccacctgatggacgtgctgggcagcatgggctcccaaggcagcatccccagctgctctcccaccccaccccagctgcccggcggctgggcccacgagggctctggggacacttccataggaaaggggcctggcactttgtgattgccacgtgtttcctgttaagccgcctgcccccagtgcaaatctctgtgttttgctctctcctgaacaaaaatgtaaaccgacgccggaaagcaaatggtatcgaatacctttcttgcccataagggtttttacaaagaacgtgtctcactaggaactaggacactcatcggcccgagaccaactcctggataaaaggaataaggagaatcgtgtttgtaacgagttacaggattgtttctttcctggattttaaacttttgttaaattgtgaaattatggaggagttttatagaaaaaaaaagtgaaataaagtcagatgggaaagc

SEQ ID NO: 18990 - DNA, 4072 bp, Homo sapiens
  source 1..4072: mol_type = unassigned DNA
aacagccttgagatgagatcacacaaacactcaaatgtagcttctaggggaggggagaacccaggaggctgggctttctcttctcttctcaccactggaagggaggagtaaccagaaggagcggaagctaaaacacgctgtccagagaggggagctgtggtcagtgggacgtcagtgagtcagtcatagggtttgtcctgatggtggtggtggcaggtggtaagggttggggaaaaatgaagaattagaggaaacccccaacaccagcaggcaggctgtactgtgactggactctccctcaacatcccccactctgctcaaagctgagggacagaggtggatagtgctgggagggaagagaagagagggggaggagaaggagagagggaaaggggcagtggagagaacaaggccatttctgtttcttttccagggacctgaccagagctgggtggagggaaagcgtgtgtgtgggacttggcatgaaatgaccaatgatgacgagaagtgaccaggaaattccattccctaggacattagggtctctgaaacttgagggtggggtcagagtgtgaagaagacaggtcagggtgaatgtgatggtagcgcagggcagtgggggatgggaacaaagccagaaaaggaagtaagagccactggcggccactcttctttaaagcagccagaagagagtgggttgaggaaaaatgaagtcctgagctggtcagcccaggcggaagagccacccgaatccaaccccacagtgaatagggaaggggctgagaaaacaacaggagggatgaggattagacctcataaggccacgtcctgagagccaagtggtgctcagaactcgacctctctgagttccaaatggcaagagtgaaatatggaaccgggaaagccaccccccgcccccaccaagatcatactaggacttgagggtctcagagctgttgggaggtgagcagaagggatgggaaagaggtgccagggaggaaggatgtacaggctagttctctggtcctgttcgggccccaaaccggttctcccggtcccaccgcctctggccctaaggcctccaacccgcggcctgacaagccctcacatgaagcagctggagagaaagaaagaatcgagagaatggcatgggcaattctggctagaagcccggggcagcagctggtccctgtgtggagaccccgagacatggagggctgctgagggactctggagaagcggtgtggactccatatttcagccaagtgacaggcccaacaccaaccttcccttccccaggaaaggtcttctgggggcttaagaggaaagagggctaggccctaagcctcccctccccaaatatattcaatcacacagattccgtatctgtctccccccactacacaactctacctagaagttctctgctgttctcaacccttaaccggactgggacctctctgggaatctttcggaccctctccctcccacctcccccaacattccagttccttcttttccttctactcttcagcggcctcagcctgcgcaccccaggagcgtggatgactacggccaccccgggcgcgcacccctttcccaccaccccagcatctctgcagcccaggacacccgcctcccccacaccccgcatccggtgtgtctccgcctggcccggccggcgcggcaggcgggccaggggaccaactgcacggcctcacctgctcttctccaccatccagacgttcagctacagctggtgggggtgagggactctgctccgtggccgccagtgtgggcttcccgggctagctctgcggcgaggtgggggagccgagtacgagccggcagaggtggggccggctgagggcggaagcggcggcgacgcgattacgaaacccgtccggctcggagcccggcgcactgctcccctctggactgcggaggcactgcactgcgcgggacgtgggagggtgcctctgcagcccctcaaggccgccgcccctgcggggagaactggagaatgcggacacctagatgaggccctggcacccaagctggggcccccggaatctcacgttccctttactcgccaggcatttcggggcaaaacgaagcggagccccccaaacccccagacctaaccaagttcagagattcgcagaagcacgccccccaccccaaatttattgtgctctacccaaaatggaataggactaggtttatttacccattgtgagggtagagaggcgagtctggaggagcagggattgggagaaggggtggaaaaatactctgattcttaaaaatactttgtaacctaaagtccttaaattgtggaagaaaggaatactcctcctttccattgtagtctagagttaagatttcaaatccataaattagaggacctaaaattagagggcaattaactgctcattcattgggcccccagtcagcacgggggtgctggaagagatcgggaataatagcgcagaccaatgagcctagggagatgctttcatcgtctctccttccctcaagtgttctggaacctatcatttgaattagccgagtcaggcaggagggggcggggaatccttccgcccttcttaggaggggctgcattgcagggggagagtgaactgacagactcagtcactgaagagggaaaaggagtgagaagacaaagccgtcaaagccccaacagctttgtatttctccagcccggcgcagaccccggagctcccgaggcactccctccatctttggaacacgccagtaattgattgataacaggaagctatgagggaccctgtgagtagccagtacagttcctttcttttctggaggatgcccatcccagaactggatctgtcggagctggaaggcctgggtctgtcagatacagccacctacaaggtcaaagacagcagcgttggcaaaatgatcgggcaagcaactgcagcagaccaggagaaaaaccctgaaggtgatggcctccttgagtacagcaccttcaacttctggagagctcccattgccagcatccactccttcgaactggacttgctctaaggccaagacttctctctcccatcaccttgccctcattgtcttccctctcaagccccttcctttccactcctttcccattttaatcttgttctctccctactgtgttggtggtgctgatgaatctgccagagttgagttctatgtatttatttatctatctgtctactccatttctctcaaaagccctcaagtcacaaagtaaatggttcaagcaatggagtactgggtcacagggattcctcctttcccccccaaatattaactccagaaactaggcctgactggggacacctgagagtagtatagtagtgcaaaatggaagactgatttttgactctattataatcagcttcagagattccttaaaccttcctaatttcctgctccagggcagtaaacacaaatatttcttcaaggggtgatgaaaacctcggaagttttaatttgaggttatctgctacgaaacagtatttctaaaaggctaaagtgataagtctcttgcttttttttgatcctgctcttatattcttttttttcctcagagaaatcaggagggtagttagaggtataaaacaggaggaaatattatggaaaatgaaaatagggaaaataattgaatcattttagaagtagctaatttcttttctcaaaagagtgtcccttcttcacacctactcactttacaactttgctcctaactgtgggttgaaaactctagctaaagaaagttatcaaatcttaacatgcattcctactattatgatagtttttaaggtttcaattcaatcttctgaacggcataagtcctattttagccttacctcctgcatttgcaatacgtaatactgatcagtgggcacagttcttcagctacattgagaccctgaaatgaacaattatattctgactcgacatcttgtccccaatccttccaaaaatattgatggtgatttgtgctaccatttactcgtttatttaataaagacattcaatccca

SEQ ID NO: 18991 - DNA, 3367 bp, Homo sapiens
  source 1..3367: mol_type = unassigned DNA
acggcgcatgctccgcaatcatcttctttaccctggagctgctgctgctgctgctgcttttgcttttggggctgagtttaataagcgagcgagcgagcaagcgagcgcggggggaaaaaggcagagaatgtccgccatctaccctccgctcctgggcgcgctctcattcatagcagcctcttcatgaattacagctgagggggggcggaggaggggggggtaccacacaacaccccagcaaacctccgggcccccaggcatggctagctcgtgtgccgtgcaggtgaagctggagctggggcaccgcgcccaggtgaggaaaaaacccaccgtggagggcttcacccacgactggatggtgttcgtacgcggtccggagcacagtaacatacagcactttgtggagaaagtcgtcttccacttgcacgaaagctttcctaggccaaaaagagtgtgcaaagatccaccttacaaagtagaagaatctgggtatgctggtttcattttgccaattgaagtttattttaaaaacaaggaagaacctaggaaagtccgctttgattatgacttattcctgcatcttgaaggccatccaccagtgaatcacctccgctgtgaaaagctaactttcaacaaccccacagaggactttaggagaaagttgctgaaggcaggaggggaccctaataggagtattcataccagcagcagcagcagcagcagcagtagcagcagcagcagcagcagcagcagcagcagtagcagcagcagcagcagcagcagcagcagcagtagcagcagcagtagcagcagcagcagcagcagtagtaccagtttttcaaagcctcacaaattaatgaaggagcacaaggaaaaaccttctaaagactccagagaacataaaagtgccttcaaagaaccttccagggatcacaacaaatcttccaaagaatcctctaagaaacccaaagaaaataaaccactgaaagaagagaaaatagttcctaagatggccttcaaggaacctaaacccatgtcaaaagagccaaaaccagatagtaacttactcaccatcaccagtggacaagataagaaggctcctagtaaaaggccgcccatttcagattctgaagaactctcagccaaaaaaaggaaaaagagtagctcagaggctttatttaaaagtttttctagcgcaccaccactgatactcacttgttctgctgacaaaaaacagataaaagataaatctcatgtcaagatgggaaaggtcaaaattgaaagtgagacatcagagaagaagaaatcaacgttaccgccatttgatgatattgtggatcccaatgattcagatgtggaggagaatatatcctctaaatctgattctgaacaacccagtcctgccagctccagctccagctccagctccagcttcacaccatcccagaccaggcaacaaggtcctttgaggtctataatgaaagatctgcattctgatgacaatgaggaggaatcagatgaagtggaggataacgacaatgactctgaaatggagaggcctgtaaatagaggaggcagccgaagtcgcagagttagcttaagtgatggcagcgatagtgaaagcagttctgcttcttcacccctacatcacgaacctccaccacccttactaaaaaccaacaacaaccagattcttgaagtgaaaagtccaataaagcaaagcaaatcagataagcaaataaagaatggtgaatgtgacaagatcgtgaaccttatagaagaaactggacactttcatatcacaaacacaacatttgattttgatctttgctcgctggacaaaaccacagtccgtaaactacagagttacctggaaacatctggaacatcctgaggatataacaactggatgcatcaagaactattgtgttttttttttttggttttttttttttttggttgtgattttttgttcttgttgtttatatgaaaacactcaaaatgatgcaaccaaaagggaaaaaataaaaatcaaacaaccttcagctttatttttctttaaagccagtcatcatctcttgataaaggagaggttaaagcaaaccagcctcagcggaccactcttctctccaaggaaatccccgggaagagttagcctggatagccttgaaaacaaacaaatcaaacacaacacaagaaaactcaaagaatgtgtatggtatcatgtatctctctgtggtggttcattccacaggacgaatgcatattcaacacactgccttattacataactgatctatttattatcgcatacagatattctaagtcgttgagggaatgacaccatcagacattataagtacttggtcccgtggatgctctttcaatgcagcacccttgccatcccaagcccagtgaccttactcgtataccgtgccactttccaccaactttttccaagtcctttaactcgttgcagtctgtattttccaccttttgtttttccagttccaggacacagattatcaactggggggaccaaatagccaccttgattttcttctttgtggtctttttcctgaaagttggggcccagtccttggctgtatccatgtaatgatcttggaccatggtagaaaatgcaccaaataggatcatatgaattgctgtctagccttagtcaataaacttgtaggacttttaaacaaaagtgtacctgtaaatgtcctgaatccagcattgttgagctgtcatcaacattcttgtgtctgttttactgttacaatattaggtgaatatggaagtaaaggcattccacaggatcatcatttaaaaaaaaagaattctggtcctgttttctaaaaaaaaaaactgttgtagaaattcttaatttggatctatttattagtcagagtttcagctttcttcagctgccagtgtgttactcatctttatcctaaaaatctggaatcagagatttttgtttgttcacatatgattctcttagacacttttatatttgaaaaaattaaaatctttctttggggaaaaattcttggttattctgccataacagattatgtattaacttgtagattcagtggttcaatacctgtttagttgcttgctaatatttccagaaggatttcttgtattggtgaaagacggttggggatggggggatttttttgttcttgttgtacccttgttttgaaactagaaatctgtcctgtggcatgcaaaagaaagcaaattatttttaaaagaaaaaaaccaaagtacttttggtgtcattattccatcttctccataagtggagaaatgaaaagtaagaacagctcatcttcaaagtttttactagaaattc

SEQ ID NO: 18992 - DNA, 708 bp, Homo sapiens
  source 1..708: mol_type = unassigned DNA
tcttaacagctctccattccttgctgacacacatgaacttaggggcacttctgttttcctgagggctacaccgttttcttttgaaagagtctgaacaacccagtcctgccagctccagctccagctccagctccagcttcacaccatcccagaccaggcaacaaggtcctttgaggtctataatgaaagatctgcattctgatgacaatgaggaggaatcagatgaagtggaggataacgacaatgactctgaaatggagaggcctgtaaatagaggaggcagccgaagtcgcagagttagcttaagtgatggcagcgatagtgaaagcagttctgcttcttcacccctacatcacgaacctccaccacccttactaaaaaccaacaacaaccagattcttgaagtgaaaagtccaataaagcaaagcaaatcagataagcaaataaagaatggtgaatgtgacaaggcatacctagatgaactggtagagcttcacagaaggttaatgacattgagagaaagacacattctgcagcagatcgtgaaccttatagaagaaactggacactttcatatcacaaacacaacatttgattttgatctttgctcgctggacaaaaccacagtccgtaaactacagagttacctggaaacatctggaacatcctgaggatataacaactggatgcatcaagaactattgtgtt

SEQ ID NO: 18993 - DNA, 1983 bp, Homo sapiens
  source 1..1983: mol_type = unassigned DNA
tcttttcaagaagatcattcttaacagctctccattccttgctgacacacatgaacttaggggcacttctgttttcctgagggctacaccgttttcttttgaaagagtctgaacaacccagtcctgccagctccagctccagctccagctccagcttcacaccatcccagaccaggcaacaaggtcctttgaggtctataatgaaagatctgcattctgatgacaatgaggaggaatcagatgaagtggaggataacgacaatgactctgaaatggagaggcctgtaaatagaggaggcagccgaagtcgcagagttagcttaagtgatggcagcgatagtgaaagcagttctgcttcttcacccctacatcacgaacctccaccacccttactaaaaaccaacaacaaccagattcttgaagtgaaaagtccaataaagcaaagcaaatcagataagcaaataaagaatggtgaatgtgacaagatcgtgaaccttatagaagaaactggacactttcatatcacaaacacaacatttgattttgatctttgctcgctggacaaaaccacagtccgtaaactacagagttacctggaaacatctggaacatcctgaggatataacaactggatgcatcaagaactattgtgttttttttttttggttttttttttttttggttgtgattttttgttcttgttgtttatatgaaaacactcaaaatgatgcaaccaaaagggaaaaaataaaaatcaaacaaccttcagctttatttttctttaaagccagtcatcatctcttgataaaggagaggttaaagcaaaccagcctcagcggaccactcttctctccaaggaaatccccgggaagagttagcctggatagccttgaaaacaaacaaatcaaacacaacacaagaaaactcaaagaatgtgtatggtatcatgtatctctctgtggtggttcattccacaggacgaatgcatattcaacacactgccttattacataactgatctatttattatcgcatacagatattctaagtcgttgagggaatgacaccatcagacattataagtacttggtcccgtggatgctctttcaatgcagcacccttgccatcccaagcccagtgaccttactcgtataccgtgccactttccaccaactttttccaagtcctttaactcgttgcagtctgtattttccaccttttgtttttccagttccaggacacagattatcaactggggggaccaaatagccaccttgattttcttctttgtggtctttttcctgaaagttggggcccagtccttggctgtatccatgtaatgatcttggaccatggtagaaaatgcaccaaataggatcatatgaattgctgtctagccttagtcaataaacttgtaggacttttaaacaaaagtgtacctgtaaatgtcctgaatccagcattgttgagctgtcatcaacattcttgtgtctgttttactgttacaatattaggtgaatatggaagtaaaggcattccacaggatcatcatttaaaaaaaaagaattctggtcctgttttctaaaaaaaaaaactgttgtagaaattcttaatttggatctatttattagtcagagtttcagctttcttcagctgccagtgtgttactcatctttatcctaaaaatctggaatcagagatttttgtttgttcacatatgattctcttagacacttttatatttgaaaaaattaaaatctttctttggggaaaaattcttggttattctgccataacagattatgtattaacttgtagattcagtggttcaatacctgtttagttgcttgctaatatttccagaaggatttcttgtattggtgaaagacggttggggatggggggatttttttgttcttgttgtacccttgttttgaaactagaaatctgtcctgtggcatgcaaaagaaagcaaattatttt

SEQ ID NO: 18994 - DNA, 6772 bp, Homo sapiens
  source 1..6772: mol_type = unassigned DNA
gaggctcggagcccgggtgtcaggcgccacggcgcatgctccgcaatcatcttctttaccctggagctgctgctgctgctgctgcttttgcttttggggctgagtttaataagcgagcgagcgagcaagcgagcgcggggggaaaaaggcagagaatgtccgccatctaccctccgctcctgggcgcgctctcattcatagcagcctcttcatgaattacagctgagggggggcggaggaggggggggtaccacacaacaccccagcaaacctccgggcccccaggcatggctagctcgtgtgccgtgcaggtgaagctggagctggggcaccgcgcccaggtgaggaaaaaacccaccgtggagggcttcacccacgactggatggtgttcgtacgcggtccggagcacagtaacatacagcactttgtggagaaagtcgtcttccacttgcacgaaagctttcctaggccaaaaagagtgtgcaaagatccaccttacaaagtagaagaatctgggtatgctggtttcattttgccaattgaagtttattttaaaaacaaggaagaacctaggaaagtccgctttgattatgacttattcctgcatcttgaaggccatccaccagtgaatcacctccgctgtgaaaagctaactttcaacaaccccacagaggactttaggagaaagttgctgaaggcaggaggggaccctaataggagtattcataccagcagcagcagcagcagcagcagtagcagcagcagcagcagcagcagcagcagcagtagcagcagcagcagcagcagcagcagcagcagtagcagcagcagtagcagcagcagcagcagcagtagtaccagtttttcaaagcctcacaaattaatgaaggagcacaaggaaaaaccttctaaagactccagagaacataaaagtgccttcaaagaaccttccagggatcacaacaaatcttccaaagaatcctctaagaaacccaaagaaaataaaccactgaaagaagagaaaatagttcctaagatggccttcaaggaacctaaacccatgtcaaaagagccaaaaccagatagtaacttactcaccatcaccagtggacaagataagaaggctcctagtaaaaggccgcccatttcagattctgaagaactctcagccaaaaaaaggaaaaagagtagctcagaggctttatttaaaagtttttctagcgcaccaccactgatactcacttgttctgctgacaaaaaacagataaaagataaatctcatgtcaagatgggaaaggtcaaaattgaaagtgagacatcagagaagaagaaatcaacgttaccgccatttgatgatattgtggatcccaatgattcagatgtggaggagaatatatcctctaaatctgattctgaacaacccagtcctgccagctccagctccagctccagctccagcttcacaccatcccagaccaggcaacaaggtcctttgaggtctataatgaaagatctgcattctgatgacaatgaggaggaatcagatgaagtggaggataacgacaatgactctgaaatggagaggcctgtaaatagaggaggcagccgaagtcgcagagttagcttaagtgatggcagcgatagtgaaagcagttctgcttcttcacccctacatcacgaacctccaccacccttactaaaaaccaacaacaaccagattcttgaagtgaaaagtccaataaagcaaagcaaatcagataagcaaataaagaatggtgaatgtgacaaggcatacctagatgaactggtagagcttcacagaaggttaatgacattgagagaaagacacattctgcagcagatcgtgaaccttatagaagaaactggacactttcatatcacaaacacaacatttgattttgatctttgctcgctggacaaaaccacagtccgtaaactacagagttacctggaaacatctggaacatcctgaggatataacaactggatgcatcaagaactattgtgttttttttttttggttttttttttttttggttgtgattttttgttcttgttgtttatatgaaaacactcaaaatgatgcaaccaaaagggaaaaaataaaaatcaaacaaccttcagctttatttttctttaaagccagtcatcatctcttgataaaggagaggttaaagcaaaccagcctcagcggaccactcttctctccaaggaaatccccgggaagagttagcctggatagccttgaaaacaaacaaatcaaacacaacacaagaaaactcaaagaatgtgtatggtatcatgtatctctctgtggtggttcattccacaggacgaatgcatattcaacacactgccttattacataactgatctatttattatcgcatacagatattctaagtcgttgagggaatgacaccatcagacattataagtacttggtcccgtggatgctctttcaatgcagcacccttgccatcccaagcccagtgaccttactcgtataccgtgccactttccaccaactttttccaagtcctttaactcgttgcagtctgtattttccaccttttgtttttccagttccaggacacagattatcaactggggggaccaaatagccaccttgattttcttctttgtggtctttttcctgaaagttggggcccagtccttggctgtatccatgtaatgatcttggaccatggtagaaaatgcaccaaataggatcatatgaattgctgtctagccttagtcaataaacttgtaggacttttaaacaaaagtgtacctgtaaatgtcctgaatccagcattgttgagctgtcatcaacattcttgtgtctgttttactgttacaatattaggtgaatatggaagtaaaggcattccacaggatcatcatttaaaaaaaaagaattctggtcctgttttctaaaaaaaaaaactgttgtagaaattcttaatttggatctatttattagtcagagtttcagctttcttcagctgccagtgtgttactcatctttatcctaaaaatctggaatcagagatttttgtttgttcacatatgattctcttagacacttttatatttgaaaaaattaaaatctttctttggggaaaaattcttggttattctgccataacagattatgtattaacttgtagattcagtggttcaatacctgtttagttgcttgctaatatttccagaaggatttcttgtattggtgaaagacggttggggatggggggatttttttgttcttgttgtacccttgttttgaaactagaaatctgtcctgtggcatgcaaaagaaagcaaattatttttaaaagaaaaaaaccaaagtacttttggtgtcattattccatcttctccataagtggagaaatgaaaagtaagaacagctcatcttcaaagtttttactagaaattcagccgaaaagaagagaaatgaagaaatacttctggatccaaaggttcgtcactggatcagccttaagaaagtctctatgtgtgctaatagaccagtatctcccttgtttgttcccatgccagatgctgtcttttcatacagagattaactagtgtctgtacagaaaatggtctttccagacccattcttttgggcagttatataaatgcagattgataatggagttatttctgcattttaaaaaggggattttttacactgtttctttctatccaaagaaactatttttcctttaaaaaattataatacagccatgctccttgtaaattatttctctgaagcgtcctcccagaggacaagtgtactttctcaataatgttatgattcttaatgacgattggcatgaaccgtacttgaagcatttgttgtattgtccacttcttgatgtgcagagaaactttgagtcattttggacattaggtgattgatgaattgtgtggtttcagttgcgttttgtttttaactttatagctggaaggggagggtaatgtttatatggaaatgttgcaaatttttaaaatattttaaaatttctaactgctaacacatattctgatcaagccagaagtttatgtgatttaatatatctgtgtagtttaactagaaacgtatatatgtagtttgggccatttttatttctgtaactaaattgtggggcaaaaaatatgatttgccaatgtaaaaattttttcctttaagttactaaccaagaagctaggtaagataagaaatgaccaaacaaaaataatgataagaaggacagctattatatgataaactttagacttgaaaattaggtaataaagttaatttcttcagaatatcctaaaatgtaagtttgtaaattgataaagttcagaaaaacttatccatcttctactcatcaagatagcaaagtaagtttttcacaaaattaagactgagagttacgttattttttttgaagtggtaatcttgctctcatctaatttttaaatacagaaataaaaagatccctttgaattaatttcaagtagttttaatacctctcttaaagtaaccccttcagttctgtcacatttatatacacccaactttgaagcctattaagaatatctttgacatgtgagtaccctaacagtggctctggtttcttaagcacaaagggaaaatggcagggtttaatttctttggtgtacatatataaatagatgtttcaaataaaattaattgggtaaatgtgaatatggtttgaaccagccagagtatgataaacttttaaaaaatttttcctcagtgatcagccaggggaaaaaatatatgtacagagctcctgcccctctgcccccttataacttagcttttgcctctggttttgcagcaggatgtgtgttggtgggtttggggttccttctgtcttcggatgtaacagtcatgttagcaacaatattttgcagttacttcaccatcctcagcataatctgcctctctctcaatcttaatacagacaaataggtatgtctataaatgcgttcatatagtgtcaaggtagggaagactataaaaacttcagatcaggaaaaaaatatctcttaagagagtgtcttaaacattttaaattgctaggcaatttaaatctctctaatctgaatattcaccttttggtggaaagagccagtaatattggttttcttccactaaaaagtttcttcaaaatttttttttttttttttttttttttttttttgccgatatcttttacaggcccacctaatctttaaaaaaaagagaagaaacaattttaggcctgtataacatcctatttactacttcaagctccacaaatgtagttaatatatttgtttaagagagactttactcttaaatgttttaactttgcctacttaatggagttggatgtccagtgttggaaacagtcagtgtctgtttggtggctcgtgtttatttttgtcactgtagaagtgatctgctctggagtaatttgctgtatgcttattactttccacctttagcgttttgtgtactaatgctatgtactgctcctatatttatatatacatatatatatatatatacacatatatattatcagagtaatcttgctttggactgttgctctaaaactatgaatatgatgtagagactactacagctgcagtgaatgttaaggagtcaattcccatggtttagtttagtctcgggctggaagtctacatcttttgacctcttttgttttatatgatgctttttattatgtaggcactgccatccctgaatattccttgtaaagatgcagtgaagaagtcaatttaaaaggaagacaaagccaccgctgtctgtaaactgtaaatgtgtattttggcacttgtactccagtattctgaaaatagagttatgatggaaatgctgacagatccttaatggtggccagagctaccatgcagtgcaaaaataaattaagtgaaaatgtattattgagattaacagtgcaaggccaatacattttataaatctgtcagtatctttttaatggactgtgtatgtgtagttatgttgaaagatacattgtgtatgtgtacatgcttttgtgtgaattcaaggcacactgtaagatgtatttcccttctctaaaatccatgttgaaatgtaagtacagattgatagaaataggtgttttacttaaactcatataatctgtttcagcaccttttttaaaatgtataattgtactgatttgctgagagtcatttgaccaaagtttggctttattttgcatacaggaaaaattagcccctagccttttctcaagaagtgatgctgtttctaaagaagaatagatggggagatctgagacatccagagagaggacaatgtgtccaaaaccagctgaaggcagagagtccatgcctcattcattttaggagtccctcatgtctaacaccatcttctgtgtcctaaagccagtatatatataatatttttaaaactctgcaaagattggaacaagaagtggtgggatacattttttggcataaactgggctatgtgtgcccggtattttttctttcccccctatttctttggagggttttgttcagaaacaatgtgctatagccagagagagtcgatcttacaaagtccctgcatttactttcacagcaagaactgctaccttgattagacaggaaggagaacaactactacaacaaagagaataaaatacattcagtttggtaaataaccaa

SEQ ID NO: 18995 - DNA, 2040 bp, Homo sapiens
  source 1..2040: mol_type = unassigned DNA
atatttcagccgccgccgccgggagctgcgggcacagtccggggacgcggcgagcagcctcggcggccgcacctccgcaaagcgccgcggccgctacgatgtgtgccgtgcaggtgaagctggagctggggcaccgcgcccaggtgaggaaaaaacccaccgtggagggcttcacccacgactggatggtgttcgtacgcggtccggagcacagtaacatacagcactttgtggagaaagtcgtcttccacttgcacgaaagctttcctaggccaaaaagagtgtgcaaagatccaccttacaaagtagaagaatctgggtatgctggtttcattttgccaattgaagtttattttaaaaacaaggaagaacctaggaaagtccgctttgattatgacttattcctgcatcttgaaggccatccaccagtgaatcacctccgctgtgaaaagctaactttcaacaaccccacagaggactttaggagaaagttgctgaaggcaggaggggaccctaataggagtattcataccagcagcagcagcagcagcagcagtagcagcagcagcagcagcagcagcagcagcagtagcagcagcagcagcagcagcagcagcagcagtagcagcagcagtagcagcagcagcagcagcagtagtaccagtttttcaaagcctcacaaattaatgaaggagcacaaggaaaaaccttctaaagactccagagaacataaaagtgccttcaaagaaccttccagggatcacaacaaatcttccaaagaatcctctaagaaacccaaagaaaataaaccactgaaagaagagaaaatagttcctaagatggccttcaaggaacctaaacccatgtcaaaagagccaaaaccagatagtaacttactcaccatcaccagtggacaagataagaaggctcctagtaaaaggccgcccatttcagattctgaagaactctcagccaaaaaaaggaaaaagagtagctcagaggctttatttaaaagtttttctagcgcaccaccactgatactcacttgttctgctgacaaaaaacagataaaagataaatctcatgtcaagatgggaaaggtcaaaattgaaagtgagacatcagagaagaagaaatcaacgttaccgccatttgatgatattgtggatcccaatgattcagatgtggaggagaatatatcctctaaatctgattctgaacaacccagtcctgccagctccagctccagctccagctccagcttcacaccatcccagaccaggcaacaaggtcctttgaggtctataatgaaagatctgcattctgatgacaatgaggaggaatcagatgaagtggaggataacgacaatgactctgaaatggagaggcctgtaaatagaggaggcagccgaagtcgcagagttagcttaagtgatggcagcgatagtgaaagcagttctgcttcttcacccctacatcacgaacctccaccacccttactaaaaaccaacaacaaccagattcttgaagtgaaaagtccaataaagcaaagcaaatcagataagcaaataaagaatggtgaatgtgacaaggcatacctagatgaactggtagagcttcacagaaggttaatgacattgagagaaagacacattctgcagcagatcgtgaaccttatagaagaaactggacactttcatatcacaaacacaacatttgattttgatctttgctcgctggacaaaaccacagtccgtaaactacagagttacctggaaacatctggaacatcctgaggatataacaactggatgcatcaagaactattgtgttttttttttttggttttttttttttttggttgtgattttttgttcttgttgtttatatgaaaacactcaaaatgatgcaaccaaaagggaaaaaataaaaatcaaacaaccttcagctttatttttctttaaagccagtcatcatctcttgataaaggagaggttaaagcaaaccagcctcagcggaccactcttctctccaaggaaa

SEQ ID NO: 18996 - DNA, 2070 bp, Homo sapiens
  source 1..2070: mol_type = unassigned DNA
gcatttgttgtcgtgcttgtcgtggctgagtgtgttctccctcttttccccgacccccttcccgactggggataacattccgttacaatcctgtccgatgtagatgcggggcccggggcgcctggggccaagccgggccgggcgggcgggtatatttgggggtgtggagtgtgcgcgcccacgcgcgtgaaacgtggatgcagagggcaccgccgtttccttttatgtgcgtttcaagaaggaggaaaaaatgtcaggcgcaacgttcactgccgaaacctcgccttcctgttattcacggctgtctctcctccccctgcccgcagtgtgccgtgcaggtgaagctggagctggggcaccgcgcccaggtgaggaaaaaacccaccgtggagggcttcacccacgactggatggtgttcgtacgcggtccggagcacagtaacatacagcactttgtggagaaagtcgtcttccacttgcacgaaagctttcctaggccaaaaagagtgtgcaaagatccaccttacaaagtagaagaatctgggtatgctggtttcattttgccaattgaagtttattttaaaaacaaggaagaacctaggaaagtccgctttgattatgacttattcctgcatcttgaaggccatccaccagtgaatcacctccgctgtgaaaagctaactttcaacaaccccacagaggactttaggagaaagttgctgaaggcaggaggggaccctaataggagtattcataccagcagcagcagcagcagcagcagtagcagcagcagcagcagcagcagcagcagcagtagcagcagcagcagcagcagcagcagcagcagtagcagcagcagtagcagcagcagcagcagcagtagtaccagtttttcaaagcctcacaaattaatgaaggagcacaaggaaaaaccttctaaagactccagagaacataaaagtgccttcaaagaaccttccagggatcacaacaaatcttccaaagaatcctctaagaaacccaaagaaaataaaccactgaaagaagagaaaatagttcctaagatggccttcaaggaacctaaacccatgtcaaaagagccaaaaccagatagtaacttactcaccatcaccagtggacaagataagaaggctcctagtaaaaggccgcccatttcagattctgaagaactctcagccaaaaaaaggaaaaagagtagctcagaggctttatttaaaagtttttctagcgcaccaccactgatactcacttgttctgctgacaaaaaacagataaaagataaatctcatgtcaagatgggaaaggtcaaaattgaaagtgagacatcagagaagaagaaatcaacgttaccgccatttgatgatattgtggatcccaatgattcagatgtggaggagaatatatcctctaaatctgattctgaacaacccagtcctgccagctccagctccagctccagctccagcttcacaccatcccagaccaggcaacaaggtcctttgaggtctataatgaaagatctgcattctgatgacaatgaggaggaatcagatgaagtggaggataacgacaatgactctgaaatggagaggcctgtaaatagaggaggcagccgaagtcgcagagttagcttaagtgatggcagcgatagtgaaagcagttctgcttcttcacccctacatcacgaacctccaccacccttactaaaaaccaacaacaaccagattcttgaagtgaaaagtccaataaagcaaagcaaatcagataagcaaataaagaatggtgaatgtgacaaggcatacctagatgaactggtagagcttcacagaaggttaatgacattgagagaaagacacattctgcagcagatcgtgaaccttatagaagaaactggacactttcatatcacaaacacaacatttgattttgatctttgctcgctggacaaaaccacagtccgtaaactacagagttacctggaaacatctggaacatcctgaggatataacaactggatgcatcaagaactattgtgttttttttttttgg

SEQ ID NO: 18997 - DNA, 7740 bp, Homo sapiens
  source 1..7740: mol_type = unassigned DNA
gcggccgcggaggcggaggcagccgcggaggcggaggcggccggcggggggtggcgaggggcgccgggcccccgcggacctgtcgtcctcggcccgtcctccggccccggccccgcgcggctgaggaggcgcggccaggaccatgtcggcgggcggccgtgacgaggagcggcggaagctggccgacatcatccaccactggaacgccaaccggctggacctgttcgagatcagccagccgaccgaggatttggagttccatggagtgatgagattttattttcaagataaagctgctggaaactttgcaacaaaatgtattcgggtctctagtactgccaccactcaagatgtaatcgaaacgctcgcggagaaatttcgacctgatatgcgaatgctgtcctctcccaagtattcactctatgaagtgcatgtcagcggagaaagaagattggatatagatgagaaacctctagttgtacaactgaattggaacaaagatgatcgggaaggcagatttgttcttaagaatgagaatgacgccattcctcctaagaaggctcaaagtaatggacctgaaaagcaggaaaaagaaggggttatccagaacttcaagagaactctctcaaagaaagaaaagaaggaaaaaaagaagagagaaaaagaggcattgcgacaggcatctgataaagatgatagacctttccaaggggaggatgttgaaaattctcgactggctgctgaggtttacaaagacatgccggaaaccagctttactcgaaccatttctaatcctgaggtggttatgaaacgacggaggcagcaaaaattggaaaagagaatgcaggaatttcggagctcagatgggcggcctgattcaggtggaacattgagaatttatgcagatagtttaaaaccaaatattccctacaagacaatcctgctgtctactacagatcctgcagactttgctgtggctgaagctttagagaagtatggtctggaaaaagaaaaccctaaggattactgcatcgcccgggttatgcttcctcctggagcccagcattctgatgaaaagggtgctaaagaaattattcttgatgatgatgagtgtcctttacaaatcttcagggaatggccaagtgacaaagggattttagtctttcagttgaagaggaggccaccagaccacatcccaaagaaaaccaagaaacacttggaaggcaagacacccaagggaaaggagagagctgacgggtctggctatggctccacccttcctccggagaagctgccctatttagtagagttaagcccagggagaaggaatcactttgcctactacaactatcacacttacgaagatggttctgactctagagataagccaaagctttaccgccttcagttaagtgttactgaagttgggacagaaaagttggatgacaactctatccagttgtttggcccaggaattcagccccatcactgtgaccttaccaacatggatggagtggtcactgtgacgcccagaagtatggacgcagaaacctacgtggaaggccagcgcatctcagaaaccaccatgctgcagagtggcatgaaagtgcagtttggggcgtcccatgtatttaagtttgtggaccccagtcaggatcatgctcttgcaaaaagatctgtggatggaggcctgatggttaagggcccaagacataaacctggaattgttcaggagacaacttttgatttgggaggagatattcatagtgggacagcattaccgacaagcaagagcaccactaggctggacagcgacagagtgtcgtctgcctctagcacagccgagcggggaatggtgaagccgatgatcagagtagaacagcagccagattatcgcaggcaagaaagcagaacacaggatgcttctgggcctgagctgatactacctgcaagcattgaattcagggaaagttctgaagattcatttttgtctgccattataaattatactaatagctctacagtccactttaagttgtcccctacatatgtattatatatggcatgccggtatgtattgtccaaccagtacagacctgacatcagccctacagagcgcacacataaagtcattgcagtcgtcaacaagatggtgagcatgatggagggtgtcatccagaaacagaagaatattgcaggggcacttgccttctggatggcaaatgcatctgaacttctcaacttcattaagcaagaccgagaccttagtcggatcacactggatgctcaagatgttttagcacatttggttcaaatggcatttaaatacttggttcactgtcttcaatcagaacttaataattacatgccagcctttctagatgaccctgaagagaacagtctgcaacgaccaaaaatagatgatgtgctgcacacgctcacaggagccatgtccttgctacgacgctgcagagtcaatgccgccctgaccatccagctcttctctcagctcttccacttcatcaatatgtggctgttcaatagattggtgaccgacccagattcggggctgtgctcccattactggggtgcgattatccgtcagcagttgggccatattgaagcctgggctgagaagcaggggctggaactggctgcggactgtcatctgagcaggatcgtgcaggcaacgactttgcttaccatggataagtatgcacctgatgacattccaaatataaacagcacctgctttaagttaaattcattacaacttcaagccttattacagaactatcactgtgcacctgatgagccttttatcccaacggatcttatagaaaatgtagtgactgtggctgaaaacactgccgatgagctggcccgcagtgatggaagggaagtgcagttggaggaggatcctgatctgcagctgccgtttcttttgccagaagatggttattcttgtgatgttgtcagaaacattccaaatggtttacaagaatttttagaccctctgtgccagagaggattttgcaggttaattcctcacacacgttcaccaggtacttggacaatatattttgaaggtgcagattatgaaagtcaccttctgcgtgagaacacagagctggcaattcctctgaggaaagaacctgaaataatcactgtgaccctaaaaaagcagaatggaatgggccttagcattgttgcagcaaagggtgctggtcaagataaactaggaatctatgtgaagtcggttgtgaaaggaggtgctgcagatgtggatggacgtctagctgcaggtgatcagctcctcagtgtggatggacgaagtctggttggactctctcaggaaagggcggcagaactcatgacaagaacaagctctgtggtgacactggaagtagcaaagcagggtgccatctaccacggtctggccacccttctcaatcagccatcccccatgatgcagagaatttcagatcgtcgtggctcaggtaaaccccgaccaaagagtgaaggctttgagctctataataattcaactcaaaatgggtctcctgagagtcctcagctgccttgggcagaatatagtgaaccaaagaaattgcctggtgatgacagactgatgaaaaatagagctgatcaccgttccagccccaacgtagcaaatcagcctcctagtcctggagggaaaagtgcatatgcctctggaacaacagcgaagataacatctgtctctactggaaacctctgcactgaggagcagacgcctccgcctagacctgaagcctaccccatccccactcagacgtacaccagagagtattttaccttcccagcttccaaatcccaggatcggatggctcctcctcagaaccagtggccaaattatgaggaaaagccacatatgcacacagatagtaatcattccagtattgcaattcagcgtgttacacgttcccaagaagaacttcgagaagataaagcttaccaacttgagcggcatcgaatagaggcagctatggaccgaaagtctgatagtgatatgtggataaatcagagctcctcactggactccagtacctctagccaggagcatctgaaccattcctctaagtcggtcacccctgcttccacactgaccaaaagtggccctggccgttggaaaacaccagcagccataccggccacccctgtggccgtctcccagccaatccgaacagacctgcctccgccacccccgccacctccagtccactatgccggtgatttcgatggaatgtccatggatttgcctctcccaccacccccttccgccaaccagatagggctgccgtctgcgcaggtggctgctgctgaacggagaaagagagaagaacatcagcgttggtatgagaaggagaaggcccgcctggaggaggagcgggagaggaagcggagagagcaggagaggaagttgggccagatgcgcactcagtccttaaaccctgctccgttttctcccctgactgcacagcagatgaagcccgaaaagccttccacactccagcggccacaggaaacagtcattcgggagctgcagcctcagcagcagccccgcacgatcgagcgcagagacttgcagtacattacagtcagcaaagaggagctttcctcgggggacagtctgtcccccgacccgtggaagcgggacgccaaggagaagctggagaagcagcagcagatgcacatcgtggacatgctgagcaaggagatccaggagctccagagcaaaccggaccgcagcgccgaggagagcgaccggctgcgcaagctcatgctggagtggcagttccagaagagactccaggagtcgaagcagaaggacgaagatgacgaggaggaggaggacgatgatgtggacaccatgctgatcatgcagcgcctggaggctgaacgaagagcgaggcagactgctatgccagcaatctctgttctagatttgttgcaggacgaggagcggaggcggcagcagcagttagaagagatgcgcaagcgggaagcggaagaccgagcgaggcaagaggaagagcgccggcggcaggaggaggagcgaacaaaacgagacgctgaagaaaagaggcgacaggaagaagggtattacagccgcctggaagccgagaggcgcagacagcacgacgaggcggcgcgcaggttgctggagcccgaggcgcccggtctgtgccgccctccgcttccccgggactacgagcccccgtccccgtcccccgcgcccggcgcccctcctcccccgcctcagcgaaacgcctcctacctcaaaacacaggtcctctcccccgactcgctgttcactgccaagtttgttgcatacaatgaggaggaggaggaggaggactgcagcctagcaggaccaaactcttacccaggatctactggagcagctgttggagcccatgacgcctgtcgggatgcaaaagagaagcgctctaaaagccaagatgcagattcacctggaagttctggggcccctgaaaacttgacattcaaggaacgccagcgtcttttttcacaaggtcaagatgtatccaataaagtgaaagcttctcgtaaattaacagaactggagaatgaactgaacacaaagtgaaagaaaatgaggagaacactttgtatttaccccaaaatcttttcagttgtgggtttgtaggtgcgagtttgaagaggaaaagaggaagggggttatatttctaagtgatttacaatttctgtttctaaaattgttgggatttagaaatgtttcaattccaagaaattttattttactttaccatgagattgccatttatgtaatttaaacactgtctagtttcttaattatctaactcacacgagggtaagttttttgttggtttcttttttggagtcctgagttcaaaggggacagaactaagggcaggagaagagaatggatgtgtcttctctcccatcttcccctcatcatcgaccgaggagcacaaagaagttctgtttctgtttttttcagaaactttattttagctgtcaagcagagaatagcttgaactattcagactattgttggcactgtttagtagtgaccacacgctcttctacccgggaaggaacatatgacgacatgctcctcccatgtcccctgatggtgtctgttcccacaatatccttctagtctgcatcgtgaagtggcttaggccaaagcttcctgtgtgatgacgcacgtccgagactgttccatctcattcctcgcaaatttgagctcttctgatcaattctaaatatttgattaattttaattctgaaagaaaattttgaggatttaagcttaggggattttatttttataaataccagattattgttagacttaataaatcactgttaaatttaaagatgacagttaccttggaaagttcactaatacttcgctccaaggcgtctgtaaaagaagatatctttattggagcaatgttcatgtgactgggaatgacagaagaatgggagatgagtagggacccctcaagcacagctgtcactcagaaattttaaatttgaaaaagaaatcgattttcatctgtatgccgtcaaggaaggaattcagttacagggcatctgtaacttaaatattgtaagaataactcatatggaagttcaagctatttttatactataatagagttatttaattttaatttgttgaattattagttaccactgtcatttcttcagctatggatatgtggctgatgttggggagacggacctcagtgtgttttatattgtctggtgttaagatgataaattactttgtgattacaagcaaattttctatttgacaaagcccttggtggagtccaaatgatttttctgtaccatattgttctcttacacatacgtatgttaggaaaataggcacactttcaaagagaatgttctcttacacatacgtatgttaggaaaatagacacattttcaaagagaatgttctcttacatatgttaggaaaataggcacactttcaaagagaggtataggggctttttactgccttcgaaatcacttttaataaaagttgtatgataaatcattaaaaatgcgagtgtaaatatttttttttacctctatcagggtttttatttgaaagtgtgctcttaccatttccttgtttgagtaagagagtgaatggttctgagtgtttaggaaggatttgcttgcttgcagcagaagttctaggaaaagcaggcacctcccaaatatcttgaggacactggcagccttatggtgactaaatccacactttctttaaagagatgcagatgaattacttttctgttaatatatagaaaaatacacaggagaacatgcagatacatgtaaatatctacatacagggatatttgtatgtgtggttgtgaaacccatacacaagtggatttggccatctttgggcagtgaggtcaaatgtgaatatgtgtaaaagtgcttttcagaactgcattactatgagaaaacatcaaaactgctgtagttttccatttctactgtatttcagttgcaacctatttttaataaactttgtatgtatttaagtgtatttgctattgttttgaaagtgctgacaaagtttatatttgtaacatcagccttcctcgcccatctctttccatctgtctcttcttcattaaacacttactgagtatg

SEQ ID NO: 18998 - DNA, 5249 bp, Homo sapiens
  source 1..5249: mol_type = unassigned DNA
ccaggcggaggccaagtcggaggacgcggcgcggccgcggaggcggaggcagccgcggaggcggaggcggccggcggggggtggcgaggggcgccgggcccccgcggacctgtcgtcctcggcccgtcctccggccccggccccgcgcggctgaggaggcgcggccaggaccatgtcggcgggcggccgtgacgaggagcggcggaagctggccgacatcatccaccactggaacgccaaccggctggacctgttcgagatcagccagccgaccgaggatttggagttccatggagtgatgagattttattttcaagataaagctgctggaaactttgcaacaaaatgtattcgggtctctagtactgccaccactcaagatgtaatcgaaacgctcgcggagaaatttcgacctgatatgcgaatgctgtcctctcccaagtattcactctatgaagtgcatgtcagcggagaaagaagattggatatagatgagaaacctctagttgtacaactgaattggaacaaagatgatcgggaaggcagatttgttcttaagaatgagaatgacgccattcctcctaagaaggctcaaagtaatggacctgaaaagcaggaaaaagaaggggttatccagaacttcaagagaactctctcaaagaaagaaaagaaggaaaaaaagaagagagaaaaagaggcattgcgacaggcatctgataaagatgatagacctttccaaggggaggatgttgaaaattctcgactggctgctgaggtttacaaagacatgccggaaaccagctttactcgaaccatttctaatcctgaggtggttatgaaacgacggaggcagcaaaaattggaaaagagaatgcaggaatttcggagctcagatgggcggcctgattcaggtggaacattgagaatttatgcagatagtttaaaaccaaatattccctacaagacaatcctgctgtctactacagatcctgcagactttgctgtggctgaagctttagagaagtatggtctggaaaaagaaaaccctaaggattactgcatcgcccgggttatgcttcctcctggagcccagcattctgatgaaaagggtgctaaagaaattattcttgatgatgatgagtgtcctttacaaatcttcagggaatggccaagtgacaaagggattttagtctttcagttgaagaggaggccaccagaccacatcccaaagaaaaccaagaaacacttggaaggcaagacacccaagggaaaggagagagctgacgggtctggctatggctccacccttcctccggagaagctgccctatttagtagagttaagcccagggagaaggaatcactttgcctactacaactatcacacttacgaagatggttctgactctagagataagccaaagctttaccgccttcagttaagtgttactgaagttgggacagaaaagttggatgacaactctatccagttgtttggcccaggaattcagccccatcactgtgaccttaccaacatggatggagtggtcactgtgacgcccagaagtatggacgcagaaacctacgtggaaggccagcgcatctcagaaaccaccatgctgcagagtggcatgaaagtgcagtttggggcgtcccatgtatttaagtttgtggaccccagtcaggatcatgctcttgcaaaaagatctgtggatggaggcctgatggttaagggcccaagacataaacctggaattgttcaggagacaacttttgatttgggaggagatattcatagtgggacagcattaccgacaagcaagagcaccactaggctggacagcgacagagtgtcgtctgcctctagcacagccgagcggggaatggtgaagccgatgatcagagtagaacagcagccagattatcgcaggcaagaaagcagaacacaggatgcttctgggcctgagctgatactacctgcaagcattgaattcagggaaagttctgaagattcatttttgtctgccattataaattatactaatagctctacagtccactttaagttgtcccctacatatgtattatatatggcatgccggtatgtattgtccaaccagtacagacctgacatcagccctacagagcgcacacataaagtcattgcagtcgtcaacaagatggtgagcatgatggagggtgtcatccagaaacagaagaatattgcaggggcacttgccttctggatggcaaatgcatctgaacttctcaacttcattaagcaagaccgagaccttagtcggatcacactggatgctcaagatgttttagcacatttggttcaaatggcatttaaatacttggttcactgtcttcaatcagaacttaataattacatgccagcctttctagatgaccctgaagagaacagtctgcaacgaccaaaaatagatgatgtgctgcacacgctcacaggagccatgtccttgctacgacgctgcagagtcaatgccgccctgaccatccagctcttctctcagctcttccacttcatcaatatgtggctgttcaatagattggtgaccgacccagattcggggctgtgctcccattactggggtgcgattatccgtcagcagttgggccatattgaagcctgggctgagaagcaggggctggaactggctgcggactgtcatctgagcaggatcgtgcaggcaacgactttgcttaccatggataagtatgcacctgatgacattccaaatataaacagcacctgctttaagttaaattcattacaacttcaagccttattacagaactatcactgtgcacctgatgagccttttatcccaacggatcttatagaaaatgtagtgactgtggctgaaaacactgccgatgagctggcccgcagtgatggaagggaagtgcagttggaggaggatcctgatctgcagctgccgtttcttttgccagaagatggttattcttgtgatgttgtcagaaacattccaaatggtttacaagaatttttagaccctctgtgccagagaggattttgcaggttaattcctcacacacgttcaccaggtacttggacaatatattttgaaggtgcagattatgaaagtcaccttctgcgtgagaacacagagctggctcagcctctgaggaaagaacctgaaataatcactgtgaccctaaaaaagcagaatggaatgggccttagcattgttgcagcaaagggtgctggtcaagataaactaggaatctatgtgaagtcggttgtgaaaggaggtgctgcagatgtggatggacgtctagctgcaggtgatcagctcctcagtgtggatggacgaagtctggttggactctctcaggaaagggcggcagaactcatgacaagaacaagctctgtggtgacactggaagtagcaaagcagggtgccatctaccacggtctggccacccttctcaatcagccatcccccatgatgcagagaatttcagatcgtcgtggctcaggtaaaccccgaccaaagagtgaaggctttgagctctataataattcaactcaaaatgggtctcctgagagtcctcagctgccttgggcagaatatagtgaaccaaagaaattgcctggtgatgacagactgatgaaaaatagagctgatcaccgttccagccccaacgtagcaaatcagcctcctagtcctggagggaaaagtgcatatgcctctggaacaacagcgaagataacatctgtctctactggaaacctctgcactgaggagcagacgcctccgcctagacctgaagcctaccccatccccactcagacgtacaccagagagtattttaccttcccagcttccaaatcccaggatcggatggctcctcctcagaaccagtggccaaattatgaggaaaagccacatatgcacacagatagtaatcattccagtattgcaattcagcgtgttacacgttcccaagaagaacttcgagaagataaagcttaccaacttgagcggcatcgaatagaggcagctatggaccgaaagtctgatagtgatatgtggataaatcagagctcctcactggactccagtacctctagccaggagcatctgaaccattcctctaagtcggtcacccctgcttccacactgaccaaaagtggccctggccgttggaaaacaccagcagccataccggccacccctgtggccgtctcccagccaatccgaacagacctgcctccgccacccccgccacctccagtccactatgccggtgatttcgatggaatgtccatggatttgcctctcccaccacccccttccgccaaccagatagggctgccgtctgcgcaggtggctgctgctgaacggagaaagagagaagaacatcagcgttggtatgagaaggagaaggcccgcctggaggaggagcgggagaggaagcggagagagcaggagaggaagttgggccagatgcgcactcagtccttaaaccctgctccgttttctcccctgactgcacagcagatgaagcccgaaaagccttccacactccagcggccacaggaaacagtcattcgggagctgcagcctcagcagcagccccgcacgatcgagcgcagagacttgcagtacattacagtcagcaaagaggagctttcctcgggggacagtctgtcccccgacccgtggaagcgggacgccaaggagaagctggagaagcagcagcagatgcacatcgtggacatgctgagcaaggagatccaggagctccagagcaaaccggaccgcagcgccgaggagagcgaccggctgcgcaagctcatgctggagtggcagttccagaagagactccaggagtcgaagcagaaggacgaagatgacgaggaggaggaggacgatgatgtggacaccatgctgatcatgcagcgcctggaggctgaacgaagagcgaggcagactgctatgccagcaatctctgttctagatttgttgcaggacgaggagcggaggcggcagcagcagttagaagagatgcgcaagcgggaagcggaagaccgagcgaggcaagaggaagagcgccggcggcaggaggaggagcgaacaaaacgagacgctgaagaaaaggttatggtcctttaagggcagctagaattttaccaagttagcctgaacgtaatcgattggctggggcagagcgggctggaagttctgtgtttct

SEQ ID NO: 18999 - DNA, 7704 bp, Homo sapiens
  source 1..7704: mol_type = unassigned DNA
gcggccgcggaggcggaggcagccgcggaggcggaggcggccggcggggggtggcgaggggcgccgggcccccgcggacctgtcgtcctcggcccgtcctccggccccggccccgcgcggctgaggaggcgcggccaggaccatgtcggcgggcggccgtgacgaggagcggcggaagctggccgacatcatccaccactggaacgccaaccggctggacctgttcgagatcagccagccgaccgaggatttggagttccatggagtgatgagattttattttcaagataaagctgctggaaactttgcaacaaaatgtattcgggtctctagtactgccaccactcaagatgtaatcgaaacgctcgcggagaaatttcgacctgatatgcgaatgctgtcctctcccaagtattcactctatgaagtgcatgtcagcggagaaagaagattggatatagatgagaaacctctagttgtacaactgaattggaacaaagatgatcgggaaggcagatttgttcttaagaatgagaatgacgccattcctcctaagaaggctcaaagtaatggacctgaaaagcaggaaaaagaaggggttatccagaacttcaagagaactctctcaaagaaagaaaagaaggaaaaaaagaagagagaaaaagaggcattgcgacaggcatctgataaagatgatagacctttccaaggggaggatgttgaaaattctcgactggctgctgaggtttacaaagacatgccggaaaccagctttactcgaaccatttctaatcctgaggtggttatgaaacgacggaggcagcaaaaattggaaaagagaatgcaggaatttcggagctcagatgggcggcctgattcaggtggaacattgagaatttatgcagatagtttaaaaccaaatattccctacaagacaatcctgctgtctactacagatcctgcagactttgctgtggctgaagctttagagaagtatggtctggaaaaagaaaaccctaaggattactgcatcgcccgggttatgcttcctcctggagcccagcattctgatgaaaagggtgctaaagaaattattcttgatgatgatgagtgtcctttacaaatcttcagggaatggccaagtgacaaagggattttagtctttcagttgaagaggaggccaccagaccacatcccaaagaaaaccaagaaacacttggaaggcaagacacccaagggaaaggagagagctgacgggtctggctatggctccacccttcctccggagaagctgccctatttagtagagttaagcccagggagaaggaatcactttgcctactacaactatcacacttacgaagatggttctgactctagagataagccaaagctttaccgccttcagttaagtgttactgaagttgggacagaaaagttggatgacaactctatccagttgtttggcccaggaattcagccccatcactgtgaccttaccaacatggatggagtggtcactgtgacgcccagaagtatggacgcagaaacctacgtggaaggccagcgcatctcagaaaccaccatgctgcagagtggcatgaaagtgcagtttggggcgtcccatgtatttaagtttgtggaccccagtcaggatcatgctcttgcaaaaagatctgtggatggaggcctgatggttaagggcccaagacataaacctggaattgttcaggagacaacttttgatttgggaggagatattcatagtgggacagcattaccgacaagcaagagcaccactaggctggacagcgacagagtgtcgtctgcctctagcacagccgagcggggaatggtgaagccgatgatcagagtagaacagcagccagattatcgcaggcaagaaagcagaacacaggatgcttctgggcctgagctgatactacctgcaagcattgaattcagggaaagttctgaagattcatttttgtctgccattataaattatactaatagctctacagtccactttaagttgtcccctacatatgtattatatatggcatgccggtatgtattgtccaaccagtacagacctgacatcagccctacagagcgcacacataaagtcattgcagtcgtcaacaagatggtgagcatgatggagggtgtcatccagaaacagaagaatattgcaggggcacttgccttctggatggcaaatgcatctgaacttctcaacttcattaagcaagaccgagaccttagtcggatcacactggatgctcaagatgttttagcacatttggttcaaatggcatttaaatacttggttcactgtcttcaatcagaacttaataattacatgccagcctttctagatgaccctgaagagaacagtctgcaacgaccaaaaatagatgatgtgctgcacacgctcacaggagccatgtccttgctacgacgctgcagagtcaatgccgccctgaccatccagctcttctctcagctcttccacttcatcaatatgtggctgttcaatagattggtgaccgacccagattcggggctgtgctcccattactggggtgcgattatccgtcagcagttgggccatattgaagcctgggctgagaagcaggggctggaactggctgcggactgtcatctgagcaggatcgtgcaggcaacgactttgcttaccatggataagtatgcacctgatgacattccaaatataaacagcacctgctttaagttaaattcattacaacttcaagccttattacagaactatcactgtgcacctgatgagccttttatcccaacggatcttatagaaaatgtagtgactgtggctgaaaacactgccgatgagctggcccgcagtgatggaagggaagtgcagttggaggaggatcctgatctgcagctgccgtttcttttgccagaagatggttattcttgtgatgttgtcagaaacattccaaatggtttacaagaatttttagaccctctgtgccagagaggattttgcaggttaattcctcacacacgttcaccaggtacttggacaatatattttgaaggtgcagattatgaaagtcaccttctgcgtgagaacacagagctggcaattcctctgaggaaagaacctgaaataatcactgtgaccctaaaaaagcagaatggaatgggccttagcattgttgcagcaaagggtgctggtcaagataaactaggaatctatgtgaagtcggttgtgaaaggaggtgctgcagatgtggatggacgtctagctgcaggtgatcagctcctcagtgtggatggacgaagtctggttggactctctcaggaaagggcggcagaactcatgacaagaacaagctctgtggtgacactggaagtagcaaagcagggtgccatctaccacggtctggccacccttctcaatcagccatcccccatgatgcagagaatttcagatcgtcgtggctcaggtaaaccccgaccaaagagtgaaggctttgagctctataataattcaactcaaaatgggtctcctgagagtcctcagctgccttgggcagaatatagtgaaccaaagaaattgcctggtgatgacagactgatgaaaaatagagctgatcaccgttccagccccaacgtagcaaatcagcctcctagtcctggagggaaaagtgcatatgcctctggaacaacagcgaagataacatctgtctctactggaaacctctgcactgaggagcagacgcctccgcctagacctgaagcctaccccatccccactcagacgtacaccagagagtattttaccttcccagcttccaaatcccaggatcggatggctcctcctcagaaccagtggccaaattatgaggaaaagccacatatgcacacagatagtaatcattccagtattgcaattcagcgtgttacacgttcccaagaagaacttcgagaagataaagcttaccaacttgagcggcatcgaatagaggcagctatggaccgaaagtctgatagtgatatgtggataaatcagagctcctcactggactccagtacctctagccaggagcatctgaaccattcctctaagtcggtcacccctgcttccacactgaccaaaagtggccctggccgttggaaaacaccagcagccataccggccacccctgtggccgtctcccagccaatccgaacagacctgcctccgccacccccgccacctccagtccactatgccggtgatttcgatggaatgtccatggatttgcctctcccaccacccccttccgccaaccagatagggctgccgtctgcgcaggtggctgctgctgaacggagaaagagagaagaacatcagcgttggtatgagaaggagaaggcccgcctggaggaggagcgggagaggaagcggagagagcaggagaggaagttgggccagatgcgcactcagtccttaaaccctgctccgttttctcccctgactgcacagcagatgaagcccgaaaagccttccacactccagcggccacaggaaacagtcattcgggagctgcagcctcagcagcagccccgcacgatcgagcgcagagacttgcagtacattacagtcagcaaagaggagctttcctcgggggacagtctgtcccccgacccgtggaagcgggacgccaaggagaagctggagaagcagcagcagatgcacatcgtggacatgctgagcaaggagatccaggagctccagagcaaaccggaccgcagcgccgaggagagcgaccggctgcgcaagctcatgctggagtggcagttccagaagagactccaggagtcgaagcagaaggacgaagatgacgaggaggaggaggacgatgatgtggacaccatgctgatcatgcagcgcctggaggctgaacgaagagcgaggttgcaggacgaggagcggaggcggcagcagcagttagaagagatgcgcaagcgggaagcggaagaccgagcgaggcaagaggaagagcgccggcggcaggaggaggagcgaacaaaacgagacgctgaagaaaagaggcgacaggaagaagggtattacagccgcctggaagccgagaggcgcagacagcacgacgaggcggcgcgcaggttgctggagcccgaggcgcccggtctgtgccgccctccgcttccccgggactacgagcccccgtccccgtcccccgcgcccggcgcccctcctcccccgcctcagcgaaacgcctcctacctcaaaacacaggtcctctcccccgactcgctgttcactgccaagtttgttgcatacaatgaggaggaggaggaggaggactgcagcctagcaggaccaaactcttacccaggatctactggagcagctgttggagcccatgacgcctgtcgggatgcaaaagagaagcgctctaaaagccaagatgcagattcacctggaagttctggggcccctgaaaacttgacattcaaggaacgccagcgtcttttttcacaaggtcaagatgtatccaataaagtgaaagcttctcgtaaattaacagaactggagaatgaactgaacacaaagtgaaagaaaatgaggagaacactttgtatttaccccaaaatcttttcagttgtgggtttgtaggtgcgagtttgaagaggaaaagaggaagggggttatatttctaagtgatttacaatttctgtttctaaaattgttgggatttagaaatgtttcaattccaagaaattttattttactttaccatgagattgccatttatgtaatttaaacactgtctagtttcttaattatctaactcacacgagggtaagttttttgttggtttcttttttggagtcctgagttcaaaggggacagaactaagggcaggagaagagaatggatgtgtcttctctcccatcttcccctcatcatcgaccgaggagcacaaagaagttctgtttctgtttttttcagaaactttattttagctgtcaagcagagaatagcttgaactattcagactattgttggcactgtttagtagtgaccacacgctcttctacccgggaaggaacatatgacgacatgctcctcccatgtcccctgatggtgtctgttcccacaatatccttctagtctgcatcgtgaagtggcttaggccaaagcttcctgtgtgatgacgcacgtccgagactgttccatctcattcctcgcaaatttgagctcttctgatcaattctaaatatttgattaattttaattctgaaagaaaattttgaggatttaagcttaggggattttatttttataaataccagattattgttagacttaataaatcactgttaaatttaaagatgacagttaccttggaaagttcactaatacttcgctccaaggcgtctgtaaaagaagatatctttattggagcaatgttcatgtgactgggaatgacagaagaatgggagatgagtagggacccctcaagcacagctgtcactcagaaattttaaatttgaaaaagaaatcgattttcatctgtatgccgtcaaggaaggaattcagttacagggcatctgtaacttaaatattgtaagaataactcatatggaagttcaagctatttttatactataatagagttatttaattttaatttgttgaattattagttaccactgtcatttcttcagctatggatatgtggctgatgttggggagacggacctcagtgtgttttatattgtctggtgttaagatgataaattactttgtgattacaagcaaattttctatttgacaaagcccttggtggagtccaaatgatttttctgtaccatattgttctcttacacatacgtatgttaggaaaataggcacactttcaaagagaatgttctcttacacatacgtatgttaggaaaatagacacattttcaaagagaatgttctcttacatatgttaggaaaataggcacactttcaaagagaggtataggggctttttactgccttcgaaatcacttttaataaaagttgtatgataaatcattaaaaatgcgagtgtaaatatttttttttacctctatcagggtttttatttgaaagtgtgctcttaccatttccttgtttgagtaagagagtgaatggttctgagtgtttaggaaggatttgcttgcttgcagcagaagttctaggaaaagcaggcacctcccaaatatcttgaggacactggcagccttatggtgactaaatccacactttctttaaagagatgcagatgaattacttttctgttaatatatagaaaaatacacaggagaacatgcagatacatgtaaatatctacatacagggatatttgtatgtgtggttgtgaaacccatacacaagtggatttggccatctttgggcagtgaggtcaaatgtgaatatgtgtaaaagtgcttttcagaactgcattactatgagaaaacatcaaaactgctgtagttttccatttctactgtatttcagttgcaacctatttttaataaactttgtatgtatttaagtgtatttgctattgttttgaaagtgctgacaaagtttatatttgtaacatcagccttcctcgcccatctctttccatctgtctcttcttcattaaacacttactgagtatg

SEQ ID NO: 19000 - DNA, 6812 bp, Homo sapiens
  source 1..6812: mol_type = unassigned DNA
gcggccgcggaggcggaggcagccgcggaggcggaggcggccggcggggggtggcgaggggcgccgggcccccgcggacctgtcgtcctcggcccgtcctccggccccggccccgcgcggctgaggaggcgcggccaggaccatgtcggcgggcggccgtgacgaggagcggcggaagctggccgacatcatccaccactggaacgccaaccggctggacctgttcgagatcagccagccgaccgaggatttggagttccatggagtgatgagattttattttcaagataaagctgctggaaactttgcaacaaaatgtattcgggtctctagtactgccaccactcaagatgtaatcgaaacgctcgcggagaaatttcgacctgatatgcgaatgctgtcctctcccaagtattcactctatgaagtgcatgtcagcggagaaagaagattggatatagatgagaaacctctagttgtacaactgaattggaacaaagatgatcgggaaggcagatttgttcttaagaatgagaatgacgccattcctcctaagaaggctcaaagtaatggacctgaaaagcaggaaaaagaaggggttatccagaacttcaagagaactctctcaaagaaagaaaagaaggaaaaaaagaagagagaaaaagaggcattgcgacaggcatctgataaagatgatagacctttccaaggggaggatgttgaaaattctcgactggctgctgaggtttacaaagacatgccggaaaccagctttactcgaaccatttctaatcctgaggtggttatgaaacgacggaggcagcaaaaattggaaaagagaatgcaggaatttcggagctcagatgggcggcctgattcaggtggaacattgagaatttatgcagatagtttaaaaccaaatattccctacaagacaatcctgctgtctactacagatcctgcagactttgctgtggctgaagctttagagaagtatggtctggaaaaagaaaaccctaaggattactgcatcgcccgggttatgcttcctcctggagcccagcattctgatgaaaagggtgctaaagaaattattcttgatgatgatgagtgtcctttacaaatcttcagggaatggccaagtgacaaagggattttagtctttcagttgaagaggaggccaccagaccacatcccaaagaaaaccaagaaacacttggaaggcaagacacccaagggaaaggagagagctgacgggtctggctatggctccacccttcctccggagaagctgccctatttagtagagttaagcccagggagaaggaatcactttgcctactacaactatcacacttacgaagatggttctgactctagagataagccaaagctttaccgccttcagttaagtgttactgaagttgggacagaaaagttggatgacaactctatccagttgtttggcccaggaattcagccccatcactgtgaccttaccaacatggatggagtggtcactgtgacgcccagaagtatggacgcagaaacctacgtggaaggccagcgcatctcagaaaccaccatgctgcagagtggcatgaaagtgcagtttggggcgtcccatgtatttaagtttgtggaccccagtcaggatcatgctcttgcaaaaagatctgtggatggaggcctgatggttaagggcccaagacataaacctggaattgttcaggagacaacttttgatttgggaggagatattcatagtgggacagcattaccgacaagcaagagcaccactaggctggacagcgacagagtgtcgtctgcctctagcacagccgagcggggaatggtgaagccgatgatcagagtagaacagcagccagattatcgcaggcaagaaagcagaacacaggatgcttctgggcctgagctgatactacctgcaagcattgaattcagggaaagttctgaagattcatttttgtctgccattataaattatactaatagctctacagtccactttaagttgtcccctacatatgtattatatatggcatgccggtatgtattgtccaaccagtacagacctgacatcagccctacagagcgcacacataaagtcattgcagtcgtcaacaagatggtgagcatgatggagggtgtcatccagaaacagaagaatattgcaggggcacttgccttctggatggcaaatgcatctgaacttctcaacttcattaagcaagaccgagaccttagtcggatcacactggatgctcaagatgttttagcacatttggttcaaatggcatttaaatacttggttcactgtcttcaatcagaacttaataattacatgccagcctttctagatgaccctgaagagaacagtctgcaacgaccaaaaatagatgatgtgctgcacacgctcacaggagccatgtccttgctacgacgctgcagagtcaatgccgccctgaccatccagctcttctctcagctcttccacttcatcaatatgtggctgttcaatagattggtgaccgacccagattcggggctgtgctcccattactggggtgcgattatccgtcagcagttgggccatattgaagcctgggctgagaagcaggggctggaactggctgcggactgtcatctgagcaggatcgtgcaggcaacgactttgcttaccatggataagtatgcacctgatgacattccaaatataaacagcacctgctttaagttaaattcattacaacttcaagccttattacagaactatcactgtgcacctgatgagccttttatcccaacggatcttatagaaaatgtagtgactgtggctgaaaacactgccgatgagctggcccgcagtgatggaagggaagtgcagttggaggaggatcctgatctgcagctgccgtttcttttgccagaagatggttattcttgtgatgttgtcagaaacattccaaatggtttacaagaatttttagaccctctgtgccagagaggattttgcaggttaattcctcacacacgttcaccaggtacttggacaatatattttgaaggtgcagattatgaaagtcaccttctgcgtgagaacacagagctggctcagcctctgaggaaagaacctgaaataatcactgtgaccctaaaaaagcagaatggaatgggccttagcattgttgcagcaaagggtgctggtcaagataaactaggaatctatgtgaagtcggttgtgaaaggaggtgctgcagatgtggatggacgtctagctgcaggtgatcagctcctcagtgtggatggacgaagtctggttggactctctcaggaaagggcggcagaactcatgacaagaacaagctctgtggtgacactggaagtagcaaagcagggtgccatctaccacggtctggccacccttctcaatcagccatcccccatgatgcagagaatttcagatcgtcgtggctcaggtaaaccccgaccaaagagtgaaggctttgagctctataataattcaactcaaaatgggtctcctgagagtcctcagctgccttgggcagaatatagtgaaccaaagaaattgcctggtgatgacagactgatgaaaaatagagctgatcaccgttccagccccaacgtagcaaatcagcctcctagtcctggagggaaaagtgcatatgcctctggaacaacagcgaagataacatctgtctctactggaaacctctgcactgaggagcagacgcctccgcctagacctgaagcctaccccatccccactcagacgtacaccagagagtattttaccttcccagcttccaaatcccaggatcggatggctcctcctcagaaccagtggccaaattatgaggaaaagccacatatgcacacagatagtaatcattccagtattgcaattcagcgtgttacacgttcccaagaagaacttcgagaagataaagcttaccaacttgagcggcatcgaatagaggcagctatggaccgaaagtctgatagtgatatgtggataaatcagagctcctcactggactccagtacctctagccaggagcatctgaaccattcctctaagtcggtcacccctgcttccacactgaccaaaagtggccctggccgttggaaaacaccagcagccataccggccacccctgtggccgtctcccagccaatccgaacagacctgcctccgccacccccgccacctccagtccactatgccggtgatttcgatggaatgtccatggatttgcctctcccaccacccccttccgccaaccagatagggctgccgtctgcgcaggtggctgctgctgaacggagaaagagagaagaacatcagcgttggtatgagaaggagaaggcccgcctggaggaggagcgggagaggaagcggagagagcaggagaggaagttgggccagatgcgcactcagtccttaaaccctgctccgttttctcccctgactgcacagcagatgaagcccgaaaagccttccacactccagcggccacaggaaacagtcattcgggagctgcagcctcagcagcagccccgcacgatcgagcgcagagacttgcagtacattacagtcagcaaagaggagctttcctcgggggacagtctgtcccccgacccgtggaagcgggacgccaaggagaagctggagaagcagcagcagatgcacatcgtggacatgctgagcaaggagatccaggagctccagagcaaaccggaccgcagcgccgaggagagcgaccggctgcgcaagctcatgctggagtggcagttccagaagagactccaggagtcgaagcagaaggacgaagatgacgaggaggaggaggacgatgatgtggacaccatgctgatcatgcagcgcctggaggctgaacgaagagcgagggacgaggagcggaggcggcagcagcagttagaagagatgcgcaagcgggaagcggaagaccgagcgaggcaagaggaagagcgccggcggcaggaggaggagcgaacaaaacgagacgctgaagaaaaggttatggtcctttaagggcagctagaattttaccaagttagcctgaacgtaatcgattggctggggcagagcgggctggaagttctgtgtttcttaagaagcacgaggcagagcagggcctggctcccccagctttgtgattggacctgcaactttaccccatctggcccacctacctctcttctggactgtctccagatccccttatctgccaagttttgtctccttcaaacttctgaactcttgggcgtgtgtagcagtgagcctctttgcaaagggttcgtttcctcgggcactcatctttactgaacatggcccagcttgtcattgtgaaggtgacattggttcagtgattgcttaaatggcatgtggaccgtgggaagcagtaggagcgtagtaagacagttggctgccattcaacatttcaaatagatggtttactcaaatcactcacttctggttgatggtaaagagagcagatggcttagaaaacatgatacaggaaaatttagtatgtaatccagtaaatatcctaagttatttattttcatgtgtgtgtgtgtgtttaaatcaagtaacccttttaattgaattttaaaatgacagcgaattttgacattctgagaaatggggattttgagatgtttctctccatatctccctttgtcctgtgtgtgtggccgacgccctctggatgaagaggctgtagccgttgagctccctgtgggggcctgtttcatcccgaggggactgcgtgttgctctgtgtggtttgagagaagctgctcttctctgttacttcccttctatgaaggtagaagctttcagtgttacaacttctgatggcggaaaatttagtttttattaataattccttcttggatagtctagtgaactatattaatagaacagtgtactgttcacagaaaagaacttgtagggagttttttgtagtgatatgctctattaggatacagaacaatctaagagtaagcttgatagacatgatgtgacttcacttaaatggagtagagtgaataatgtaaggacactcacctctgttgaaattggtgatttctgcattttgtagacctttgccctctaagtttatcatcatattatctgttgaatctgaacagcatttgaagtcctctcaaagagtttgagctttcaggattaggttcccctgtgagtctttcacttgtgtaatggtaagtcaacattgatgatctttctaaggaaatcagatttacaaaatgctgagccgcttgatgtctaagtgttggtggtttttgctgttgctttgctgttccatgaaagcgctccctggctgcttggagggctgtgcttttccaggtcagtgccagcttggctgtcccaggccgtgcacagtgcccattgctatagctgggcccagtcctggccacgccggagcctcggcgggggcagctgggttgtcacggcagcacagtgcacatgcagagaggaccaggccatgtttttcctgtgctgagaaactcttgggttatttaatttttccaatgtgttttcataactcatgattatttgaaatacacttgtgttagtaactgcttctataattaagtggtcactgtaaaaaggcgaataacctatttttatatcagaatgtccaaaactcatgggtttgctttgttatagaaaaatgtgccattcatttgttgggtagaataaagttgtcttgtaattgt

SEQ ID NO: 19001 - DNA, 7461 bp, Homo sapiens
  source 1..7461: mol_type = unassigned DNA
gcggccgcggaggcggaggcagccgcggaggcggaggcggccggcggggggtggcgaggggcgccgggcccccgcggacctgtcgtcctcggcccgtcctccggccccggccccgcgcggctgaggaggcgcggccaggaccatgtcggcgggcggccgtgacgaggagcggcggaagctggccgacatcatccaccactggaacgccaaccggctggacctgttcgagatcagccagccgaccgaggatttggagttccatggagtgatgagattttattttcaagataaagctgctggaaactttgcaacaaaatgtattcgggtctctagtactgccaccactcaagatgtaatcgaaacgctcgcggagaaatttcgacctgatatgcgaatgctgtcctctcccaagtattcactctatgaagtgcatgtcagcggagaaagaagattggatatagatgagaaacctctagttgtacaactgaattggaacaaagatgatcgggaaggcagatttgttcttaagaatgagaatgacgccattcctcctaaggctcaaagtaatggacctgaaaagcaggaaaaagaaggggttatccagaacttcaagagaactctctcaaagaaagaaaagaaggaaaaaaagaagagagaaaaagaggcattgcgacaggcatctgataaagatgatagacctttccaaggggaggatgttgaaaattctcgactggctgctgaggtttacaaagacatgccggaaaccagctttactcgaaccatttctaatcctgaggtggttatgaaacgacggaggcagcaaaaattggaaaagagaatgcaggaatttcggagctcagatgggcggcctgattcaggtggaacattgagaatttatgcagatagtttaaaaccaaatattccctacaagacaatcctgctgtctactacagatcctgcagactttgctgtggctgaagctttagagaagtatggtctggaaaaagaaaaccctaaggattactgcatcgcccgggttatgcttcctcctggagcccagcattctgatgaaaagggtgctaaagaaattattcttgatgatgatgagtgtcctttacaaatcttcagggaatggccaagtgacaaagggattttagtctttcagttgaagaggaggccaccagaccacatcccaaagaaaaccaagaaacacttggaaggcaagacacccaagggaaaggagagagctgacgggtctggctatggctccacccttcctccggagaagctgccctatttagtagagttaagcccagatggttctgactctagagataagccaaagctttaccgccttcagttaagtgttactgaagttgggacagaaaagttggatgacaactctatccagttgtttggcccaggaattcagccccatcactgtgaccttaccaacatggatggagtggtcactgtgacgcccagaagtatggacgcagaaacctacgtggaaggccagcgcatctcagaaaccaccatgctgcagagtggcatgaaagtgcagtttggggcgtcccatgtatttaagtttgtggaccccagtcaggatcatgctcttgcaaaaagatctgtggatggaggcctgatggttaagggcccaagacataaacctggaattgttcaggagacaacttttgatttgggaggagatattcatagtgggacagcattaccgacaagcaagagcaccactaggctggacagcgacagagtgtcgtctgcctctagcacagccgagcggggaatggtgaagccgatgatcagagtagaacagcagccagattatcgcaggcaagaaagcagaacacaggatgcttctgggcctgagctgatactacctgcaagcattgaattcagggaaagttctgaagattcatttttgtctgccattataaattatactaatagctctacagtccactttaagttgtcccctacatatgtattatatatggcatgccggtatgtattgtccaaccagtacagacctgacatcagccctacagagcgcacacataaagtcattgcagtcgtcaacaagatggtgagcatgatggagggtgtcatccagaaacagaagaatattgcaggggcacttgccttctggatggcaaatgcatctgaacttctcaacttcattaagcaagaccgagaccttagtcggatcacactggatgctcaagatgttttagcacatttggttcaaatggcatttaaatacttggttcactgtcttcaatcagaacttaataattacatgccagcctttctagatgaccctgaagagaacagtctgcaacgaccaaaaatagatgatgtgctgcacacgctcacaggagccatgtccttgctacgacgctgcagagtcaatgccgccctgaccatccagctcttctctcagctcttccacttcatcaatatgtggctgttcaatagattggtgaccgacccagattcggggctgtgctcccattactggggtgcgattatccgtcagcagttgggccatattgaagcctgggctgagaagcaggggctggaactggctgcggactgtcatctgagcaggatcgtgcaggcaacgactttgcttaccatggataagtatgcacctgatgacattccaaatataaacagcacctgctttaagttaaattcattacaacttcaagccttattacagaactatcactgtgcacctgatgagccttttatcccaacggatcttatagaaaatgtagtgactgtggctgaaaacactgccgatgagctggcccgcagtgatggaagggaagtgcagttggaggaggatcctgatctgcagctgccgtttcttttgccagaagatggttattcttgtgatgttgtcagaaacattccaaatggtttacaagaatttttagaccctctgtgccagagaggattttgcaggttaattcctcacacacgttcaccaggtacttggacaatatattttgaaggtgcagattatgaaagtcaccttctgcgtgagaacacagagctggcaattcctctgaggaaagaacctgaaataatcactgtgaccctaaaaaagcagaatggaatgggccttagcattgttgcagcaaagggtgctggtcaagataaactaggaatctatgtgaagtcggttgtgaaaggaggtgctgcagatgatggacgtctagctgcaggtgatcagctcctcagtgtggatggacgaagtctggttggactctctcaggaaagggcggcagaactcatgacaagaacaagctctgtggtgacactggaagtagcaaagcagggtgccatctaccacggtctggccacccttctcaatcagccatcccccatgatgcagagaatttcagatcgtcgtggctcaggtaaaccccgaccaaagagtgaaggctttgagctctataataattcaactcaaaatgggtctcctgagagtcctcagctgccttgggcagaatatagtgaaccaaagaaattgcctggtgatgacagactgatgaaaaatagagctgatcaccgttccagccccaacgtagcaaatcagcctcctagtcctggagggaaaagtgcatatgcctctggaacaacagcgaagataacatctgtctctactggaaacctctgcactgaggagcagacgcctccgcctagacctgaagcctaccccatccccactcagacgtacaccagagagtattttaccttcccagcttccaaatcccaggatcggatggctcctcctcagaaccagtggccaaattatgaggaaaagccacatatgcacacagatagtaatcattccagtattgcaattcagcgtgttacacgttcccaagaagaacttcgagaagataaagcttaccaacttgagcggcatcgaatagaggcagctatggaccgaaagtctgatagtgatatgtggataaatcagagctcctcactggactccagtacctctagccaggagcatctgaaccattcctctaagtcggtcacccctgcttccacactgaccaaaagtggccctggccgttggaaaacaccagcagccataccggccacccctgtggccgtctcccagccaatccgaacagacctgcctccgccacccccgccacctccagtccactatgccggtgatttcgatggaatgtccatggatttgcctctcccaccacccccttccgccaaccagatagggctgccgtctgcgcaggtggctgctgctgaacggagaaagagagaagaacatcagcgttggtatgagaaggagaaggcccgcctggaggaggagcgggagaggaagcggagagagcaggagaggaagttgggccagatgcgcactcagtccttaaaccctgctccgttttctcccctgactgcacagcagatgaagcccgaaaagccttccacactccagcggccacaggaaacagtcattcgggagctgcagcctcagcagcagccccgcacgatcgagcgcagagacttgcagtacattacagtcagcaaagaggagctttcctcgggggacagtctgtcccccgacccgtggaagcgggacgccaaggagaagctggagaagcagcagcagatgcacatcgtggacatgctgagcaaggagatccaggagctccagagcaaaccggaccgcagcgccgaggagagcgaccggctgcgcaagctcatgctggagtggcagttccagaagagactccaggagtcgaagcagaaggacgaagatgacgaggaggaggaggacgatgatgtggacaccatgctgatcatgcagcgcctggaggctgaacgaagagcgaggttgcaggacgaggagcggaggcggcagcagcagttagaagagatgcgcaagcgggaagcggaagaccgagcgaggcaagaggaagagcgccggcggcaggaggaggagcgaacaaaacgagacgctgaagaaaagaggcgacaggaagaagggtattacagccgcctggaagccgagaggcgcagacagcacgacgaggcggcgcgcaggttgctggagcccgaggcgcccggaccaaactcttacccaggatctactggagcagctgttggagcccatgacgcctgtcgggatgcaaaagagaagcgctctaaaagccaagatgcagattcacctggaagttctggggcccctgaaaacttgacattcaaggaacgccagcgtcttttttcacaaggtcaagatgtatccaataaagtgaaagcttctcgtaaattaacagaactggagaatgaactgaacacaaagtgaaagaaaatgaggagaacactttgtatttaccccaaaatcttttcagttgtgggtttgtaggtgcgagtttgaagaggaaaagaggaagggggttatatttctaagtgatttacaatttctgtttctaaaattgttgggatttagaaatgtttcaattccaagaaattttattttactttaccatgagattgccatttatgtaatttaaacactgtctagtttcttaattatctaactcacacgagggtaagttttttgttggtttcttttttggagtcctgagttcaaaggggacagaactaagggcaggagaagagaatggatgtgtcttctctcccatcttcccctcatcatcgaccgaggagcacaaagaagttctgtttctgtttttttcagaaactttattttagctgtcaagcagagaatagcttgaactattcagactattgttggcactgtttagtagtgaccacacgctcttctacccgggaaggaacatatgacgacatgctcctcccatgtcccctgatggtgtctgttcccacaatatccttctagtctgcatcgtgaagtggcttaggccaaagcttcctgtgtgatgacgcacgtccgagactgttccatctcattcctcgcaaatttgagctcttctgatcaattctaaatatttgattaattttaattctgaaagaaaattttgaggatttaagcttaggggattttatttttataaataccagattattgttagacttaataaatcactgttaaatttaaagatgacagttaccttggaaagttcactaatacttcgctccaaggcgtctgtaaaagaagatatctttattggagcaatgttcatgtgactgggaatgacagaagaatgggagatgagtagggacccctcaagcacagctgtcactcagaaattttaaatttgaaaaagaaatcgattttcatctgtatgccgtcaaggaaggaattcagttacagggcatctgtaacttaaatattgtaagaataactcatatggaagttcaagctatttttatactataatagagttatttaattttaatttgttgaattattagttaccactgtcatttcttcagctatggatatgtggctgatgttggggagacggacctcagtgtgttttatattgtctggtgttaagatgataaattactttgtgattacaagcaaattttctatttgacaaagcccttggtggagtccaaatgatttttctgtaccatattgttctcttacacatacgtatgttaggaaaataggcacactttcaaagagaatgttctcttacacatacgtatgttaggaaaatagacacattttcaaagagaatgttctcttacatatgttaggaaaataggcacactttcaaagagaggtataggggctttttactgccttcgaaatcacttttaataaaagttgtatgataaatcattaaaaatgcgagtgtaaatatttttttttacctctatcagggtttttatttgaaagtgtgctcttaccatttccttgtttgagtaagagagtgaatggttctgagtgtttaggaaggatttgcttgcttgcagcagaagttctaggaaaagcaggcacctcccaaatatcttgaggacactggcagccttatggtgactaaatccacactttctttaaagagatgcagatgaattacttttctgttaatatatagaaaaatacacaggagaacatgcagatacatgtaaatatctacatacagggatatttgtatgtgtggttgtgaaacccatacacaagtggatttggccatctttgggcagtgaggtcaaatgtgaatatgtgtaaaagtgcttttcagaactgcattactatgagaaaacatcaaaactgctgtagttttccatttctactgtatttcagttgcaacctatttttaataaactttgtatgtatttaagtgtatttgctattgttttgaaagtgctgacaaagtttatatttgtaacatcagccttcctcgcccatctctttccatctgtctcttcttcattaaacacttactgagtatg

SEQ ID NO: 19002 - DNA, 5475 bp, Homo sapiens
  source 1..5475: mol_type = unassigned DNA
atgtcggcgggcggccgtgacgaggagcggcggaagctggccgacatcatccaccactggaacgccaaccggctggacctgttcgagatcagccagccgaccgaggatttggagttccatggagtgatgagattttattttcaagataaagctgctggaaactttgcaacaaaatgtattcgggtctctagtactgccaccactcaagatgtaatcgaaacgctcgcggagaaatttcgacctgatatgcgaatgctgtcctctcccaagtattcactctatgaagtgcatgtcagcggagaaagaagattggatatagatgagaaacctctagttgtacaactgaattggaacaaagatgatcgggaaggcagatttgttcttaagaatgagaatgacgccattcctcctaagaaggctcaaagtaatggacctgaaaagcaggaaaaagaaggggttatccagaacttcaagagaactctctcaaagaaagaaaagaaggaaaaaaagaagagagaaaaagaggcattgcgacaggcatctgataaagatgatagacctttccaaggggaggatgttgaaaattctcgactggctgctgaggtttacaaagacatgccggaaaccagctttactcgaaccatttctaatcctgaggtggttatgaaacgacggaggcagcaaaaattggaaaagagaatgcaggaatttcggagctcagatgggcggcctgattcaggtggaacattgagaatttatgcagatagtttaaaaccaaatattccctacaagacaatcctgctgtctactacagatcctgcagactttgctgtggctgaagctttagagaagtatggtctggaaaaagaaaaccctaaggattactgcatcgcccgggttatgcttcctcctggagcccagcattctgatgaaaagggtgctaaagaaattattcttgatgatgatgagtgtcctttacaaatcttcagggaatggccaagtgacaaagggattttagtctttcagttgaagaggaggccaccagaccacatcccaaagaaaaccaagaaacacttggaaggcaagacacccaagggaaaggagagagctgacgggtctggctatggctccacccttcctccggagaagctgccctatttagtagagttaagcccagggagaaggaatcactttgcctactacaactatcacacttacgaagatggttctgactctagagataagccaaagctttaccgccttcagttaagtgttactgaagttgggacagaaaagttggatgacaactctatccagttgtttggcccaggaattcagccccatcactgtgaccttaccaacatggatggagtggtcactgtgacgcccagaagtatggacgcagaaacctacgtggaaggccagcgcatctcagaaaccaccatgctgcagagtggcatgaaagtgcagtttggggcgtcccatgtatttaagtttgtggaccccagtcaggatcatgctcttgcaaaaagatctgtggatggaggcctgatggttaagggcccaagacataaacctggaattgttcaggagacaacttttgatttgggaggagatattcatagtgggacagcattaccgacaagcaagagcaccactaggctggacagcgacagagtgtcgtctgcctctagcacagccgagcggggaatggtgaagccgatgatcagagtagaacagcagccagattatcgcaggcaagaaagcagaacacaggatgcttctgggcctgagctgatactacctgcaagcattgaattcagggaaagttctgaagattcatttttgtctgccattataaattatactaatagctctacagtccactttaagttgtcccctacatatgtattatatatggcatgccggtatgtattgtccaaccagtacagacctgacatcagccctacagagcgcacacataaagtcattgcagtcgtcaacaagatggtgagcatgatggagggtgtcatccagaaacagaagaatattgcaggggcacttgccttctggatggcaaatgcatctgaacttctcaacttcattaagcaagaccgagaccttagtcggatcacactggatgctcaagatgttttagcacatttggttcaaatggcatttaaatacttggttcactgtcttcaatcagaacttaataattacatgccagcctttctagatgaccctgaagagaacagtctgcaacgaccaaaaatagatgatgtgctgcacacgctcacaggagccatgtccttgctacgacgctgcagagtcaatgccgccctgaccatccagctcttctctcagctcttccacttcatcaatatgtggctgttcaatagattggtgaccgacccagattcggggctgtgctcccattactggggtgcgattatccgtcagcagttgggccatattgaagcctgggctgagaagcaggggctggaactggctgcggactgtcatctgagcaggatcgtgcaggcaacgactttgcttaccatggataagtatgcacctgatgacattccaaatataaacagcacctgctttaagttaaattcattacaacttcaagccttattacagaactatcactgtgcacctgatgagccttttatcccaacggatcttatagaaaatgtagtgactgtggctgaaaacactgccgatgagctggcccgcagtgatggaagggaagtgcagttggaggaggatcctgatctgcagctgccgtttcttttgccagaagatggttattcttgtgatgttgtcagaaacattccaaatggtttacaagaatttttagaccctctgtgccagagaggattttgcaggttaattcctcacacacgttcaccaggtacttggacaatatattttgaaggtgcagattatgaaagtcaccttctgcgtgagaacacagagctggctcagcctctgaggaaagaacctgaaataatcactgtgaccctaaaaaagcagaatggaatgggccttagcattgttgcagcaaagggtgctggtcaagataaactaggaatctatgtgaagtcggttgtgaaaggaggtgctgcagatgtggatggacgtctagctgcaggtgatcagctcctcagtgtggatggacgaagtctggttggactctctcaggaaagggcggcagaactcatgacaagaacaagctctgtggtgacactggaagtagcaaagcagggtgccatctaccacggtctggccacccttctcaatcagccatcccccatgatgcagagaatttcagatcgtcgtggctcaggtaaaccccgaccaaagagtgaaggctttgagctctataataattcaactcaaaatgggtctcctgagagtcctcagctgccttgggcagaatatagtgaaccaaagaaattgcctggtgatgacagactgatgaaaaatagagctgatcaccgttccagccccaacgtagcaaatcagcctcctagtcctggagggaaaagtgcatatgcctctggaacaacagcgaagataacatctgtctctactggaaacctctgcactgaggagcagacgcctccgcctagacctgaagcctaccccatccccactcagacgtacaccagagagtattttaccttcccagcttccaaatcccaggatcggatggctcctcctcagaaccagtggccaaattatgaggaaaagccacatatgcacacagatagtaatcattccagtattgcaattcagcgtgttacacgttcccaagaagaacttcgagaagataaagcttaccaacttgagcggcatcgaatagaggcagctatggaccgaaagtctgatagtgatatgtggataaatcagagctcctcactggactccagtacctctagccaggagcatctgaaccattcctctaagtcggtcacccctgcttccacactgaccaaaagtggccctggccgttggaaaacaccagcagccataccggccacccctgtggccgtctcccagccaatccgaacagacctgcctccgccacccccgccacctccagtccactatgccggtgatttcgatggaatgtccatggatttgcctctcccaccacccccttccgccaaccagatagggctgccgtctgcgcaggtggctgctgctgaacggagaaagagagaagaacatcagcgttggtatgagaaggagaaggcccgcctggaggaggagcgggagaggaagcggagagagcaggagaggaagttgggccagatgcgcactcagtccttaaaccctgctccgttttctcccctgactgcacagcagatgaagcccgaaaagccttccacactccagcggccacaggaaacagtcattcgggagctgcagcctcagcagcagccccgcacgatcgagcgcagagacttgcagtacattacagtcagcaaagaggagctttcctcgggggacagtctgtcccccgacccgtggaagcgggacgccaaggagaagctggagaagcagcagcagatgcacatcgtggacatgctgagcaaggagatccaggagctccagagcaaaccggaccgcagcgccgaggagagcgaccggctgcgcaagctcatgctggagtggcagttccagaagagactccaggagtcgaagcagaaggacgaagatgacgaggaggaggaggacgatgatgtggacaccatgctgatcatgcagcgcctggaggctgaacgaagagcgaggttgcaggacgaggagcggaggcggcagcagcagttagaagagatgcgcaagcgggaagcggaagaccgagcgaggcaagaggaagagcgccggcggcaggaggaggagcgaacaaaacgagacgctgaagaaaagaggcgacaggaagaagggtattacagccgcctggaagccgagaggcgcagacagcacgacgaggcggcgcgcaggttgctggagcccgaggcgcccggtctgtgccgccctccgcttccccgggactacgagcccccgtccccgtcccccgcgcccggcgcccctcctcccccgcctcagcgaaacgcctcctacctcaaaacacaggtcctctcccccgactcgctgttcactgccaagtttgttgcatacaatgaggaggaggaggaggaggactgcagcctagcaggaccaaactcttacccaggatctactggagcagctgttggagcccatgacgcctgtcgggatgcaaaagagaagcgctctaaaagccaagatgcagattcacctggaagttctggggcccctgaaaacttgacattcaaggaacgccagcgtcttttttcacaaggtcaagatgtatccaataaagtgaaagcttctcgtaaattaacagaactggagaatgaactgaacacaaagtga

SEQ ID NO: 19003 - DNA, 7578 bp, Homo sapiens
  source 1..7578: mol_type = unassigned DNA
gcgcgcggccccccgctccctccctcccccctgacccccgacccccgccggccggccccccgccccagccccggagggagctcatgggagtatgaaggagatggtaggaggctgctgcgtatgttcggacgagaggggctgggccgagaacccgctggtctactgcgatgggcacgcgtgcagcgtggtcgtccaccaagcttgctatggcatcgttcaggtgccaacgggaccctggttctgccggaaatgtgaatctcaggagcgagcagccagggtgaggtgtgagctgtgcccacacaaagacggggcattgaagaggactgataatggaggctgggcacacgtggtgtgtgccctctacatccccgaggtgcaatttgccaacgtgctcaccatggagcccatcgtgctgcagtacgtgcctcatgatcgcttcaacaagacctgttacatctgcgaggagcagggccgggagagcaaggcggcctcgggagcctgcatgacctgtaaccgccatggatgtcgacaagctttccacgtcacctgtgcccaaatggcaggcttgctgtgtgaggaagaagtgctggaggtggacaacgtcaagtactgcggctactgcaaataccacttcagcaagatgaagacatcccggcacagcagcgggggaggcggaggaggcgctggaggaggaggtggcagcatggggggaggtggcagtggtttcatctctgggaggagaagccggtcagcctcaccatccacgcagcaggagaagcaccccacccaccacgagaggggccagaagaagagtcgaaaggacaaagaacgccttaagcagaagcacaagaagcggcctgagtcgccccccagcatcctcaccccgcccgtggtccccactgctgacaaggtctcctcctcggcttcctcttcctcccaccacgaggccagcacgcaggagacctctgagagcagcagggagtcaaaggggaaaaagtcttccagccatagcctgagtcataaagggaagaaactgagcagtgggaaaggtgtgagcagttttacctccgcctcctcttcttcctcctcctcttcctcctcctctggggggcccttccagcctgcagtctcgtccctgcagagctcccctgacttctctgcattccccaagctggagcagccagaggaggacaagtactccaagcccacagcccccgccccttcagcccctccttctccctcagctcccgagccccccaaggctgacctttttgagcagaaggtggtcttctctggctttgggcccatcatgcgcttctccaccaccacctccagctcaggccgggcccgggcgccctcccctggggactataagtctccccacgtcacggggtctggggcctcggcaggcacccacaaacggatgcccgcactgagtgccacccctgtgcctgctgatgagacccctgagacaggcctgaaggagaagaagcacaaagccagcaagaggagccgccatgggccaggccgtcccaagggcagccggaacaaggagggcactgggggcccagctgccccatccttgcccagtgcccagctggctggctttaccgccactgctgcctcacccttctctggaggttccctggtcagctccggcctgggaggtctgtcctcccgaacctttgggccttctgggagcttgcccagcttgagcctggagtcccccttactaggggcaggcatctacaccagtaataaggaccccatctcccacagtggcgggatgctgcgggctgtctgcagcacccctctctcctccagcctcctggggcccccagggacctcggccctgccccgcctcagccgctccccgttcaccagcaccctcccctcctcttctgcttctatctccaccactcaggtgttttctctggctggctctacctttagcctcccttctacccacatctttggaacccccatgggtgccgttaatcccctcctctcccaagctgagagcagccacacagagccagacctggaggactgcagcttccggtgtcgggggacctcccctcaggagagtctgtcttccatgtcccccatcagcagcctccccgcactcttcgaccagacagcctctgcaccctgtgggggcggccagttagacccggcggccccagggacgactaacatggagcagcttctggagaagcagggcgacggggaggccggcgtcaacatcgtggagatgctgaaggcgctgcacgcgctgcagaaggagaaccagcggctgcaagagcagatcctgagcctgacggccaaaaaggagcggctgcagattctcaacgtgcagctctctgtgcccttccctgccctgcctgctgccctgcctgccgccaacggccctgtccctgggccctatggcctgcctccccaagccggcagcagcgactccttgagcaccagcaagagccctccgggaaagagcagcctcggcctggacaactcgctgtccacttcttctgaggacccacactcaggctgcccgagccgcagcagctcgtcgctgtccttccacagcacgcccccaccgctgcccctcctccagcagagccctgccactctgcccctggccctgcctggggcccctgccccactcccgccccagccgcagaacgggttgggccgggcacccggggcagcggggctgggggccatgcccatggctgaggggctgttgggggggctggcaggcagtgggggcctgcccctcaatgggctccttggggggttgaatggggccgctgcccccaaccccgcaagcttgagccaggctggcggggcccccacgctgcagctgccaggctgtctcaacagccttacagagcagcagagacatctccttcagcagcaagagcagcagctccagcaactccagcagctcctggcctccccgcagctgaccccggaacaccagactgttgtctaccagatgatccagcagatccagcagaaacgggagctgcagcgcctgcagatggctgggggctcccagctgcccatggccagcctgctggcaggaagctccaccccgctgctgtctgcgggtacccctggcctgctgcccacagcgtctgctccacccctgctgcccgctggagccctagtggctccctcgcttggcaacaacacaagtctcatggccgcagcagctgcagctgcagcagtagcagcagcaggcggacctccagtcctcactgcccagaccaaccccttcctcagcctgtcgggagcagagggcagtggcggtggccccaaaggagggaccgctgacaaaggagcctcagccaaccaggaaaaaggctaaatccacccttacccctcctgacccccccaagtggagggaacagatcctggcctgaggggtcctagcctggagcaggcgcctgcgcccagaccctggagagccttgacccagagcctgtgctgaggtccagggagtgtggagagctcctggtgtcgaggactgagactgagaggggagccccctccatctggcccccttccctttccgcactgtccgctttgtgaggctcagaggaaggacagtctgcaagcccgcctaggaggtccatccccagcaaatgttttggaggtccccccagagagcagagtgggccatggcagaagtagggggttggttggacctgtcacatgaaatggatcagcacttgaatggggagaagtggagggagaggccctgggcctgtccctgcggggaaatcttttatggaagaagggctggacccactttacctgcagtttcttcccagctcgggcagatggcagaagggaccccttggactttttctcgccatccctccccccagcgcaggggcacaagctgagcttgtaaaagcccacagatgttgggggctggagaaggggcaggagagcatcacactcagccccagcctcctcaacctcttggggccccgtgatggggaggagagggcaggtgcggggaggctctggccttccttggtgccccgccctttgtttgcactattggacttaggagtgccgagggtggggagatggagctgcccgtctcagtgtgtgagtgtgtgtgtgcgtgcatgtgtgtgtgtgtgtgtgtgtgtgtgtgtgtctgtctgcctgtctctctcctcctggacccagggcagccaagggcagggataggcgcagtggtcagatgaagcagcgccagagaggggacctcccagctcttatttgcaccctccccacctcaccaactttggtccctctctgggggcatgaatggttaacaaacaccagagcagtactccaatattggagagtcgctgggggcacagggctttgaatcagggtagtatcctgccttccctcccctgaccccacatggtctcagggcccccttagggccccctaccccactgatagcttcctccttctctggcacaaggggagccccagggcttgggggagggcgtaaggtggggggaaatgccactgcttttagcaaaagcctccctcccagaattagccagcttgcctcctgcaccccacccccaccaaccaggggagccactaagctgactaacaactgtcccctcacccaccagctatttccccagggtagagtgggcaattctcaccttcaaagagtccccgcctgcccaggcctttggcacagaggctgagtggacagtcaggagagaggcgagaggcaaggcgaagcctgtgtccctgtttcagttgcactggggttggagcccagggtaggggtttccagcttccccaggctccggccttgtcagtctctttgcatgtgtggatttttctgtgtgtgtttctgtttgggtttttgttgttgggttttttttttttttttaataaagaaaagaagatgtgtatatttttggcaacgacagaaacgtagtgcagatatatttttgcctgtgctgctcaactgttttttttttctgatactgaaaataatattaatattcctgttgataagactttgtaagatgttagggagctgataatggaggggggtgggaatccttcaaaggcaatttcttaggcacttgcaagggcttgggggagggggaggcagttgtgatgacctcagaaatactcactttttattaatgctaaatatgttagaaagaaatgatagcattcagcattttattcttcttaatctattaagctgtgtaactccctgccccaaaccactgaaaagaaaagtaaccttcaggccaggcgcggtggctcacgcctgtaatcccaacactttgggaggctgaggcgggcggatcacttaaggtcaggagttcaagaccagcctggccaacatggtgaaaccccgtctctatcaaaaattagccgggcatggtggcacgtgcctgtaatcccagctacttgggaggctgaggcacgagaattgcttgaacccaggaggctgaggctgcagtgagccaagattgtgccactgcactccagcctgtgtgagagagtgagactctgtctcaaaagagaaaaaaaaagaaaagtaaccttcagagattcttagaagagttgctcattcacacccacgcccttgcccaaggctggcccacttagagcgaaacttaacttttgtctggatgggaagagaagtaagtctaccccgaggttgccatgttgaagagtgagaggtccaagtgattctgtgcattgaaaccaagacaccccacccagaacacttcttccctccctcagcccaaaccaaaggctggggttctcatctccaagtggctgttctccaactttcccaagccgcttgcattccccagactggactactgtggcggttaggttagatttgaagacggggcccaggctgggtatgaacgggtgcagccctcttctcctcttcccccccacatctctcatgagagaggtagtggcatttccttctcagggagcttcaatgggaaaggtctcgaaagcttcaggaggagcagaataccaacgcagggggatggctgtaacgatctcaccgtctcctaacctcagtcccttttttgagagtgaatggtggagggtgggaagggacccagatttgtagatctctttgtctgggggaggggaaggatgtggtttgcagagcggaagcagagtttggaaacgcatgagagcagagcttcgtgtgttcccaccctcagtgaggaggtgtgagtgggtgagcatgtggagttgggtgttcccaccctcagtgaggaggtgtgagtgggggtgcatatagaggcagtgcctgctgtggggtcacaactggtgcatgccagcgccaaagggacctgtctttaggggtcatttcagccagctcctcccatcacagatgacagctccaagcctagaaggggctcagtgacagggccaggacaagccctcaggactgtggcctcctggcccttggttcccctgccccacaacatggtctccacatggctggctggctggctgtccctgtgtgtgtgtgacacacggtgtgagtgcagggctgtgcccggggtgggagggtgtctatgtggcactgactgtcttagctcagagctggtggatcctctccatggacaatgacactttaaggattgtcttggtttgtttttcctatttgtggggtattttccccctcaggctcctgggtctgctgctgcctcaaggtgtcctgaccttgaggctgatgaggggacccctgcctgtttcccccatactgagttctagggaggtgctcaccccagactcttaggaagggtctagagaaatgagaggagcccaagccaggggccagctccgagaaagggtaacctccacgcttctctctcccaaattggaaatgaagacaggttttcaaaggcacaggctccccctgccagcttctaggatcttccttggtgtgcaatgggccagttaggggtaggcagcttgcacccagttctcctttatctcaacttattttcctggggagaggtgcctagagggattgaggtaacttcaactgggaattccaaggaaggtgggcaagtagccttggctctctcccaccatgtccatcaggattgagagtgtgtctagctcccgaccactttgtcttgacctactgaaaagttgggaactgaggggtgccttcattcccctttgttcactttctccagctcaacttgggacttgggtggtgggactggagacctcacccctgctcccgtcccgccccctttctatcccaacctgtttccatgtagcagacccttcctagggagcagggaggggaagccacagattgcaaacccaggggctcctttttcattctttctaaaaccttgatatcctcagcccaaaggcgatgcccccctgccacctccaagcctggaattgtgcataacccggatcttgtatctttgtataacggatgttatttgtacgaagggcagttcgtaaacagcacttgttcttttaataaaagaatgttttgcaaaaaaaaaaaaaaaaatccgaaga

SEQ ID NO: 19004 - DNA, 2724 bp, Homo sapiens
  source 1..2724: mol_type = unassigned DNA
gcgcgcggccccccgctccctccctcccccctgacccccgacccccgccggccggccccccgccccagccccggagggagctcatgggagtatgaaggagatggtaggaggctgctgcgtatgttcggacgagaggggctgggccgagaacccgctggtctactgcgatgggcacgcgtgcagcgtggtcgtccaccaagcttgctatggcatcgttcaggtgccaacgggaccctggttctgccggaaatgtgaatctcaggagcgagcagccagggtgaggtgtgagctgtgcccacacaaagacggggcattgaagaggactgataatggaggctgggcacacgtggtgtgtgccctctacatccccgaggtgcaatttgccaacgtgctcaccatggagcccatcgtgctgcagtacgtgcctcatgatcgcttcaacaagacctgttacatctgcgaggagcagggccgggagagcaaggcggcctcgggagcctgcatgacctgtaaccgccatggatgtcgacaagctttccacgtcacctgtgcccaaatggcaggcttgctgtgtgaggaagaagtgctggaggtggacaacgtcaagtactgcggctactgcaaataccacttcagcaagatgaagacatcccggcacagcagcgggggaggcggaggaggcgctggaggaggaggtggcagcatggggggaggtggcagtggtttcatctctgggaggagaagccggtcagcctcaccatccacgcagcaggagaagcaccccacccaccacgagaggggccagaagaagagtcgaaaggacaaagaacgccttaagcagaagcacaagaagcggcctgagtcgccccccagcatcctcaccccgcccgtggtccccactgctgacaagcctagaaggggccaccaatcaccgaccaaccatgggattgggagtttggggtgctgtctgccagatactcccatctgcctctgtccagagggcctcagccctgggctcttgtctgcagagagtgggggacggcactcaggcctgctctccaagttctagggcccctgtccccagagatcggtagaggacatcccctacgccccatcaggaggacacccaaagcttgtcacccaacccaaatcccactctgtgcaggttggaggggctgaaagttctgaccaaggtggcatggggggcaggcccctggacagtatcccgaaactcccactcatcccaccattcccagcagggcatggtatgtcaggcctgtctccagaaatgggcaacatctggctgagcgataggcaggccctaccctaggccagggaattgctaatccaagctggaacagccctccctgctccctacaacctgccctccccatgggaggagaacctggtagggtggggggagatggagaaactgctccctcctgtcaccattattgcccattcacctccaccccatctcagacggttggcagagttctgggcaccttagcaggaggttcaggtatcaggtttccagggtgatgttgctgtggcaactgccccagtaaacctctcccctgcttcccagggctcacctggagaccttgtcattcatgccctctgacctttccaggggcctgcaggcaggtggcaagaaatggccaggggtctgggagtttttccagtaactggatgtcccttggacatgccagagaactctgcccatcctcctccactcgccccagcacttcggctacccttccccccagcccctctcttcccttgctctcagaaccacatctggctcccttcagaactccagctgttgaaaagaacaaagaggaagacagagaccaggactccgcccgggaggggcagtgcagggtggctctcgtttctggtccagcctgcattcagcatttatctgttcagcacgattaactgaatacctggtcgctactaggaggaaaagggccttccctggcagcagcctgaagcacgaacgaactcacggcatgccaggctgtgttctagaaccaggagatggaggggcatatggagattagtccatttaatactcaaaataatccaattaggttggaaatttataaaccccatttaatatatgaagatgatggggcacagggaggttaagtaatttgcctaaaagcacacagctagtaaagtggtagacctgagattccaatgcagtctggcttgaaggcttgtgctcttcacctgcccacagcactgtctctgcagctgctgccactggacgtctcatcatttattgaccctataccatgtatctggcatcatgctgcttccaactcaccacatatgcatagtgctccctgtaaagacactgacacttatcgacgttgagactttgcacagtataacatggcagtgaggccaggcgtggtggctcacgcctgtagtcccagcactttgggagtccgaggcaggtggatcacctgaggtcaggggttcgagatcagcctggccaacatggtgaaaccctgcctctattaaaaatacacaaaattagccgggtgtggtggctggtgcctgtaatcccagctacttgggaggctgaggcaggagaatcacttgaacctgggaggtgattgaaggttgcagtgagccgagatcgcaccattgcactccagcctgtgcaacaagagtgaaactccatctcaaaaataaattaagaaaaaacaa

SEQ ID NO: 19005 - DNA, 19419 bp, Homo sapiens
  source 1..19419: mol_type = unassigned DNA
atggacagccagaagctggctggtgaggataaagattcagaaccggcagctgatggacctgcagcttctgaggacccaagtgccactgagtcagacctgcccaacccacatgtgggagaggtctctgtccttagttctgggagtcccaggcttcaggagactcctcaggactgcagtgggggtccggtgcggcgttgtgctctctgtaactgcggggagcccagtctacacgggcagcgggagctacggcgctttgagttgccatttgattggccccggtgtccagtggtgtcccctggggggagcccagggcccaatgaggcagtgctgcccagtgaggacctatcacagattggtttccctgagggccttacacctgcccacctaggagaacctggagggtcctgctgggctcaccattggtgtgctgcatggtcggcaggcgtatgggggcaggagggcccagaactatgtggtgtggacaaggccatcttctcagggatctcacagcgctgctcccactgcaccaggctcggtgcctccatcccttgccgctcacctggatgtccacggctttaccacttcccctgcgcgactgccagcggttccttcctatccatgaaaacactgcagctgctatgcccagagcacagtgagggggctgcatatctggaggaggctcgctgtgcagtgtgtgaggggccaggggagttgtgtgacctgttcttctgtaccagctgtgggcatcactatcacggggcctgcctggacactgctctgactgcccgcaaacgtgctggctggcagtgccctgaatgcaaagtgtgccaagcctgcaggaaacctgggaatgactctaagatgttggtttgtgagacgtgtgacaaaggataccatactttctgcctaaaaccacccatggaggaactgcctgctcactcttggaagtgcaaggcgtgccgggtgtgccgggcctgtggggcgggctcagcagaactgaatcccaactcggagtggtttgagaactactctctctgtcaccgctgtcacaaagcccagggaggtcagactatccgctccgttgctgagcagcataccccggtgtgtagcagattttcacccccagagcctggcgatacccccactgacgagcccgatgctctgtacgttgcatgccaagggcagccaaagggtgggcacgtgacctctatgcaacccaaggaaccagggcccctgcaatgtgaagccaaaccactagggaaagcaggggtccaacttgagccccagttggaggcccccctaaacgaggagatgccactgctgcccccacctgaggagtcacccctgtccccaccacctgaggaatcacccacgtccccaccacctgaggcatcacgcctgtcaccaccacctgaggaattgcccgcatccccacttcctgaggcattgcacctgtcccggccgctggaggaatcgcccctctctccgccgcctgaggagtctcctctgtctcccccacctgaatcatcacctttttctccactggaggagtcgcccttgtctccaccggaagagtcacccccatctcctgcacttgagacgcctctatccccaccacctgaagcatcgcccctgtccccaccatttgaagaatctcctttgtccccgccacctgaggaattgcccacttccccgccacctgaagcatctcgcctgtctccaccacctgaggagtcacccatgtcccctccacctgaagagtcacccatgtctccaccaccggaggcatctcgtctgttcccaccatttgaagagtctcctctgtcccctccacctgaggagtctcccctttccccaccacctgaggcatcacgcctgtccccaccacctgaggactcgcctatgtccccaccacctgaagaatcacctatgtcccccccacctgaggtatcgcgcctatcccccctgcctgtggtgtcacgcctgtctccaccgcctgaggaatctcccttgtccccaccgcctgaggagtctcccacgtcccctccacctgaggcttcacgcctctccccaccacctgaggactcccccacatccccaccacctgaggactcacctgcttccccaccaccggaggactcgctcatgtccctgccgctggaggagtcacccctgttgccactacctgaggagccgcaactctgcccccggtccgaggggccgcacctgtcaccccggcctgaggagccgcacctgtccccccggcctgaggagccacacctatctccgcaggctgaggagccacacctgtccccccagcctgaggagccatgcctatgcgctgtgcctgaggagccacacttgtccccccaggctgagggaccacatctgtcccctcagcctgaggaattgcacctgtccccccagactgaggagccgcacctgtctcctgtgcctgaggagccatgcttgtccccccaacctgaggaatcacacctgtccccccagtctgaggagccatgcctgtccccccggcctgaggaatcgcatctgtcccctgagcttgagaagccacccctgtcccctcggcctgaaaagccccctgaggagccaggccaatgccctgcacctgaggagctgcccttgttccctccccctggggaaccatccttatctcccttgcttggagagccagccctgtctgagcctggggaaccacctctgtcccctctgcccgaggagctgccgttgtccccatctggggagccatccttgtcgcctcagctgatgccaccagatccccttcctcctccactctcacccatcatcacagctgcggccccaccggccctgtctcctttgggggagttagagtacccctttggtgccaaaggggacagtgaccctgagtcaccgttggctgcccccatcctggagacacccatcagccctccaccagaagctaactgcactgaccctgagcctgtcccccctatgatccttcccccatctccaggctccccagtggggccggcttctcccatcctgatggagccccttcctcctcagtgttcgccactccttcagcattccctggttccccaaaactcccctccttcccagtgctctcctcctgccctaccactgtccgttccctccccgttgagtcccatagggaaggtagtgggggtctcagatgaggctgagctgcacgagatggagactgagaaagtttcagaacctgaatgcccagccttggaacccagtgccaccagtcctctcccttccccaatgggggacctttcctgccccgcccccagccctgccccagccctggatgacttctctggcctaggggaagacacagcccctctggatgggattgatgctccgggttcacagccagagcctggacagacccctggcagtttggctagtgaacttaaaggctcccctgtgctcctggaccccgaggagctggcccctgtgacccctatggaggtctaccccgaatgcaagcagacagcagggcagggctcaccatgtgaagaacaggaagagccacgtgcaccggtggcccccacaccacccactctcatcaaatccgacatcgttaacgagatctctaatctgagccagggtgatgccagtgccagttttcctggctcagagcccctcctgggctctccagacccggaggggggtggctccctgtccatggagttgggggtctctacggatgttagtccagcccgagatgagggctccctacggctctgtactgactcactgccagagactgatgactcactattgtgcgatgctgggacagctatcagcggaggcaaagctgagggggagaaggggcggcggcgcagctccccagcccgttcccgcatcaaacagggtcgcagcagcagtttcccaggaagacgccggcctcgtggaggagcccatggaggacgtggtagaggacgggcccggctaaagtcaactgcttcttccattgagactctggtagttgctgacattgatagctctcccagtaaggaggaggaggaagaagatgatgacaccatgcagaataccgtggttctcttctccaacacagacaaatttgtcctaatgcaggacatgtgtgtggtatgtggcagctttggccggggggcagagggccacctccttgcctgttcgcagtgctctcagtgctatcacccttactgtgtcaacagcaagatcaccaaggtgatgctgctcaagggctggcgttgtgtggagtgtattgtgtgtgaggtgtgtggccaggcctccgacccctcacgcctgctgctctgtgatgactgtgatattagctaccacacatactgcctggaccccccactgctcaccgtccccaagggcggctggaagtgcaagtggtgtgtgtcctgtatgcagtgtggggctgcttcccctggcttccactgtgaatggcagaatagttacacacactgtgggccctgtgccagcctggtgacctgccctatctgtcatgctccttacgtagaagaggacctactaatccagtgccgccactgtgaacggtggatgcatgcaggctgtgagagcctcttcacagaggacgatgtggagcaggcagccgatgaaggctttgactgtgtctcctgccagccctacgtggtaaagcctgtggcgcctgttgcacctccagagctggtgcccatgaaggtgaaagagccagagccccagtactttcgcttcgaaggtgtgtggctgacagaaactggcatggccttgctgcgtaacctgaccatgtcaccactgcacaagcggcgccaacggcgaggacggcttggcctcccaggcgaggcaggattggagggttctgagccctcagatgcccttggccctgatgacaagaaggatggggacctggacaccgatgagctgctcaagggtgaaggtggtgtggagcacatggagtgcgaaattaaactggagggccccgtcagccctgatgtggagcctggcaaagaggagaccgaggaaagcaaaaaacgcaagcgtaaaccatatcggcctggcattggtggtttcatggtgcgacagcggaaatcccacacacgcacgaaaaaggggcctgctgcacaggcggaggtgttgagtggggatgggcagcccgacgaggtgatacctgctgacctgcctgcagagggcgccgtggagcagagcttagctgaaggggatgagaagaagaagcaacagcggcgagggcgcaagaagagcaaactggaggacatgttccctgcttacttgcaggaagccttctttgggaaggagctgctggacctgagccgtaaggccctttttgcagttggggtgggccggccaagctttggactagggaccccaaaagccaagggagatggaggctcagaaaggaaggaactccccacatcgcagaaaggagatgatggtccagatattgcagatgaagaatcccgtggcctcgagggcaaagccgatacaccaggacctgaggatgggggcgtgaaggcatccccagtgcccagtgaccctgagaagccaggcaccccaggtgaagggatgcttagctctgacttagacaggatttccacagaagaactgcccaagatggaatccaaggacctgcagcagctcttcaaggatgttctgggctctgaacgagaacagcatctgggttgtggaacccctggcctagaaggcagccgtacgccactgcagaggccctttcttcaaggtggactccctttgggcaatctgccctccagcagcccaatggactcctacccaggcctctgccagtccccgttcctggattctagggagcgcgggggcttctttagcccggaacccggtgagcccgacagcccctggacgggctcaggtggcaccacgccctccacccccacaacccccaccacggagggtgagggcgacggactctcctataaccagcggagtcttcagcgctgggagaaggatgaggagttgggccagctgtccaccatctcacctgtgctctatgccaacattaattttcctaatctcaagcaagactacccagactggtcaagccgttgcaaacaaatcatgaagctctggagaaaggttccagcagctgacaaagccccctacctgcaaaaggccaaagataaccgggcagctcaccgcatcaacaaggtgcagaagcaggctgagagccagatcaacaagcagaccaaggtgggcgacatagcccgtaagactgaccgaccggccctacatctccgcattcccccgcagccaggggcactgggcagcccgccccccgctgctgcccccaccattttcattggcagccccactacccccgccggcttgtctacctctgcggacgggttcctgaagccgccggcgggctcggtgcctggccctgactcgcctggtgagctcttcctcaagctcccaccccaggtgcccgcccaagtgccttcgcaggacccctttggactggcccctgcctatcccctggagccccgcttccccacggcaccgcccacctatcccccctatcctagtcctacgggggcccctgcgcagcccccgatgctgggcgcctcatctcgtcctggggctggccagccaggggaattccacactaccccacctggcacccccagacaccagccctccacacctgacccattcctcaaaccccgctgcccctcgctggataacttggctgtgcctgagagccctggggtagggggaggcaaagcttccgagcccctgctctcgcccccaccttttggggagtcccggaaggccctagaggtgaagaaggaagagcttggggcatcctctcctagctatgggcccccaaacctgggctttgttgactcaccctcctcaggcacccacctgggtggcctggagttaaagacacctgatgtcttcaaagcccccctgacccctcgggcatctcaggtagagccccagagcccgggcttgggcctaaggccccaggagccaccccctgcccaggctttggcaccttctcctccaagtcacccagacatctttcgccctggctcctacactgacccatatgctcagcccccattgactcctcggccccaacctccgccccctgagagctgctgtgctctgccccctcgctcactgccctccgaccctttctcccgagtgcctgccagtcctcagtcccagtccagctcccagtctccactgacaccccggcctctgtctgctgaagctttttgcccatcacccgttacccctcgcttccagtcccctgacccttattctcgcccaccctcacgccctcagtcccgtgacccatttgccccattgcataagccaccccgaccccagccccctgaagttgcctttaaggctgggtctctagcccacacttcgctgggggctggggggttcccagcagccctgcccgcggggccagcaggtgagctccatgccaaggtcccaagtgggcagccccccaattttgtccggtcccctgggacgggtgcatttgtgggcaccccctctcccatgcgtttcactttccctcaggcagtaggggagccttccctaaagccccctgtccctcagcctggtctcccgccaccccatgggatcaacagccattttgggcccggccccaccttgggcaagcctcaaagcacaaactacacagtagccacagggaacttccacccatcgggcagccccctggggcccagcagcgggtccacaggggagagctatgggctgtccccactacgccctccgtcggttctgccaccacctgcacccgacggatccctcccctacctgtcccatggagcctcacagcgatcaggcatcacctctcctgtcgaaaagcgagaagacccagggactggaatgggtagctctttggcgacagctgaactcccaggtacccaggacccaggcatgtccggccttagccaaacagagctggagaagcaacggcagcgccagcgactacgagagctgctgattcggcagcagatccagcgcaacaccctgcggcaggagaaggaaacagctgcagcagctgcaggagcagtggggcctccaggcagctggggtgctgagcccagcagccctgcctttgagcagctgagtcgaggccagaccccctttgctgggacacaggacaagagcagccttgtggggttgcccccaagcaagctgagtggccccatcctggggccagggtccttccctagcgatgaccgactctcccggccacctccaccagccacgccttcctctatggatgtgaacagccggcaactggtaggaggctcccaagctttctatcagcgagcaccctatcctgggtccctgcccttacagcagcaacagcaacaactgtggcagcaacaacaggcaacagcagcaacctccatgcgatttgccatgtcagctcgctttccatcaactcctggacctgaacttggccgccaagccctaggttccccgttggcgggaatttccacccgtctgccaggccctggtgagccagtgcctggtccagctggtcctgcccagttcattgagctgcggcacaatgtacagaaaggactgggacctgggggcactccgtttcctggtcagggcccacctcagagaccccgtttttaccctgtaagtgaggacccccaccgactggctcctgaagggcttcggggcctggcggtatcaggtcttcccccacagaaaccctcagccccaccggcccctgaattgaacaacagtcttcatccaacaccccacaccaagggtcctaccctgccaactggtttggagctggtcaaccggcccccgtcgagcactgagcttggccgccccaatcctctggccctggaagctgggaagttgccctgtgaggatcccgagctggatgacgattttgatgcccacaaggccctagaggatgatgaagagcttgctcacctgggtctgggtgtggatgtggccaagggtgatgatgaacttggcaccttagaaaacctggagaccaatgacccccacttggatgacctgctcaatggagacgagtttgacctgctggcatatactgatcctgagctggacactggggacaagaaggatatcttcaatgagcacctgaggctggtagaatcggctaatgagaaggctgaacgggaggccctgctgcggggggtggagccaggacccttgggccctgaggagcgccctccccctgctgctgatgcctctgaaccccgcctggcatctgtgctccctgaggtgaagcccaaggtggaggagggtggacgccacccttctccttgccaattcaccattgctacccccaaggtagagcccgcacctgctgccaattcccttggcctggggctaaagccaggacagagcatgatgggcagccgggatacccggatgggcacagggccattttctagcagtgggcacacagctgagaaggcctcctttggggccacgggaggaccaccagctcacctgctgacccccagcccactgagtggcccaggaggatcctccctgctggaaaagtttgagctcgagagtggggctttgaccttgcctggtggacctgcagcatctggggatgagctagacaagatggagagctcactggtagccagcgagttacccctgctcattgaggacctgttggagcatgagaagaaggagctgcagaagaagcagcagctttcagcacagttgcagcctgcccagcagcagcagcaacagcagcagcagcattccctactgtctgcaccaggccctgcccaggccatgtctttgccacatgagggctcttctcccagtttggctgggtcccaacagcagctttccctgggtcttgcaggtgcccgacagccaggtttgccccagccactgatgcccacccagccaccagctcatgccctccagcaacgcctggctccatccatggctatggtgtccaatcaagggcatatgctaagtgggcagcatggagggcaggcaggcttggtaccccagcagagctcacagccagtgctatcacagaagcccatgggcaccatgccaccttccatgtgcatgaagccgcagcaattggcaatgcagcagcagctggcaaacagcttcttcccagatacagacctggacaaatttgctgcagaagatatcattgatcccattgcaaaggccaagatggtggctttgaaaggcatcaagaaagtgatggctcagggcagcattggggtggcacctggtatgaacagacagcaagtgtctctgctagcccagaggctctcggggggacctagcagtgatctgcagaaccatgtggcagctgggagtggccaggagcggagtgctggtgatccctcccagcctcgtcccaacccgcccacttttgctcagggagtgatcaatgaagctgaccagcggcagtatgaggagtggctgttccatacccagcagctcctacagatgcagctgaaggtgctagaggagcagattggtgtacaccgcaagtcccggaaggctctgtgtgccaagcagcgcactgccaaaaaagctggccgtgagttcccagaagctgatgctgagaagctcaagctggttacagagcagcagagcaagatccagaaacaactggatcaggtccggaaacagcagaaggagcacactaatctcatggcagaatatcggaacaagcagcagcaacaacagcagcagcagcagcaacaacagcaacagcactcagctgtgctggctctcagcccttcccagagtccccggctgctcaccaagctccctggtcagctgctccctggccatgggctgcagccaccacaggggcctccgggtgggcaagccggaggtcttcgcctgacccctgggggtatggcactacctggacagcctggtggccccttccttaatacagctctggcccaacagcagcaacagcaacattctggtggggctggatccctggctggcccttcagggggcttcttccctggcaaccttgctcttcgaagcctcggacctgattcaaggcttttacaggaaaggcagctgcagctgcagcagcaacgtatgcagctggcccagaaactgcagcagcagcagcagcagcaacagcagcagcagcaccttctaggacaggtggcaatccagcagcaacagcagcagggtcctggagtacagacaaaccaagctctgggtcccaagccccagggccttatgcctcccagcagccaccaaggcctcctggtccagcagctgtcccctcaaccaccccaggggccccagggcatgctgggccctgcccaggtggctgtgttgcagcagcagcaccctggagctttgggcccccagggccctcacagacaggtgcttatgacccagtcccgggtgctcagttccccccagctggcacagcagggtcagggccttatgggacacaggctggtcacagcccagcagcagcagcagcaacaacagcaccaacagcaagggtccatggcagggctgtcccatcttcagcagagtctgatgtcacacagtgggcagcccaaactgagcgctcagcccatgggctctttacagcagcttcagcagcagcagcagctgcaacagcaacagcaacttcagcagcagcagcagcagcagctacaacagcaacagcaacttcagcagcaacagcttcaacagcagcaacagcagcagcagcttcaacaacagcagcagcaacagcttcaacagcagcaacagcagctacaacagcaacagcaacaacaacagcagcagtttcaacagcagcagcaacagcagcagatgggccttttaaaccagagtcgaactttactgtctcctcagcaacaacagcagcagcaagtggcacttggccctggcatgccagcaaagcctcttcaacacttttctagccctggagccctgggtccaaccctcctcctgacgggcaaggaacaaaacaccgtagacccagccgtttcttcagaggccactgaggggccctctacacatcagggagggccgttagcaataggaactacccctgagtcaatggccactgaaccaggagaggtaaagccctcactctctggggactcacaactcctgcttgtccaaccccagccccagcctcagcccagctctctgcagctgcagccacctctgaggcttccaggacaacagcagcagcaagttagcctgctccacacagcaggtggaggaagccatgggcagctaggcagtggatcatcttctgaggcctcatctgtgccccacctgctggctcagccctctgtttccttaggggatcagcctgggtccatgacccagaaccttctgggcccccaacagcccatgctagagcggcccatgcaaaataatacagggccacaacctcccaaaccaggacctgtcctccagtctgggcagggtctgcctggggttggaatcatgcctacggtgggtcagcttcgagcacagctccaaggagtcctggccaaaaacccacagctgcggcacttaagtcctcagcagcagcagcagctacaggcactcctcatgcagcggcagctgcagcagagtcaggcagtacgccagaccccaccctaccaggagcctgggacccagacctctcccctccagggcctcctgggctgccaacctcaacttgggggcttccctggaccacagacaggccccctccaggagctaggggcagggcctcgacctcagggcccaccccggctccctgccccaccaggagccttatctacaggaccagtccttggccctgtccatcccacacctccaccatccagccctcaagagccaaagagaccttcacaattaccttcccccagctcccagcttcccactgaggcccagctccctcccacccatccagggacccccaaacctcaggggccaaccttggagccgcctcctgggagggtctcacctgctgctgcccagcttgcagataccttgtttagcaagggtctgggaccttgggatcccccagacaacctagcagaaacccagaagccagagcagagcagcctggtacctgggcatctggaccaggtgaatggacaggtggtgcctgaggcatcccaactcagcatcaagcaggaacctcgggaagagccatgtgccctgggagcccagtcagtgaagagggaggccaatggggagccaataggggcaccaggaaccagcaaccacctcctgctggcaggccctcgctcagaagctgggcatctgctcttgcagaagctactccgggcaaagaatgtgcaactcagcactgggcgggggtccgaggggctgcgagctgagatcaacgggcacattgacagcaagctggctgggctggagcagaaactacagggtacccccagcaacaaggaggatgcagcagcaaggaagcctttgacaccgaagcccaagcgggtacagaaggcaagcgacaggttggtgagctcccgaaagaagctgcggaaggaggacggggtcagggccagcgaggccttgctgaaacagctgaaacaggagctgtccctgctgcccctaacggagcctgctatcaccgccaattttagcctctttgccccctttggcagtggctgcccagtcaatgggcagagccagctgaggggggcctttggaagtggggcgctgcccactggccctgactactattcccagctgcttaccaagaataacctgagtaacccgccgacaccaccctcgtcgctgccccccaccccacccccatcggtgcagcagaagatggtgaatggcgtcaccccatctgaagagctgggggagcaccccaaggatgctgcctctgcccgggatagtgaaagggcactgagggatacttcagaggtgaagagtctagacctgctggctgccttgcctacaccccctcacaatcagactgaggatgtcaggatggagagtgatgaggatagcgattctcctgacagcattgtgccagcttcatcccctgagagcatcttgggggaggaggcccctcgtttccctcatctgggctcaggccggtgggagcaagaggaccgggccctctcccctgtcatccccctcattcctcgggccagcatcccagtcttcccagataccaaaccttatggggcccttggcctggaggtccctggaaagctgcctgtcacaacttgggaaaagggcaaaggaagtgaggtgtcagtcatgctcacagtctctgctgctgcagccaagaacctgaatggcgtgatggtggcagtggcggagctgctgagcatgaagatccccaactcctatgaggtgctgttcccagagagccccgcccgggcaggcactgagccaaagaagggggaagctgagggtcctggtgggaaggaaaagggtctggaaggcaagagcccagacactggccctgattggctgaagcagtttgatgcagtgttgcctggctataccctgaagagccaactagacatcttgagcctcctgaaacaggagagccccgccccagagccacccactcagcacagctatacctacaatgtctccaatctggatgtgcgacagctctcggccccacctcctgaagaaccctccccgcccccttcccccttggcaccttctcctgccagtccccctactgagcccttggttgaacttcccaccgaacccttggctgagccacccgtcccctcacctctgccactggcctcatcccctgaatcagcccgacccaagccccgtgcccggccccctgaagaaggtgaagattcccgtcctcctcgcctcaagaaatggaaaggagtgcgctggaagcggcttcggctgctgctgaccatccagaagggcagtgggcggcaggaggatgagcgggaagtggcagagtttatggagcagcttggcacagccttgcgacctgacaaggtaccgcgagacatgcgtcgctgctgtttctgtcatgaggagggtgacggggccactgatgggcctgcccgtctgctgaacctggacctggacctgtgggtgcacctcaactgtgccctttggtccacggaggtgtatgagacccagggcggggcactgatgaatgtggaggttgccctgcaccgaggactgctaaccaagtgctccctgtgccagcgaactggtgccaccagcagctgcaatcgcatgcgttgccccaatgtctaccattttgcttgtgccatccgtgccaagtgcatgttcttcaaggacaagaccatgctgtgtccaatgcataagatcaaggggccctgtgagcaagagctgagctcttttgctgtcttccggcgggtctacattgagcgggacgaggtgaagcaaatcgctagcatcattcagcggggagaacggctgcacatgttccgtgtggggggccttgtgttccacgccatcggacagctgctgcctcaccagatggctgactttcatagtgccactgccctctatcccgtgggctacgaggccacgcgcatctattggagcctccgcaccaacaatcgtcgctgctgctatcgctgttctattggtgagaacaacgggcggccggagtttgtaatcaaagtcatcgagcagggcctggaggacctggtcttcactgacgcctctccccaggccgtgtggaatcgcatcattgagcctgtggctgccatgagaaaagaggctgacatgctgcgactcttccctgagtatctgaagggcgaggagctctttgggctgacggtgcatgccgtgcttcgcatagctgaatcactgcccggggtggagagctgtcaaaactatttattccgctatgggcgccacccccttatggagctgccactcatgatcaaccccactggctgtgcccgatcagagcctaaaatcctcacacactacaaacggccccataccctgaacagcaccagcatgtctaaggcatatcagagcaccttcacaggcgagaccaacaccccctacagcaagcagtttgtgcactccaagtcatctcagtaccggcggctgcgcaccgaatggaagaacaacgtgtacctggctcgctcccgtatccagggcctggggctctatgcagccaaggacctagaaaagcacacaatggttatcgagtacattggcaccatcattcggaacgaggtggccaaccggcgggagaaaatctacgaagagcagaatcgaggcatctacatgttccgaataaacaatgaacatgtgattgatgctacgttgaccggcggccctgccaggtacattaaccattcctgtgcccctaactgtgtggccgaagtcgtgacatttgacaaagaggacaaaatcatcatcatctccagccggcgaatccccaaaggagaggagctaacctatgactatcagtttgattttgaggacgatcagcacaagatcccctgccactgtggagcctggaattgtcggaaatggatgaactaagaagctttgaggctaccaggcaggggagtccccctacccacaacctcttccctgaaagggatgagggggaagagaggtagcagccagagccaggacccagggttggggctgccggctgacccggagcccctggagcaggaggctggggcagagggccctaggccaagcccaccctgggcaccagggacaatcctcttccccaccaccggccctcaggctggcatctctgcccccagctccaggaggggccagacagaagcagccattgggcatctcaggtttgagggggatatgggccgggaactacccagaagcatctgggaggcagcagggtgggggaagaggatgtgtggccgggcctcacagccctgctgctcccactgacctctccggcccaactcacggctgcaaagagacttgactaagcttgacaatcccaaaggccgggtcccacacctggccctgcctgccgggtcctgcccccaccctcacccccatccccctccctcttgatctgtctctgtttccctcttttcctctgtgtttctgtctctctatgggttgtgtttccttgttttccactctgacaaatgcaacatgaacgggaaagaggcgcccagctgcctaggagggcaagctgggcaagccgggcaaggagaccccgcacccacacctacctcatttaagtgttggattttttgctgttttgaaatgtgagaccctctccaagccccctactgccccaaccctctcccccacctcactgccctcttctgagtgggtggaaggggggtaggaggaggaagaaaaacaacaacaaaaaatccatctttgtttttaattatgggcatgggatggtggttgaggcaaatgatgatgaagattggggatgactggcccctagttgctctaggacttccttctccatctggacatgggggcaggagggagctaaacctaggaccaggatatctccctcctgttttcccaacctcatcatgagcctgtttgccctccagcccctggacgggttgggtggggggtagggtgagggctatccctgagtggcatgcccatacctagtgaggcagggtgtggcccggagctcccactttccctcagtcaccaaactgctgctggtctggtgggaaggggtggtgatgtgggggtgggggagcttagtgtcagcgcggggagggtggggggtatttatctatttatacatgggattgtacatagtcttgtggggcatgggggagccggctggaggtgagaaccctcccctctccccccaccccccggggagagcaaatgtaaaactactaatttttgtgctttatatattctatataaatatatctattttctttttacaaaaccagtttataaatggtaggggggtgtggggcggacacatggagctccccttgtgggggggccccctccattacccgacctaccgcccttttcctcaccccccaccccactccccaccccctggctgtgactgctgtaagatgggggtatagaggctgggcaattcccaccccctgttgtatagttggactatgttataacgcacaaaagagagctgaccccagggggagccagagggtgatgggttccttgcctccctttccttcccctttctgcccaagcttgtgctgcagttgaacctcttcctgggggtgggagtaggtaaggggtgggtgaggccccaaacccctctctggtagggaaccgtggggatgaagatgaagcttatatgcagttctcttctaggggctgtgggcaaagggcattttgtaattaatattttcaagaatcagatgtctggagtgtaggggtgggcttggtggtggtggacgggcgggcctgctggagggggagcttggtcgctgttgtgattttaggtttgtttttgttttgttttgaatttggggggttgtggattgttgggggtagggagattttttttttttaaagctgcttcctcaactgtttcaagctgcaaatgtttaagagaataacagcccccactcccacaggaaccgctgtaattaaatcagacagtaggaagactgggctgctgccctcaaagccacagcccttggatgttccttttccgagagcagaaggtctaggctacagggagggggagattggctcccgtgagtcaggctgtgtttggggcttgggccctgggattgggaaaaggggatggggcagactttgtaagcatatgctaggtatccgatagtcctgtagaatttagtgaagaaaccttatacagtttttaatttttatataaactataactcagacccaagctacaaggttggaattttggttggttttttttttaagtaccctgcctgtataattgcatcagaatcccccaccccaccccccgcccccgtgtttgtattttgggttggtttacactcgcacatactcagttttcagttttcccctttacagtcttctcccctcacctccaggaccctccccctttttaaaaaataaatcgctgacaagtgtgaatcccgtgaagactttattttgtgttgtgtgtatcctgtacagcaaggttggtccttcgtaacaacggatgaaatggttcccttttttaaagcgccctctctccctccaccctcagcgcccctgtccttggcatgttttgtatcagcgatcattctgaactgtacatatttatgttgcgagaggcaaagggcaagttttggattttgcttcttccaagtttgtttttaaacgacaaataaaaaaagaacattttaaatacaa

SEQ ID NO: 19006 - DNA, 636 bp, Homo sapiens
  source 1..636: mol_type = unassigned DNA
ggggggagggtggccactccgacctggatttaccgttcttggcccccctaagcccccccgtgcggggggcggctgtgatcgctctggcggttggaggtcggggagcggcccgggctctggccatgttctcggatgaggatttctggatcgccctgtgaagaggtctccccgagagggccctgcccagtcggagagagggatggacagccagaagctggctggtgaggataaagattcagaaccggcagctgatggacctgcagcttctgaggacccaagtgccactgagtcagacctgcccaacccacatgtgggagaggtctctgtccttagttctgggagtcccaggcttcaggagactcctcaggactgcagtgggggtccggtgcggcgttgtgctctctgtaactgcggggagcccagtctacacgggcagcgggagctacggcgctttgagttgccatttgattggccccggtgtccagtggtgtcccctggggggagcccagggcccaatgaggcagtgctgcccagtgaggacctatcacagattggtttccctgagggccttacacctgcccacctaggagaacctggagggtcctgctgggctcaccattggtgtgctgcatggtc
